United States Patent Application Publication US 2018/0126003 A1 - sequence listing, part 185

SEQ ID NO: 329582 - protein, 1007 aa, Artificial Sequence
  derived and/or modified sequence
MVSKMIIENFEALKSWLSKTLEPICDADPSALAKYVLALVKKDKSEKELKALCIDQLDVFLQKETQIFVEKLFDAVNTKSYLPPPEQPSSGSLKVEFFPHQEKDIKKEEITKEEEREKKFSRRLNHSPPQSSSRYRENRSRDERKKDDRSRKRDYDRNPPRRDSYRDRYNRRRGRSRSYSRSRSRSWSKERLRERDRDRSRTRSRSRTRSRERDLVKPKYDLDRTDPLENNYTPVSSVPSISSGHYPVPTLSSTITVIAPTHHGNNTTESWSEFHEDQVDHNSYVRPPMPKKRCRDYDEKGFCMRGDMCPFDHGSDPVVVEDVNLPGMLPFPAQPPVVEGPPPPGLPPPPPILTPPPVNLRPPVPPPGPLPPSLPPVTGPPPPLPPLQPSGMDAPPNSATSSVPTVVTTGIHHQPPPAPPSLFTADTYDTDGYNPEAPSITNTSRPMYRHRVHAQRPNLIGLTSGDMDLPPREKPPNKSSMRIVVDSESRKRTIGSGEPGVPTKKTWFDKPNFNRTNSPGFQKKVQFGNENTKLELRKVPPELNNISKLNEHFSRFGTLVNLQVAYNGDPEGALIQFATYEEAKKAISSTEAVLNNRFIKVYWHREGSTQQLQTTSPKVMQPLVQQPILPVVKQSVKERLGPVPSSTIEPAEAQSASSDLPQNVTKLSVKDRLGFVSKPSVSATEKVLSTSTGLTKTVYNPAALKAAQKTLLVSTSAVDNNEAQKKKQEALKLQQDVRKRKQEILEKHIETQKMLISKLEKNKTMKSEDKAEIMKTLEVLTKNITKLKDEVKAASPGRCLPKSIKTKTQMQKELLDTELDLYKKMQAGEEVTELRRKYTELQLEAAKRGILSSGRGRGIHSRGRGAVHGRGRGRGRGRGVPGHAVVDHRPRALEISAFTESDREDLLPHFAQYGEIEDCQIDDSSLHAVITFKTRAEAEAAAVHGARFKGQDLKLAWNKPVTNISAVETEEVEPDEEEFQEESLVDDSLLQDDDEEEEDNESRSWRR

SEQ ID NO: 329583 - DNA, 3693 bp, Artificial Sequence
  derived and/or modified sequence
tagcggccgcgacctgggcgggcggaggagtgtgacgggccttagggccgctgtggatggtttctaaaatgatcattgaaaacttcgaggcactcaagtcctggctcagcaagactctcgagcccatctgtgatgcagatccatccgccctagcaaaatatgttctggctttggtaaagaaagacaaaagtgaaaaagagttaaaggcattatgtattgatcagctggatgtatttcttcagaaagagacacagatatttgtggaaaaactttttgatgctgtgaatacaaagagttacctacctcctccagagcagccatcatcaggaagcctgaaggtagaattttttccacaccaagaaaaagatataaagaaggaagagatcactaaggaggaagagcgagagaagaagttttctagaaggctaaatcacagtcctccccagtcaagctcccgatacagggaaaatagaagccgtgatgagaggaaaaaagatgatcgttctcgcaaaagagattatgatcgaaaccctcctcgaagagattcatacagagaccggtacaatagaagacgagggcggagtcgcagttatagcaggagtcgaagtcgaagttggagtaaagagaggcttcgtgagagggacagagatagaagcaggactagaagcagaagcagaacacgaagcagggaaagggatctggtaaaacctaaatatgacctggatagaacagatccattagaaaataattatactccagtctcttcggtacctagtatttcatctggccactaccctgtacctactttgagcagcactattacagtaattgctcctactcatcatggaaacaacactaccgaaagttggtctgaatttcatgaagaccaagtggaccataactcttacgtaagaccacccatgccaaagaaacggtgtagagactatgatgaaaagggtttttgtatgagaggagacatgtgtccttttgatcatggaagtgatccagtagttgtagaagatgtgaatcttcctggtatgctgcctttcccagcacagcctcctgttgttgaaggaccacctcctcctggactccccccacctccaccaattcttacacccccacctgtgaatctcaggcccccagtaccaccgccaggtccattgccacccagtctcccacctgttacaggaccaccacctccacttcctcctttgcagccatctggcatggatgctcctccaaactctgcaaccagttctgttcctactgtagtaacaactggcattcatcaccagcctcctcctgctccaccctctctttttactgcagatacatatgacacagatggctacaatcctgaagccccaagcataacaaacacttccagacctatgtatagacacagagtgcatgcacaaaggcccaacttgataggactaacatcaggggatatggatttgccacccagagaaaagcctcccaataaaagcagtatgaggatagtagtggactcagaatcaaggaaaagaaccattggttctggagagcctggagttcctacaaagaagacttggtttgataaaccaaattttaatagaacaaacagcccaggctttcagaagaaggttcaatttggaaatgaaaataccaagcttgaacttagaaaagttcctccagaattaaataatatcagcaaacttaatgaacattttagtcgatttggaaccttggttaacttacaggttgcttataatggtgatcctgaaggtgccctaatccaatttgcaacatacgaagaagcaaagaaagcaatatcaagtacggaagcagtattaaacaatcgctttattaaggtttattggcacagagaaggaagcacccaacagttacaaactacttctccaaaggtaatgcagcctttagtccagcagcccattttgcctgttgtgaagcagtcagtcaaagagcggctgggtccagtaccttcaagtactattgaacctgcagaagcccagagtgcctcttcagaccttcctcagaatgtaactaagttatctgtgaaggacaggttgggttttgtatcaaagccatctgtttcagcaactgaaaaggtgttgtctacatctactggcctaacaaaaacagtgtataatccagctgctttgaaggctgcacagaaaaccttacttgtttccacctctgcagttgataataatgaagcacagaaaaaaaaacaggaggcattgaaacttcagcaggatgtaaggaaaaggaaacaagaaattttagaaaagcacattgaaacacagaagatgttaatttcaaaactggagaaaaacaaaacaatgaagtctgaagataaagcagaaataatgaaaactttagaggttttgacaaaaaatattaccaagttgaaagatgaggtcaaagctgcttctcctggacgctgtcttccaaaaagtataaaaaccaagactcagatgcagaaggaattacttgacacagaactggatttatataagaagatgcaggctggagaagaagtcactgaacttaggagaaagtatacagaattacagctggaagctgccaaacgagggattctttcatctggtcggggcagaggaattcattcaagaggtcgaggtgcagttcatggccgaggcagggggcgagggcgagggcgaggtgtgcctggtcatgctgtggtggatcaccgtcccagggcattggagatttctgcatttacggagagcgatagagaagatcttcttcctcattttgcgcaatatggtgaaattgaagattgtcagattgatgattcctcacttcatgcagtaattacattcaagacaagagcagaagctgaagcagctgcagttcatggagctcgtttcaaagggcaagatctaaaactggcatggaataaaccagtaactaatatttcagctgttgaaacagaagaagttgagcctgatgaagaagaatttcaggaagagtctttggtggatgactcattacttcaagatgatgatgaagaagaagaggacaatgaatctcgttcttggagaagatgatttgactgatcattgatctgcatatgctagaactctacctgtgtttcattagtattatctaatgtacttttacatatttgtaaaaacaatttttggtaaaatgtgatgaagatggatttcacaaatagacaaaaaagaagaaaactaccttctgatcttgtattttgaaagattgatgtttgcattttacttcagtaaacaattgctaaagacatcacactagaaacatatgcaatgtttttattacatacttctactggacatcacagaattctttgggttctttgtaatttaatgaataggtctgaaaacttatgaccaatacttgttataacttagaggactttgttttattccaaataaggaatgaatttgcatttaaaatcttaatgaatgttttcaaaactgaatagataacatagtactctaactaaagtctccaagttatgtattataatattacatagtagtatgcttaggctttactatgtattagccttttgttggactgtgtatgtattttaccatatgggttttaatgataatggtgtatgactgctttacatgagtccttatgcatccagatgttataataaagtggaatggtctcttt

SEQ ID NO: 329584 - DNA, 3024 bp, Artificial Sequence
  derived and/or modified sequence
atggtgagcaagatgatcatcgagaacttcgaggccctgaagagctggctgagcaagaccctggagcccatctgcgacgccgaccccagcgccctggccaagtacgtgctggccctggtgaagaaggacaagagcgagaaggagctgaaggccctgtgcatcgaccagctggacgtgttcctgcagaaggagacccagatcttcgtggagaagctgttcgacgccgtgaacaccaagagctacctgcccccccccgagcagcccagcagcggcagcctgaaggtggagttcttcccccaccaggagaaggacatcaagaaggaggagatcaccaaggaggaggagagagagaagaagttcagcagaagactgaaccacagccccccccagagcagcagcagatacagagagaacagaagcagagacgagagaaagaaggacgacagaagcagaaagagagactacgacagaaacccccccagaagagacagctacagagacagatacaacagaagaagaggcagaagcagaagctacagcagaagcagaagcagaagctggagcaaggagagactgagagagagagacagagacagaagcagaaccagaagcagaagcagaaccagaagcagagagagagacctggtgaagcccaagtacgacctggacagaaccgaccccctggagaacaactacacccccgtgagcagcgtgcccagcatcagcagcggccactaccccgtgcccaccctgagcagcaccatcaccgtgatcgcccccacccaccacggcaacaacaccaccgagagctggagcgagttccacgaggaccaggtggaccacaacagctacgtgagaccccccatgcccaagaagagatgcagagactacgacgagaagggcttctgcatgagaggcgacatgtgccccttcgaccacggcagcgaccccgtggtggtggaggacgtgaacctgcccggcatgctgcccttccccgcccagccccccgtggtggagggcccccccccccccggcctgcccccccccccccccatcctgacccccccccccgtgaacctgagaccccccgtgcccccccccggccccctgccccccagcctgccccccgtgaccggcccccccccccccctgccccccctgcagcccagcggcatggacgccccccccaacagcgccaccagcagcgtgcccaccgtggtgaccaccggcatccaccaccagcccccccccgccccccccagcctgttcaccgccgacacctacgacaccgacggctacaaccccgaggcccccagcatcaccaacaccagcagacccatgtacagacacagagtgcacgcccagagacccaacctgatcggcctgaccagcggcgacatggacctgccccccagagagaagccccccaacaagagcagcatgagaatcgtggtggacagcgagagcagaaagagaaccatcggcagcggcgagcccggcgtgcccaccaagaagacctggttcgacaagcccaacttcaacagaaccaacagccccggcttccagaagaaggtgcagttcggcaacgagaacaccaagctggagctgagaaaggtgccccccgagctgaacaacatcagcaagctgaacgagcacttcagcagattcggcaccctggtgaacctgcaggtggcctacaacggcgaccccgagggcgccctgatccagttcgccacctacgaggaggccaagaaggccatcagcagcaccgaggccgtgctgaacaacagattcatcaaggtgtactggcacagagagggcagcacccagcagctgcagaccaccagccccaaggtgatgcagcccctggtgcagcagcccatcctgcccgtggtgaagcagagcgtgaaggagagactgggccccgtgcccagcagcaccatcgagcccgccgaggcccagagcgccagcagcgacctgccccagaacgtgaccaagctgagcgtgaaggacagactgggcttcgtgagcaagcccagcgtgagcgccaccgagaaggtgctgagcaccagcaccggcctgaccaagaccgtgtacaaccccgccgccctgaaggccgcccagaagaccctgctggtgagcaccagcgccgtggacaacaacgaggcccagaagaagaagcaggaggccctgaagctgcagcaggacgtgagaaagagaaagcaggagatcctggagaagcacatcgagacccagaagatgctgatcagcaagctggagaagaacaagaccatgaagagcgaggacaaggccgagatcatgaagaccctggaggtgctgaccaagaacatcaccaagctgaaggacgaggtgaaggccgccagccccggcagatgcctgcccaagagcatcaagaccaagacccagatgcagaaggagctgctggacaccgagctggacctgtacaagaagatgcaggccggcgaggaggtgaccgagctgagaagaaagtacaccgagctgcagctggaggccgccaagagaggcatcctgagcagcggcagaggcagaggcatccacagcagaggcagaggcgccgtgcacggcagaggcagaggcagaggcagaggcagaggcgtgcccggccacgccgtggtggaccacagacccagagccctggagatcagcgccttcaccgagagcgacagagaggacctgctgccccacttcgcccagtacggcgagatcgaggactgccagatcgacgacagcagcctgcacgccgtgatcaccttcaagaccagagccgaggccgaggccgccgccgtgcacggcgccagattcaagggccaggacctgaagctggcctggaacaagcccgtgaccaacatcagcgccgtggagaccgaggaggtggagcccgacgaggaggagttccaggaggagagcctggtggacgacagcctgctgcaggacgacgacgaggaggaggaggacaacgagagcagaagctggagaagatag

SEQ ID NO: 329585 - DNA, 3024 bp, Artificial Sequence
  derived and/or modified sequence
atggtgagcaagatgatcatagaaaatttcgaagctttaaaatcatggctgtccaagacccttgagccaatctgcgatgcagaccctagtgctctagccaaatacgtcctggccctcgtgaaaaaggacaagtcagaaaaagaacttaaagcgctgtgtatcgaccagttggatgtgttcttacaaaaagagacacagatcttcgtcgaaaagctgttcgatgcagtcaacaccaaatcatacttaccaccccccgaacaaccctcttcaggtagtctcaaggtggaatttttcccacatcaagaaaaagatataaaaaaggaagagatcaccaaagaggaagagagggaaaaaaaattcagccgaagacttaaccacagccctccccagtcatcttcacggtacagggaaaacaggtcccgtgacgagaggaaaaaggacgaccgcagcaggaaaagggattatgaccggaatccacctaggcgtgattcgtaccgggataggtataaccgtaggagggggcgttcccggtcgtacagcagatcacggtccagatcttggtctaaagagcggcttagggagagggatagagacaggtcacgcaccagatctagatctagaactcgttcaagggaaagagatcttgtcaaaccaaaatatgatctagacaggacagaccccctcgaaaacaactacactcctgtctcctccgtgccaagcattagcagcggacactacccggtccctacactgagttctacaattaccgtgatcgcccctacccaccatggaaacaatacaactgaaagttggtccgaatttcatgaagaccaggttgatcacaattcctacgtgcggccccctatgccgaaaaagaggtgccgtgattatgatgagaagggtttctgtatgcgtggggatatgtgcccttttgaccatgggtcggaccctgtggtcgtagaagacgtgaacttgcctggaatgttaccattcccagcccagccccctgtcgtggaaggacccccaccccctgggctacccccaccgcccccaatactgactccgcctcccgtgaatctgagaccccctgtccctccacctggtccactccccccttccctacctccggtgaccgggccgcccccacccctcccgcctttacagcctagcggaatggatgctccacctaattcagccacaagttcagtgcccactgtagtgacaaccggaattcaccaccagccacctcctgcgcccccctcgctgttcacagctgatacctacgataccgatggatacaatccagaggcgcctagcatcaccaatacctctcgacccatgtacagacaccgcgttcacgcccagcggcccaatcttatcggcctgacaagtggtgatatggaccttcctcctcgtgagaagccccctaataagtcttccatgcgtatcgtcgtggactccgagtcgcggaagagaactattggcagcggtgagcccggagtccccaccaagaagacttggttcgacaagcccaacttcaacagaactaactcgccgggatttcagaaaaaagtgcagttcggaaacgagaataccaaactggagcttcgcaaggtgccccccgagcttaacaatatcagtaaattgaacgaacacttttcccgcttcggtaccctagtgaacctgcaggtcgcttacaatggcgatcccgaaggtgctctcatccagtttgccacctatgaagaggcaaagaaggctatctcttctactgaggccgtgttgaacaaccgattcataaaagtgtattggcatcgggagggcagcacccagcaactacagaccacctctccgaaagtcatgcagcctctcgtgcagcaaccaatacttcccgtagttaagcagtctgtaaaggagcgactagggccagtaccaagctccactatcgaaccagccgaggcccaaagcgcaagcagcgacttgcctcaaaatgtgaccaaactcagtgttaaggatagactgggatttgtgtccaagccctccgtgtccgctactgaaaaagtgctgtcaacctccacaggactgacaaagactgtctacaatcctgccgctctaaaagcagcccaaaaaacgctgctcgtttctacatcggcagtcgacaacaacgaggcccaaaaaaagaagcaggaggcacttaagctccagcaggacgtgagaaagcgcaaacaagaaatcctcgagaagcatatagagactcagaagatgctcattagtaagctggagaaaaataagactatgaagtctgaagataaagccgaaataatgaaaacactggaggtgctgaccaaaaacatcactaagctaaaagatgaagttaaggcagccagtccgggccgctgcctccccaagagcatcaagaccaaaacacaaatgcagaaggagctcctggatactgagctggatctctataagaagatgcaagcgggcgaggaggttaccgagctgaggaggaagtatactgaattgcagctggaagcggccaagcgaggcattcttagcagcggccgtggccggggaattcatagcagggggaggggagccgtgcacgggaggggccgaggccgagggcgcggtagaggggtgcctgggcatgcggtcgtggatcacagacccagagccctggagattagcgctttcacagagtctgaccgagaggacctgctcccccatttcgctcagtacggcgaaattgaggactgtcagatcgatgattccagcttgcacgccgtgatcacattcaagacccgcgcagaagccgaggcagcagctgtacatggggcgcgctttaaaggccaggacctgaagcttgcatggaataagcctgttacgaacatcagtgccgtcgaaacagaggaagtggagccagacgaggaagaatttcaggaagaaagcttagtcgatgactccctcctccaagacgacgacgaagaggaagaggacaatgaatcgaggtcatggcggagatag

SEQ ID NO: 329586 - DNA, 3024 bp, Artificial Sequence
  derived and/or modified sequence
atggtgtccaagatgatcatcgagaactttgaggccctgaagtcctggctgagcaagaccctggagcccatctgtgatgctgaccccagcgccctggccaagtatgtgctggccctggtgaagaaggacaagtctgagaaggagctgaaggccctgtgcatcgaccagctggatgtgttcctgcagaaggagacccagatctttgtggagaagctgtttgatgctgtgaacaccaagagctacctgcccccacctgagcagcccagcagcggcagcctgaaggtggagttcttcccccaccaggagaaggacatcaagaaggaggagatcaccaaggaggaggagcgggagaagaagttcagccggcggctgaaccacagccccccccagagcagcagccgctacagagaaaatagaagcagagatgagaggaagaaggatgacaggagcaggaagagggactatgacagaaatcctccaagaagagacagctacagagaccgctacaacagaagaagaggccgcagccgcagctacagccgcagccgcagccgctcctggagcaaggagcggctgcgggagcgggaccgggacaggagcaggaccaggagccgcagcaggaccaggagccgggagcgggacctggtgaagcccaagtatgacctggacagaacagaccccctggagaacaactacacccctgtgtcctctgtgcccagcatcagcagcggccactaccctgtgcccaccctgagcagcaccatcaccgtcatcgcccccacccaccacggcaacaacaccacagagagctggagcgagttccacgaggaccaggtggaccacaacagctatgtgcggccccccatgcccaagaagcgctgccgggactatgatgagaagggcttctgcatgagaggagacatgtgcccctttgaccacggcagtgaccctgtggtggtggaggatgtgaacctgcccggcatgctgcccttccctgcccagccccctgtggtggagggccccccacctcctggcctgcccccacctccacccatcctgaccccacctcctgtgaacctgcggccccctgtgcccccacctggccccctgccccccagcctgccccctgtgacaggccccccaccacccctgccccccctgcagcccagcggcatggatgccccacccaacagcgccaccagctctgtgcccaccgtggtgaccaccggcatccaccaccagcccccaccagccccacccagcctcttcaccgctgacacctatgacacagatggctacaaccctgaggcccccagcatcaccaacaccagccggcccatgtaccgccaccgggtgcacgcccagaggcccaacctgattggcctgaccagcggggacatggacctgcccccccgggagaagccacccaacaagagctccatgagaattgtggtggacagcgagagcaggaagaggaccatcggcagcggggagcccggggtgcccaccaagaagacctggtttgacaagcccaacttcaacagaaccaacagccctggcttccagaagaaggtgcagtttggaaatgaaaacaccaagctggagctgaggaaggtgcccccagagctgaacaacatcagcaagctgaatgagcacttcagccgcttcggcaccctggtgaacctgcaggtggcctacaatggagaccctgagggcgccctgatccagtttgccacctatgaggaggccaagaaggccatcagcagcacagaggccgtgctgaacaaccgcttcatcaaggtgtactggcaccgggagggcagcacccagcagctgcagaccaccagccccaaggtgatgcagcccctggtgcagcagcccatcctgcctgtggtgaagcagagcgtgaaggagcggctgggccctgtgcccagcagcaccatcgagcctgctgaggcccagagcgccagcagtgacctgccccagaatgtgaccaagctgtctgtgaaggaccggctgggctttgtgtccaagcccagcgtgtctgccacagagaaggtgctgagcaccagcacaggcctgaccaagacagtgtacaacccagctgccctgaaggccgcccagaagaccctgctggtgtccaccagcgctgtggacaacaatgaggcccagaagaagaagcaggaggccctgaagctgcagcaggatgtgaggaagaggaagcaggagatcctggagaagcacatcgagacccagaagatgctgatcagcaagctggagaagaacaagaccatgaagtctgaggacaaggccgagatcatgaagaccctggaggtgctgaccaagaacatcaccaagctgaaggatgaggtgaaggccgccagccctggccgctgcctgcccaagagcatcaagaccaagacccagatgcagaaggagctgctggacacagagctggacctgtacaagaagatgcaggccggggaggaggtgacagagctgcggaggaagtacacagagctgcagctggaggccgccaagaggggcatcctgagcagcggccggggccggggcatccacagccggggccgcggggctgtgcacggccggggccggggccggggccggggccggggcgtgcccggccatgctgtggtggaccaccggccccgggccctggagatcagcgccttcacagaaagtgaccgggaggacctgctgccccactttgcccagtatggagaaattgaggactgccagattgatgacagcagcctgcacgccgtcatcaccttcaagaccagggctgaggccgaggccgctgctgtgcacggggcccgcttcaagggccaggacctgaagctggcctggaacaagcctgtgaccaacatctctgctgtggagacagaggaggtggagccagatgaggaggagttccaggaggagagcctggtggatgacagcctgctgcaggatgatgatgaggaggaggaggacaatgaaagccgctcctggaggaggtag

SEQ ID NO: 329587 - DNA, 3024 bp, Artificial Sequence
  derived and/or modified sequence
atggtgagcaagatgatcatcgagaacttcgaggccctgaagagctggctgtctaagactctggagccaatttgcgatgccgatccaagtgccttggccaagtacgtgcttgcccttgtgaaaaaggacaagtctgaaaaagaactgaaggctttatgtatcgatcagttggacgtgttcttacagaaagagactcagattttcgttgagaagctattcgatgcagtaaatacaaaaagttacctgccaccccccgagcagccatcttcaggctctctcaaggttgagtttttcccccaccaagaaaaagatataaagaaggaagagataacaaaggaggaggagcgtgagaaaaaattcagtcggaggctgaaccactcaccgccgcagtcctcaagtcggtatcgcgagaatcgttcccgggacgaacgaaaaaaggatgacagaagcaggaaaagggactacgatcggaacccgccgcgcagggattcttaccgggataggtacaataggcggcgcgggagatcacgtagctactcacgctctaggagtcgctcttggtccaaagagagattacgggagagggatcgtgatcgctcacggacacgttctaggtctcgcacacgcagcagggagcgtgacctggtgaaacccaagtacgacctagacaggactgatccactagagaacaattatacgcctgtgtcctctgttccttccatctcttcgggccattaccctgttccgacactgtcctctaccataacagtaatcgctccgactcaccatggcaataacaccacggagagttggtcagaatttcacgaggaccaggtcgatcacaattcatacgtgcgaccacctatgccaaaaaaaaggtgtcgtgattacgatgagaagggcttttgtatgcggggtgacatgtgtccgttcgatcacgggtctgaccccgtggtggtcgaggatgtgaacctgccagggatgttaccatttcccgcccagcctcctgttgttgaaggaccccctccacctggactcccgcctcctccccccatattgacacctcctcctgtcaacttaaggccacccgtgcctccaccgggacccctcccacccagtctccccccagtgaccgggccccctccacccttaccacctctacagccatctgggatggatgcgcccccaaacagcgccacctcctctgtgccgacagtggttactactggtatccatcaccagcctcctccagcccctccaagcctcttcacagctgatacttacgacacggatggctacaacccagaagccccgtctataaccaatacaagccgacccatgtataggcaccgagtccatgcacagcggccaaacctcatcgggctcaccagtggagacatggacctgcccccacgcgaaaaaccacctaacaagtcatccatgcggattgtcgtcgacagtgaaagccgcaagagaacgattggatcaggcgaaccaggagtgccaactaaaaagacctggttcgacaagccgaatttcaaccgcacaaactctcctggattccaaaaaaaggtgcaattcggcaacgagaatactaaactggagctgcggaaagtacctccggaactgaataatatttcaaagctgaacgaacatttctccaggttcggcacactcgtgaacttacaagtggcttataatggagaccccgaaggagccctcatccaattcgccacatatgaagaggctaagaaggccatatcctctacagaagcagtgctcaacaatcgtttcattaaggtgtactggcatcgggagggaagtacgcagcagctccaaacaacttcacccaaagtgatgcagccactggtccaacagccgatcctgccagtcgtgaagcaaagtgtaaaggagcgactaggtccagtgcccagctctaccatagagccagcagaggctcagtccgcatcctccgacctgccccagaacgtgacaaaattgagtgtgaaggaccgactgggcttcgtgagtaaaccctccgtgtccgccaccgagaaggtgctctcaacctcaaccggcctcaccaagaccgtctataaccctgccgctcttaaagcggctcaaaagacgctgctggttagcacctctgcggtggacaacaacgaggctcagaagaaaaaacaggaggccttaaagttgcaacaggacgtgcggaagcgcaagcaggaaattctagaaaagcacatcgagactcaaaagatgctgatcagcaaattagagaagaacaagacgatgaagtctgaggataaagcagaaatcatgaagaccctcgaggtgctgacaaagaacatcaccaaactcaaagatgaggtgaaagcggcttctccgggcagatgtctgccgaagtccattaagacaaaaacccagatgcaaaaggagctgctggacaccgaactggatctctataaaaagatgcaggctggggaggaagtgactgaattgaggcggaagtatactgagttgcaattagaagccgccaaaagaggaattttatcctcagggcgggggcgcggcattcactccaggggaagaggcgcagtgcacgggcgaggacggggcagagggcggggcaggggagtccccggtcacgctgtcgtggaccaccgcccccgggctcttgagatctcagctttcacagaatcggatcgcgaggatcttctgcctcatttcgcccaatacggggagatcgaggattgtcagatagatgatagcagtctccatgccgtgatcacgttcaaaactagggccgaggctgaagccgccgccgtccacggcgctcgttttaaagggcaggacctgaagctcgcctggaacaagcctgttactaatataagcgccgtcgaaaccgaagaagtggagcctgatgaagaggagttccaagaggagtccctagtggatgatagcctgctgcaggatgatgacgaagaggaggaggacaatgagagtcgctcttggaggaggtag

SEQ ID NO: 329588 - DNA, 3024 bp, Artificial Sequence
  derived and/or modified sequence
atggtgagcaaaatgatcatcgagaattttgaggccctgaagagctggctgtccaagacattggagccgatctgcgatgccgaccctagcgccctggccaagtatgtgcttgcactggtcaagaaagacaagagcgagaaagagctgaaagcactgtgtatcgaccagctggatgtcttcttacagaaggagacccagatatttgtggaaaaactgttcgatgcagtgaataccaagtcctacctgcctccccctgaacagccaagctcaggatccctcaaggttgaatttttcccccaccaagaaaaggacatcaaaaaagaggagattacaaaagaagaggagcgcgagaaaaagttcagccgtagacttaatcattccccaccccagtcctcctcccgctacagggaaaacagatctcgcgatgagagaaagaaagacgaccgatcccgcaagagagactacgacagaaatcccccaaggagggattcataccgcgataggtacaacaggcggcgtgggaggagtagatcgtatagtcgcagccggagccgcagctggagcaaggagagattaagagagagagatagggaccggtcaagaacacgctcccggtcacgcacaaggtcgagggaacgcgatcttgttaaacccaaatacgacctcgatcggacggatcccctggaaaataattatactcccgtgtcgtccgtgccgagtatttcatcgggacattatccagtgccaaccttatcttccaccataaccgtcatagccccaacccaccacggtaacaacactaccgaatcttggtccgagttccacgaagaccaagttgatcacaattcctatgtaaggcctcctatgcctaagaaaaggtgccgggattatgacgaaaagggcttctgcatgcgtggcgacatgtgcccttttgaccacggcagcgaccccgttgtggtggaggacgtaaatctgccgggaatgctgcctttcccagcacagccccctgtggtggaggggccaccccctcctggccttccaccaccaccgcctattcttacacccccacccgtgaatttgaggccgcctgttcctccgcctggccctctgcctcccagccttccgcctgtgaccgggccacctccccctctgccccctctccagccttcaggcatggatgcacctcccaattccgctacttctagtgtgcctaccgtggtgaccaccggaatacaccatcaacctccgccagcgccaccaagcctttttacggccgacacctacgacacagatggatacaatcccgaggccccatctattaccaacacctctcggcctatgtatcgacacagagtacacgctcaaaggccaaatctgattggcttgacaagtggcgacatggatctgccacccagggagaagccacctaacaagagtagcatgcgtatcgtcgtggactccgaatctaggaaacgtacaatcgggtctggagagcctggcgtcccaaccaagaagacatggttcgacaagcccaactttaatagaacaaactcacccggattccagaaaaaagtacagtttggtaacgagaatacaaaactggaactacgcaaggtgcccccagaactcaataacattagtaaattaaacgaacatttctcaagatttggaaccctcgttaaccttcaagtcgcatataacggtgaccctgaaggggctttgatccagtttgccacctacgaagaggccaagaaggccattagcagtactgaagccgtacttaataatcgctttatcaaggtttactggcaccgagagggttcaacccagcaactccagaccacatcacctaaggtcatgcagcctttggtgcaacaaccaatccttccagttgtgaaacagtctgttaaggaacgtctggggcctgttccatccagcacaatcgagcctgcggaagcacaatctgccagtagtgacctgccccagaatgtgacaaagctgagtgtcaaagataggctggggtttgtctcaaagccaagtgtcagcgctactgagaaggtgctaagcacgtccactggcctgaccaagactgtgtacaatcccgctgctctaaaggcggctcagaagaccctgctggtgagcacatccgcagtcgacaataatgaggctcagaagaagaagcaggaggccctgaaactgcagcaagatgtgagaaagcgaaaacaagagattttggagaagcatatagaaacacagaaaatgctgatatctaaacttgaaaaaaacaagaccatgaagtctgaggataaggccgagatcatgaaaaccctagaggtgttaaccaaaaatatcaccaagttgaaggacgaggttaaggccgcatccccaggcaggtgcctgcctaaatcgatcaagaccaaaacacagatgcagaaggaattgctggatactgaactggatctgtacaaaaagatgcaggccggagaggaggttacggagctgcggcgaaagtacaccgaactgcaactcgaggcggctaagcgcggtattctcagcagtgggaggggcaggggaatccacagtagagggagaggagccgtgcatgggcgaggcagagggagaggaagaggcaggggggtgcccggtcatgctgttgtggatcaccgccctcgagcattagagatttccgcgtttaccgagtcggatcgtgaagatttactgccacattttgcacagtatggtgaaatcgaggactgtcagatcgacgattcctcgctgcatgccgttataacgtttaaaacacgcgcagaggcggaggcagccgcagtacacggcgcaaggtttaagggacaggacttgaaattggcatggaataagcccgtgaccaacatttctgctgtcgagactgaagaggttgaacccgatgaggaggaattccaggaagagtccttggtcgatgacagtctcctgcaagacgacgatgaggaggaggaggacaatgaaagtaggtcttggagaaggtag

SEQ ID NO: 329589 - protein, 836 aa, Artificial Sequence
  derived and/or modified sequence
MAAALGPPEVIAQLENAAKVLMQTLACSILTALLSEFSSSSKTSNIGLSMEFHGNCKRVFQEEDLRQIFMLTVEVLQEFSRRENLNAQMSSVFQRYLALANQVLSWNFLPPKLGRHYIAMFESSQNVLLKPTESWRETLLDSRVMELFFTVHRKIREDSDMAQDSLQCLAQLASLHGPIFPDEGSQVDYLAHFIEGLLNTINGIEIEDSEAVGISSIISNLITVFPRNVLTAIPSELFSSFVNCLTHLTCSFGRSAALEEVLDKDDMVYMEAYDKLLESWLTLVQDDKHFHKGFFTQHAVQVFNSYIQCHLAAPDGTRNLTANGVASREEEEISELQEDDRDQFSDQLASVGMLGRIAAEHCIPLLTSLLEERVTRLHGQLQRHQQQLLASPGSSTVDNKMLDDLYEDIHWLILVTGYLLADDTQGETPLIPPEIMEYSIKHSSEVDINTTLQILGSPGEKASSIPGYNRTDSVIRLLSAILRVSEVESRAIRADLTHLLSPQMGKDIVWFLKRWAKTYLLVDEKLYDQISLPFSTAFGADTEGSQWIIGYLLQKVISNLSVWSSEQDLANDTVQLLVTLVERRERANLVIQCENWWNLAKQFASRSPPLNFLSSPVQRTLMKALVLGGFAHMDTETKQQYWTEVLQPLQQRFLRVINQENFQQMCQQEEVKQEITATLEALCGIAEATQIDNVAILFNFLMDFLTNCIGLMEVYKNTPETVNLIIEVFVEVAHKQICYLGESKAMNLYEACLTLLQVYSKNNLGRQRIDVTAEEEQYQDLLLIMELLTNLLSKEFIDFSDTDEVFRGHEPGQAANRSVSAADVVLYGVNLILPLM

SEQ ID NO: 329590 - DNA, 78 bp, Artificial Sequence
  derived and/or modified sequence
atggagagattcgtgagagtgccctacggcctgtaccagggctacggcagcaccgtgcccctgggccagcccggctag

SEQ ID NO: 329591 - DNA, 78 bp, Artificial Sequence
  derived and/or modified sequence
atggagcggttcgtgagggtgccgtatggcttgtaccagggatatgggagcacggtgccgcttgggcagcccgggtag

SEQ ID NO: 329592 - DNA, 78 bp, Artificial Sequence
  derived and/or modified sequence
atggagagatttgtgcgggtgccctacggcctgtaccagggctacggcagcacagtgcccctgggccagcccggctag

SEQ ID NO: 329593 - DNA, 78 bp, Artificial Sequence
  derived and/or modified sequence
atggagcggttcgtgcgggtgccctacggcctgtaccagggctacggatccactgtgcctctcggacaacctgggtag

SEQ ID NO: 329594 - DNA, 78 bp, Artificial Sequence
  derived and/or modified sequence
atggagcgcttcgtgagagtaccttacgggttgtatcagggttacggttccacagtcccattaggccaacctggatag

SEQ ID NO: 329595 - DNA, 493 bp, Artificial Sequence
  derived and/or modified sequence
agtatctgaccgaataaagcgggagctggagattcggatcacctgtcttcctcgcaggctgaactggaagacctgacttcatctccgaattcgttggttctgtaacatgcctaatacaaggctgaatagggtttgttgtaagacctacaaaaccttcaaatggattcagtgagagttgctcccatgggggccttgctgcttccagaaggtgcttgagcagtaaacagaagcaaccttggattaggaaaaggggtaataagcagcagctcccattagaatctgaaataaatggagaagccaggaatgaatctgaaccaacctgatgaagagaaagaaggggcggatgaaggaggaaggcaaaataaggacccaaacaaactggctaggatattagactgcgcctgagcacctgagagcggatggagcgctttgtccgtgttccctatggcttgtaccagggttatgggagcacagtgcctttgggccagcctgg

SEQ ID NO: 329596 - DNA, 10257 bp, Artificial Sequence
  derived and/or modified sequence
atgcctatcggaagcaaagagagaccaactttctttgagatttttaagacgcgctgcaacaaggccgatctcggtcctatctccctaaactggttcgaggagctgagcagcgaagcccccccatacaattctgaacccgcggaggagtcagagcacaaaaataataactacgaaccaaatcttttcaagactccccaaagaaagccttcctataaccagctcgcttccacccccattatttttaaagagcaaggactgaccttgccactgtatcagtcccccgtgaaagagcttgacaaatttaaactcgacctaggcagaaatgtccccaattctagacataagagcttgcgtacagtcaaaacgaaaatggatcaggcggacgatgtctcttgcccactgctgaactcctgcctgtccgagtctcccgtagttctgcagtgcactcacgtcactcctcagcgggataaatccgtcgtctgtggatcactcttccacactccaaaattcgtgaagggccggcagacccccaagcatatctctgaaagtttgggcgccgaagtcgacccggatatgtcctggagcagttctttggcaacgccacccactctttcatccacagttctcatcgttcgtaacgaggaggccagcgaaaccgtgttccctcacgataccactgccaacgtaaagtcctatttcagcaatcatgatgaatccctgaaaaaaaacgatcgcttcattgcatccgtgactgattccgaaaacaccaatcagcgcgaggcagccagccacggctttggcaagacgtcaggcaactcatttaaggtcaactcttgcaaggaccatatcgggaaatccatgcccaacgtcttagaggacgaagtatacgaaacagttgtcgatactagtgaggaggattcgttctctttgtgtttcagcaaatgtcgtactaaaaacctacaaaaagtgcgaacaagtaaaacccgaaagaaaattttccacgaggccaacgccgatgaatgtgagaaaagtaagaatcaggtgaaggaaaagtacagttttgtatccgaagttgagcctaatgacaccgaccctctggattcaaatgtagcaaatcaaaagccctttgaatccggttccgacaaaatcagtaaggaagtggtcccttctcttgcctgcgagtggagtcagctgaccctgtcaggactaaatggagcccaaatggaaaagattcctctgttacatatctcaagctgtgatcagaatatcagtgagaaggatcttcttgacacagagaataaaaggaagaaagactttttgacttcggaaaactcgctgcctcgtatctcttccctccccaagtccgaaaaaccattaaacgaggaaaccgttgttaacaaacgcgatgaagagcaacacctggaaagccacaccgactgcattctagcggtaaagcaggccataagtggaacttctcccgtggcatcaagctttcagggcatcaagaagtccattttccggatccgcgagtcccctaaggagacttttaatgctagcttctcagggcatatgaccgaccctaacttcaaaaaggagacggaagcatctgaaagcgggctagagattcacaccgtatgtagtcagaaagaggattctctgtgccccaacttgatagacaacggatcgtggcccgcgaccaccacgcagaatagcgtggccctgaaaaacgccgggcttatatcgactcttaaaaaaaagactaataaatttatctatgccatacatgacgagacctcttacaagggtaagaaaattccaaaggatcagaagtctgaattgatcaactgctccgctcaattcgaagccaacgccttcgaagcccccttaacatttgcgaacgcagactctggactgctgcactcaagcgtcaaaagaagctgctcccagaatgatagtgaagagcccactctaagcctgacctcctcattcggcaccattctgagaaagtgctcacgaaatgagacttgttctaacaacaccgttattagccaagaccttgattataaagaggcaaaatgcaacaaggagaagctgcaactgtttatcactcctgaggccgacagcctcagttgcctccaggagggtcagtgcgagaacgatcccaaatcaaagaaggtgtctgatataaaagaagaggttctggctgcggcttgtcatccagtgcaacacagcaaagtcgaatacagcgacactgatttccagtcgcagaaatctcttctgtatgaccacgaaaacgcctctacgttaattctaactcccacttcaaaggacgtcctctctaacttggttatgatcagtcggggcaaggaatcatacaagatgtctgacaagttgaaagggaataattacgagtcggatgtggaactgaccaagaatatccctatggaaaagaatcaggacgtctgtgctctcaacgagaattacaagaacgtcgaactgctgccaccagagaaatacatgagagtcgctagccctagcagaaaagtccagttcaaccagaacactaatctgcgtgtcatccagaagaatcaggaggaaaccacaagtattagtaagatcacggtaaatcctgatagtgaagaactgttctccgataacgaaaacaatttcgtctttcaggtagcgaatgaaagaaacaatctggccttagggaacactaaggaactccacgaaacagatctgacatgcgtgaatgagccaatttttaaaaattcgaccatggtcctgtatggagataccggcgataaacaagcaactcaggtctctattaaaaaggacctcgtctatgtgcttgccgaggagaacaaaaactctgtcaaacagcatatcaaaatgactctcggacaagacctgaaaagtgacatttcattaaatatcgataaaataccagaaaagaacaacgactacatgaataagtgggctgggttgctgggacccataagcaaccattcctttgggggatcatttagaactgctagcaataaggaaattaagctgtctgagcataacatcaagaagtcaaaaatgttcttcaaagacatcgaggagcagtatcctacatctctcgcgtgcgtcgagatagtgaacacactcgccctggataatcaaaagaaactctctaagccacagagtatcaataccgtctccgcccatctgcaaagctccgtggtggtgtcagactgcaaaaatagtcatatcactccccagatgcttttttctaagcaggatttcaactctaatcacaatctgaccccatcccagaaggcagaaatcacggaactgtcaacaattttagaggagtctggaagccagtttgaattcacacagttcaggaagccatcttacattttacaaaaatcaacatttgaagtgcccgagaatcaaatgaccattctgaagaccaccagcgaggaatgccgcgatgccgacctgcatgttataatgaacgcccccagcattggccaggtggactcgagtaaacagttcgaggggacagttgagatcaagcggaagttcgcagggctgctgaagaatgactgcaataagagcgccagtgggtacttaactgacgagaacgaagtggggtttagggggttctacagtgcgcacgggaccaaactcaacgtttctacagaggcactgcagaaggctgttaaactgttttccgatatcgaaaacatctccgaggagacctctgccgaagtccaccctatcagtctgtccagctccaagtgccatgacagcgtagttagtatgtttaagatcgagaaccacaacgacaaaaccgtttccgagaagaacaataagtgccaactgattctgcagaataatatcgagatgactacaggtactttcgtcgaggagatcacagaaaactataaacggaacaccgagaatgaggataataaatatactgcagcctctaggaactcccataacttggagtttgatgggagcgactcgagcaagaacgataccgtctgtattcacaaggatgagaccgatctgcttttcacagatcagcataacatctgcctaaaactcagtggccagttcatgaaagaaggaaacacacaaatcaaagaggacttatccgatctgaccttcctagaagtagccaaggctcaggaagcctgccacggtaacaccagtaacaaggaacagctgaccgctacaaaaactgaacagaatatcaaggactttgagacctcagataccttttttcagactgcaagcggcaaaaatatctccgtcgctaaagagagtttcaataaaatcgtgaattttttcgatcagaaaccagaagaactccacaatttctccctcaactccgagctccacagcgatatccgcaaaaacaaaatggatatcttgagttatgaggagacagacatagtgaagcacaagatcttgaaagaatcagtcccggttggaacaggcaatcaactagtgaccttccaggggcagcctgagagggatgagaaaataaaggagccgaccctcctgggcttccatacggcatcggggaaaaaggtgaaaattgccaaggaatctctggataaagtgaaaaatttgtttgacgaaaaggagcaaggtacatctgaaataacctcatttagtcaccaatgggccaaaacactgaagtatagagaggcctgtaaagatctggaattggcatgcgagactattgaaattactgcggcccctaagtgcaaagaaatgcaaaactctttgaataatgataaaaacctggtgtcgatcgagacggtggttccacctaaactcctgtcagataatctgtgccggcaaactgagaacctcaagacctccaagtctatcttcttaaaggtgaaagtccacgaaaacgtggaaaaggagacagcgaagtccccagccacttgctatactaatcagagcccatactcagtgattgaaaatagcgcactcgcgttttacactagctgttctcgcaaaacgagcgtgagccagacttctttactggaggctaagaaatggctccgtgagggcatatttgatggccagcctgagagaatcaacacagctgactatgtggggaactacttgtatgagaacaacagcaactccacgatcgccgaaaacgataagaatcatttgagcgagaaacaggatacctacctctcaaatagcagtatgagcaattcttactcctaccattcagacgaggtgtacaacgattcaggctacctgagtaagaacaagttggactccggaatagaacctgtattaaagaacgtggaagatcagaagaataccagcttctctaaagtaatttctaacgttaaggatgccaacgcttacccgcaaactgtcaacgaagatatatgcgttgaggaacttgtgactagtagttctccatgtaaaaacaaaaacgccgccataaagctgagtatctccaactccaacaactttgaagtcggccctcctgcattcagaattgcctctggcaagatagtctgcgtgagtcacgaaaccattaaaaaagtcaaagacatcttcaccgattccttcagtaaggttataaaggaaaacaacgagaacaagtcaaagatctgccaaactaaaattatggcagggtgctatgaagcgctggatgacagtgaagatattctccacaattcactggacaacgatgaatgttctactcacagccacaaagtctttgccgacattcaatccgaggaaatccttcagcataaccaaaacatgagcggactggagaaggtgtcaaagattagcccttgcgacgttagcctcgagacttccgatatatgcaagtgttcgattgggaagttacacaagtcagtgtcctctgccaacacctgtggaatcttcagcaccgcaagcgggaaatccgtacaggtgtcagacgctagcttgcagaacgctcgacaggtgttcagtgaaatcgaggacagtaccaagcaggtgttttcaaaggtgctatttaagtccaatgaacatagcgaccaactcacacgggaggagaacactgccattcgtacccctgaacacttgatatcacaaaaaggattttcatacaacgtggtgaattccagcgcctttagcggtttcagtaccgcgtccggcaaacaagtctcgatacttgaatccagccttcataaagtgaaaggagtgctggaagagtttgacctgatacgtaccgaacatagtctacactactccccaacaagtcgccagaacgtgtcaaagatcctcccaagggtcgacaagaggaatccggagcactgcgtaaactcagagatggaaaagacatgcagtaaggaattcaagttgagtaacaacctcaatgtcgagggcggctccagcgagaataaccactcgataaaggttagtccatacctttctcagtttcagcaggacaaacagcagcttgttctgggaacaaaggtctcattggtcgagaacatccacgttctggggaaggaacaggcgtcccccaagaacgtcaagatggagattggcaaaacagagacattctcggatgtccctgtcaaaactaatatcgaggtttgtagtacctactcaaaggacagtgagaactacttcgaaacagaggctgtggaaatcgccaaagcctttatggaagacgacgagcttacagattcaaaactcccctctcatgccacccatagcctgtttacatgccccgaaaacgaagagatggtcctgagcaactcccgcatcgggaaacggaggggggaacctctgattctagtgggtgaaccctctataaagcgtaatctgctgaacgaattcgacagaattatcgagaaccaagagaagtccctcaaggccagtaagtccaccccagacggcaccattaaggacaggagactgttcatgcaccacgtctcactcgagccgataacttgtgtcccctttagaacgaccaaggagagacaggaaatccagaatcccaacttcaccgctcctggacaggaattcctctccaaatcccacctctatgaacatttaaccctggaaaagtcatcctccaacctggcagttagcggccatcctttttaccaagtgagcgccacgaggaatgagaaaatgcgccatcttatcaccacaggtcgtcccaccaaagtctttgtgccaccattcaaaacaaagagccacttccatcgcgttgaacagtgtgtgcgaaatatcaatctagaggagaacaggcaaaaacaaaacattgacggccatgggagcgatgacagcaaaaataaaataaacgataacgaaattcaccaatttaataaaaataatagcaaccaagcggtggccgtaacgttcaccaagtgtgaagaggagcccctcgatctcatcaccagtctccagaacgcaagagacatccaagatatgcgcattaagaagaaacaacgacaacgcgtgtttccccagccaggatcactttacctggcgaagacctccacattgccccgcataagcttgaaggccgcagtcggaggccaggtgccctccgcctgctcacacaaacaactgtatacatacggggtttctaaacattgcattaaaatcaactcaaaaaacgcggagtcatttcagtttcacacagaagattatttcggcaaagaaagcttatggaccgggaagggaatccaactggcggatggaggctggctgattcccagcaacgacggcaaagcaggaaaagaggagttttatcgcgccttgtgcgacacccctggtgtcgatcctaagctgatttcccgtatctgggtgtacaatcattaccgatggatcatctggaaactcgcggccatggaatgcgcgtttcctaaggagtttgcgaatagatgcctaagccccgaacgagtgctgctgcagctcaaataccggtatgataccgagatcgaccggtcccgccgatctgcgatcaagaagatcatggaaagagatgacacggccgcgaagacactggtgctttgtgtgtccgacatcatctccctgtctgctaacatatctgaaacatctagcaataagacatcttcagctgacacccagaaggtggctattatagagctcacagacgggtggtacgccgtgaaggcccaactggaccctcctctgcttgccgtgctgaaaaatgggcggttgactgtgggacaaaagattatcctgcacggagctgaactggtgggaagcccggacgcttgtactcccttggaggccccggagtccctgatgctgaaaatttcagccaactcaacgaggccggctagatggtatacaaaattagggtttttccccgaccccagaccttttccactgccactctcatctctgttctcagacggcggcaacgttggttgtgttgatgtgatcattcagcgcgcgtaccccatccagtggatggagaagacatcatctggattatacatctttcgcaacgagcgtgaagaagagaaggaggccgctaagtacgttgaggcacagcagaaaaggctcgaagctctgttcaccaagatccaggaagagttcgaagagcacgaggagaatacgacgaagccttatctgccaagtcgggctctcacccggcaacaagtgagggccttgcaggacggagctgagctgtatgaggcagttaaaaacgccgctgaccccgcctacctggagggatatttctccgaggagcagctgcgggccctgaataaccaccgtcagatgctgaatgacaaaaagcaggcacagatccagctggagattcggaaagcaatggagtcagccgagcagaaggaacagggcctgagcagagacgtgactaccgtctggaaattaaggatagtaagctactccaaaaaggagaaggattccgttattctttcaatctggaggcctagcagcgatctttactctctgttgaccgaagggaagcgctacaggatctatcacttggctacttcgaaatcgaagtcaaaatctgagcgcgcaaatattcagctggctgcaactaaaaaaacacagtatcagcagctgccagtttctgacgaaatcctcttccagatttaccagcccagagaacccttacacttttccaagtttctagatccggactttcagccttcttgcagtgaggtggatttaattggcttcgtggtatccgttgtcaagaagactgggttggccccctttgtctatctgtctgacgagtgctataatctcctggctatcaagttttggatcgatttaaacgaggatatcataaaaccacatatgctgatcgccgcctcgaatctccagtggagacccgaatctaagagcggactgcttactctgttcgcaggagacttctctgtcttttccgcctcccccaaggaggggcactttcaggaaacctttaataagatgaagaacactgtggagaacatcgacatcctgtgtaacgaagccgagaacaaactgatgcacattctgcacgccaatgaccctaaatggagcacaccgacgaaagattgcacgagcggcccatataccgctcagatcataccaggaacagggaataagcttctaatgtcctctccaaattgtgagatctattaccaaagtcccctgagcttatgcatggcaaaacggaaaagcgtttccacaccagtctcagctcaaatgactagtaagtcctgcaagggagagaaagagatcgacgaccagaaaaattgtaagaaaagacgcgccctagacttcctttctcgactgccactccctcccccagtttcaccaatctgtacattcgtcagcccagcggcccagaaggcattccagcccccccgcagttgcggaacaaagtacgagactcccatcaagaaaaaggaattaaacagtccccagatgaccccatttaagaagtttaacgagatttcccttctggagagcaattctattgctgatgaagagctcgccctgataaacactcaggcactgctatccggctctactggtgagaagcagttcatttcggtgtcagaatcaactcggactgcccctactagttccgaagactacctgagactgaagaggagatgcacgacctccctgattaaggagcaagaatcttcacaggcatcgactgaggagtgcgaaaagaataaacaggacacgatcaccaccaaaaagtacatatag

SEQ ID NO: 329597 - DNA, 10257 bp, Artificial Sequence
  derived and/or modified sequence
atgcccatcgggtccaaagagcggccaacgttttttgagatctttaagaccagatgcaataaggctgatcttggtccaatatccctcaactggtttgaggagctcagttctgaagcacctccttataattccgaaccggccgaggagtcagagcacaaaaacaataactacgagcctaatctcttcaagaccccccagagaaagccctcgtataaccagctggccagtacgcccattatctttaaagagcaagggctgacactcccgctgtaccagagtcctgtcaaggaactagacaagttcaaactggatcttggcaggaacgttcctaatagccgtcacaagagccttagaactgttaaaaccaagatggaccaggcagatgatgtaagttgccctcttcttaatagttgtctcagtgagtctccggtcgtgttgcaatgcacacacgtgactccccagagggacaaatccgttgtgtgcggctccttgttccatacaccaaaattcgtgaaggggaggcagacaccaaaacacatttcagaatctctcggtgctgaagtggacccagatatgtcctggtcaagctctctcgcaacacccccgacgctcagctctacagtgctgatcgtgcgaaacgaagaggctagtgaaaccgtatttccccatgacacaactgcaaatgtcaagtcctatttttctaatcatgatgagagccttaaaaaaaatgatcggtttatcgcctctgtgacagattcagagaacacaaatcagagagaggccgcctcacatggattcggcaagacctccggtaatagcttcaaggtgaatagttgcaaggatcatatcggaaagagcatgcccaacgtcttggaggatgaggtgtacgagacagtcgtagacacaagcgaggaggatagctttagtctctgcttctctaaatgtaggacaaaaaacctgcagaaagttaggacctccaaaactaggaaaaaaatctttcacgaggcaaacgctgatgagtgtgagaagagcaagaaccaggtcaaagaaaagtattctttcgtgtctgaagttgaacctaatgacactgaccccttggactcaaatgttgctaatcagaagccgttcgagtccggttcagataagatctccaaggaggttgtccccagcctcgcctgcgaatggtcacaactaactctgtcgggcctcaacggcgctcagatggaaaagatccctctactgcacatcagtagttgcgaccaaaacatcagcgagaaggacctgctggatacagagaataagcgtaagaaggactttctcaccagcgaaaacagcctaccacggatttcttccttgccgaagtcagaaaagcctcttaatgaagaaaccgtggtaaacaaacgagacgaagaacagcacctggagagccacactgactgcatcttggctgtgaagcaggccatttcaggcacctctccagtggcctccagtttccaggggattaagaaaagcatcttccgcatccgggaaagcccaaaagagacgttcaatgcctcattttcaggccatatgaccgatccgaatttcaagaaggaaacggaagcctctgagtccgggctggagattcacactgtgtgctctcagaaggaggactcactctgtccaaatcttatcgataatggtagctggccagctacaactactcagaatagtgtcgccttaaagaatgctgggctgatcagcaccctgaaaaagaaaacgaacaaattcatctacgccatccatgatgaaacgtcttacaaagggaaaaagatccctaaggaccagaaaagtgagcttatcaattgctccgcgcagtttgaggccaacgccttcgaagcccctttgacttttgctaacgctgattctggcttgcttcatagcagtgtaaaaagatcttgcagccaaaacgactctgaagagcctaccctgagcttgacgagcagctttggcactatactgaggaaatgcagtcggaacgagacatgctccaacaacaccgtcatctctcaggatttggactacaaggaggccaaatgcaacaaggaaaagctgcagttattcataactcccgaggcggatagtttatcttgtctgcaggagggacagtgtgaaaatgatccaaagagtaaaaaagtctcggatattaaagaggaggtacttgccgccgcctgccaccccgtgcagcactcaaaggtggaatactccgacacagatttccagtcgcaaaagtctcttctgtacgatcacgagaacgcttctaccctcatcctgacccccacctctaaggatgtgttgagtaacctcgtgatgatcagccggggcaaagagtcctacaagatgagtgacaaactcaagggaaacaactatgaatctgacgtggagctgacaaaaaacatcccaatggaaaagaaccaggatgtatgcgctctgaatgaaaactacaaaaacgtggaactgctgcccccagaaaaatatatgcgggtcgcctccccctcccggaaagtgcaattcaaccagaatacaaacctgagggtgatccagaagaatcaagaggagacaacatctatcagcaagatcactgtgaatcctgatagtgaggagctgtttagtgacaacgaaaataattttgtatttcaggttgcaaacgagaggaataatctcgccctggggaatactaaggagctccacgaaacagatcttacctgtgtgaatgaacccatcttcaaaaactcaaccatggtactttatggggacacaggggacaagcaagccactcaggtttctattaagaaagaccttgtgtatgtcctggccgaggaaaacaaaaactcggtgaaacaacacattaaaatgacgctgggacaggatctgaaatcagatatttccctgaacatcgataagatcccagaaaagaataatgactacatgaataagtgggctgggttactggggcccatctccaatcacagctttggcggcagctttagaactgcgtccaacaaggagatcaaattatcggagcataatatcaaaaaaagtaagatgttctttaaggacattgaggagcagtatccaacttccctggcctgcgtggagatcgtgaatactctggccctggacaaccagaagaaacttagtaaaccgcagagcattaacacagtttctgcacatcttcagtctagtgtcgtggtcagtgattgcaaaaactcacatatcacaccacagatgctattcagtaagcaagactttaattctaatcacaacctcacgccctctcagaaagctgagattacagaattatctaccatcttggaagaaagcggtagtcaattcgagttcacccaatttcgcaagcctagctatatccttcagaagagtacgtttgaggtgccagaaaaccagatgacgattttgaagaccacaagtgaagaatgccgcgatgccgatctccatgtcatcatgaacgctcctagcataggtcaggtggactcttctaagcagtttgagggcactgttgagataaagaggaagttcgcgggcctcctcaagaatgactgtaacaagagtgcgagcggatacctgaccgatgagaacgaagtgggtttccgtggattttattcggcccacggcactaagctaaacgttagcaccgaggcactgcagaaggctgtgaaactctttagcgacattgagaacattagcgaggaaacttctgcagaagtccaccctatatccctttcaagcagcaaatgccatgactccgtcgtatctatgttcaagatagaaaatcacaatgacaagacagtgagtgagaaaaacaataaatgccagctgattttgcagaataacattgaaatgacaacaggcaccttcgtggaagagataaccgagaactacaaaaggaacactgaaaacgaagataacaagtacacagccgcctctcgaaacagccataaccttgagttcgacggaagtgattccagcaaaaacgacacggtttgcatccacaaggatgaaactgatctgctttttacagatcagcacaacatctgcctaaaactgtcggggcaattcatgaaggaaggcaacacacagattaaagaggacttaagcgacctgacatttctagaggtcgcaaaggcgcaggaggcttgccatggcaacacgtccaacaaggaacagcttaccgctacgaaaacagaacagaacattaaggatttcgagaccagcgacacgttttttcagaccgcgagtggaaagaatatctcagtcgccaaagagagcttcaacaaaatcgtgaactttttcgatcagaagcccgaagagttgcataactttagtctgaactccgagctccacagtgatattaggaagaataagatggatatcttgagctacgaggagactgacatcgtcaagcataagatcctgaaagaaagcgtccctgtcggcacgggaaatcagctggtcacctttcaaggacaaccagaacgcgacgagaagatcaaagagcccacactgctggggttccataccgccagtggaaaaaaggtcaagatcgccaaggaaagcctcgacaaggtgaaaaacctgtttgacgagaaagagcagggaacctctgaaattacctcattctctcaccagtgggctaagacacttaaatacagggaggcttgcaaagacttagaactggcgtgcgagactatcgaaattacagccgcccccaaatgtaaggagatgcaaaacagtctgaataacgacaagaacttagtgagtatcgagaccgtagtcccccctaaactcctttctgacaatctgtgtagacaaacagagaatttgaagaccagcaagtccatctttctgaaagtgaaagtacacgagaacgtcgagaaagagaccgcaaagtccccagccacttgttacaccaaccagagtccttactccgtgatcgagaattctgcactcgctttctacacctcctgttcccgaaaaacatctgtgagccagacttctctcctcgaagcaaaaaaatggttaagggagggaatctttgacggacaacccgaacgtataaacaccgcagactacgttggtaactatctgtacgaaaacaatagcaacagcactatcgcagagaatgacaaaaatcatttatccgagaagcaggacacatatctcagtaacagtagcatgtctaattcctacagctatcattctgatgaagtgtataatgactccggctacctgagtaaaaacaaactggattcaggcatcgagcctgtactgaaaaatgtagaggatcaaaagaataccagtttctccaaagtgatttccaacgtcaaggatgcgaacgcctatccccagaccgtaaacgaggacatttgtgtcgaggaactggtcacctcttcctccccatgtaaaaacaaaaacgctgccattaagctatccatttcaaactcaaacaattttgaggttggtcccccagcgttccggatcgctagtggaaagatcgtctgcgtttctcacgagacaatcaaaaaagtcaaagatatcttcactgatagttttagcaaggtgatcaaggagaataacgagaacaagtctaagatctgtcagaccaaaattatggcaggctgctacgaggctctcgatgacagcgaagacatactgcacaattccctggacaatgacgagtgttccacacattctcataaagtgttcgcagacatccagagcgaggagattcttcagcataatcagaatatgagtggcctggagaaagtctctaagatctccccatgtgacgtgtccctggaaacaagtgacatctgcaaatgctcaatcggcaagctccataaaagtgtgagctctgccaatacctgcggaattttttctacagcctccgggaaatcggtgcaggtcagtgacgctagtttgcaaaatgccagacaggtgtttagtgagattgaggattccacaaagcaagtgttcagcaaagtgctttttaaatccaacgaacatagcgaccaactgactagagaagagaatacagccattaggaccccagagcacctgatttcacaaaagggtttttcgtataatgtagtgaacagctccgcattttctggattctctacagccagcgggaaacaggtcagcattctggagtcttcgctgcacaaagttaagggagtgctggaggaatttgatcttattagaacagaacatagtctgcattattcccctacttccagacagaatgtgtctaaaattttgccccgggtggataagcgaaacccggaacactgtgtaaattccgagatggagaaaacgtgttccaaggagttcaaactaagcaataacctgaacgtggaaggaggctcttcggagaacaaccattcaatcaaagtatctccatacctcagccaattccagcaggataagcagcagttagtcttaggaaccaaggtgagcttagtcgaaaatatccacgtgctgggaaaagagcaggcgtccccaaaaaatgtaaaaatggaaattgggaaaaccgaaaccttctccgatgtgcccgtcaagactaacatcgaggtgtgcagcacatactccaaggattcagagaactacttcgaaactgaggcagtggagatcgcgaaggctttcatggaggacgatgaattgaccgacagtaagttaccctcccacgcgacccacagcttatttacctgtcctgaaaacgaggagatggttctaagcaatagtaggataggcaaaaggagaggcgagccattgatcctcgtaggagagccatctatcaaacgcaacttgttaaatgagttcgaccgcatcatcgagaatcaagaaaaaagtctcaaggcatccaaatccaccccagacggcacgattaaagatcgtaggctgtttatgcaccatgtttctttggaaccaatcacatgcgtgcctttcaggaccacaaaggagcgccaggaaatccagaaccccaattttaccgctcctggacaggaatttctctccaagtcacatctttacgagcacctgacactggagaagagtagttctaatcttgcagtgtcaggacatcctttctaccaggtcagcgcaaccaggaacgaaaagatgaggcatctgatcaccactgggcgccccacgaaggtgtttgtgccacctttcaagactaagagccacttccatcgcgttgagcagtgtgtccgtaacattaaccttgaggaaaacagacagaagcagaacattgatggacatggttccgacgactctaagaacaagatcaacgataacgagattcaccaattcaacaagaacaattccaatcaggccgtcgccgtgactttcacaaaatgcgaggaggagcctctcgacctgatcacctcgctccagaacgctcgggacatccaggacatgcggattaaaaaaaagcagcgtcagagagtgttcccccagcccggctcactgtatctggccaagacctctacgttaccccgcatcagcctgaaggccgcggtaggagggcaggttcccagcgcttgctcgcacaaacaattgtacacatatggagtgtcaaagcactgcatcaaaatcaactctaagaatgcggagtcgttccagttccacacggaagattattttgggaaagagtccctatggacaggcaagggcatccaactggccgatggtggttggttgatcccgtcaaacgacgggaaagctgggaaggaggaattttacagagccctatgcgacacacctggggtggatcccaagctcatctcaagaatttgggtgtataaccattacaggtggatcatttggaagttggccgcgatggagtgtgcctttccaaaggagtttgccaatcggtgtctgtcaccagaaagagtgctgttgcagctgaagtataggtatgacaccgagatcgatcgctctaggcgaagcgccatcaagaagatcatggagcgagatgataccgctgctaagacactagtgctctgcgtgtcagacatcatcagcctctcggccaacatctctgaaacaagttccaataagactagtagcgcagatacgcagaaggtggctatcatcgagctgaccgacggctggtacgctgtgaaagcccaattggacccacccctgctggctgtcctaaaaaacgggcgcctaacagtcggccagaaaatcatccttcatggggccgaactggtgggcagccctgatgcttgtacccctctggaggcgcctgagagtttgatgctgaaaatctctgccaactctacccggccagcccggtggtatacgaaactcgggtttttccctgatccccgtcctttccccctcccgctgagcagcctattctccgacggagggaacgttgggtgcgtcgatgtaatcattcaaagagcataccccattcagtggatggagaagacttcctccggattgtacatcttccggaacgaacgtgaagaagagaaggaagctgctaagtacgtcgaagctcagcagaagagactggaagccctgttcacgaaaattcaagaagaattcgaagagcatgaggaaaacacaaccaagccatatctgccgtctcgtgctctcacaagacagcaggtacgggccctgcaggatggggccgaattgtacgaggccgtcaagaatgctgccgaccccgcctacttggaaggatactttagcgaggaacagttacgcgccctgaacaaccatcggcaaatgctgaatgacaagaagcaggctcagatccagctagagatccggaaggcgatggagtctgccgaacaaaaggaacagggcctctctcgagatgtgactactgtgtggaagctgaggatcgtgtcctatagcaagaaggagaaggattcagtgattctgagcatctggcgtccctctagtgatctctattccttgctaactgaaggcaaacgctaccgcatttatcatttggctacaagtaaatctaagtcaaagagcgagcgggcaaacatccagttggctgccactaagaagactcaataccagcaactgccggttagtgatgaaattctctttcagatataccagcctcgtgaaccccttcatttttccaagtttttagatcccgacttccagcctagctgctcagaagtggacctgatcggcttcgttgtctcggttgttaagaaaactggattggcaccattcgtttaccttagtgacgagtgttacaacttgctggccatcaagttctggatagacctgaatgaggacatcattaagccacacatgcttatcgctgcatccaatctgcagtggcggcctgaatcaaaatcgggattgctaacgctcttcgcgggagacttctctgtctttagcgccagccctaaggaggggcattttcaagagactttcaacaagatgaagaacacggtggagaacatcgacattctgtgcaacgaggctgaaaacaaactgatgcatattctgcatgctaatgacccaaagtggtcgacaccaaccaaagactgcacgagtggtccctacactgctcaaattatccctggaaccggcaataagctcctgatgtcgtcccccaactgcgagatctactaccagtctcccctgtccctgtgcatggctaagagaaagtctgtcagcaccccagtgtctgcgcagatgaccagcaagagttgtaaaggcgaaaaggagatcgacgatcagaagaattgcaagaaaaggcgcgccctagactttcttagcaggttgccactgccaccgccagtcagtcccatttgcactttcgtgtctcccgccgcccagaaagcctttcaacccccaaggtcttgcggcacgaaatatgaaaccccaatcaaaaagaaggagctgaatagcccacaaatgacccctttcaagaagttcaacgaaatttctctgctagagagcaattctatcgccgatgaagagctcgccctgatcaacacccaagcccttctaagcggaagtacgggagagaaacagtttatctcagtgtccgaatcaacccggacagcacccacatcctccgaggactaccttcgcttgaaaagaaggtgtacgacctccctgattaaggaacaggagagctcacaggcatcgaccgaagaatgtgagaagaataagcaagacactataactaccaaaaagtatatctag

SEQ ID NO: 329598 - DNA, 10257 bp, Artificial Sequence
  derived and/or modified sequence
atgcccatcggcagcaaggagcggcccaccttctttgagatcttcaagacccgctgcaacaaggctgacctgggccccatcagcctgaactggtttgaggagctgagcagcgaggccccaccctacaacagcgagcctgctgaggagagcgagcacaagaacaacaactatgagcccaacctcttcaagaccccccagaggaagcccagctacaaccagctggccagcacccccatcatcttcaaggagcagggcctgaccctgcccctgtaccagagccctgtgaaggagctggacaagttcaagctggacctgggcagaaatgtgcccaacagccgccacaagagcctgaggacagtgaagaccaagatggaccaggctgatgatgtgtcctgccccctgctgaacagctgcctgtctgagagccctgtggtgctgcagtgcacccacgtgaccccccagagggacaagtctgtggtgtgtggcagcctcttccacacccccaagtttgtgaagggccggcagacccccaagcacatcagcgagagcctgggcgctgaggtggaccctgacatgtcctggagcagcagcctggccaccccacccaccctgagcagcacagtgctgattgtgagaaatgaggaggccagcgagaccgtcttcccccatgacaccacagccaacgtgaagagctacttcagcaaccatgatgagagcctgaagaagaatgaccgcttcatcgcctctgtgacagattctgagaacaccaaccagcgggaggccgccagccacggctttgggaagaccagcggcaacagcttcaaggtgaacagctgcaaggaccacatcggcaagtccatgcccaacgtgctggaggatgaggtgtatgagaccgtggtggacaccagtgaagaagattccttcagcctgtgcttcagcaagtgcaggaccaagaacctgcagaaggtgaggaccagcaagaccaggaagaagatcttccacgaggccaatgctgatgaatgtgagaagagcaagaaccaggtgaaggagaagtacagctttgtgtctgaggtggagcccaatgacacagaccccctggacagcaatgtggccaaccagaagccctttgagagcggcagtgacaagatcagcaaggaggtggtgcccagcctggcctgtgagtggagccagctgaccctgagcggcctgaatggagcccagatggagaagatccccctgctgcacatcagcagctgtgaccagaacatcagcgagaaggacctgctggacacagagaacaagaggaagaaggacttcctgaccagcgagaacagcctgccccgcatcagcagcctgcccaagtctgagaagcccctgaatgaggagaccgtggtgaacaagagagatgaggagcagcacctggagagccacacagactgcatcctggccgtgaagcaggccatcagcggcaccagccctgtggccagcagcttccagggcatcaagaagagcatcttccgcatccgggagagccccaaggagaccttcaatgccagcttcagcggccacatgacagaccccaacttcaagaaggagacagaggccagcgagagcggcctggagatccacacagtgtgcagccagaaggaggacagcctgtgccccaacctgattgacaatggctcctggccagccaccaccacccagaacagcgtggccctgaagaatgccggcctcatcagcaccctgaagaagaagaccaacaagttcatctatgccatccatgatgagaccagctacaagggcaagaagatccccaaggaccagaagtctgagctgatcaactgcagcgcccagtttgaggccaatgcctttgaggcccccctgacctttgccaatgctgacagcggcctgctgcacagctctgtgaagaggagctgcagccagaatgacagcgaggagcccaccctgagcctgaccagcagctttggcaccatcctgaggaagtgcagcagaaatgagacctgcagcaacaacacagtcatcagccaggacctggactacaaggaggccaagtgcaacaaggagaagctgcagctgttcatcaccccagaggccgacagcctgagctgcctgcaggagggccagtgtgaaaatgaccccaagagcaagaaggtgtctgacatcaaggaggaggtgctggccgccgcctgccaccctgtgcagcacagcaaggtggagtacagcgacacagacttccagagccagaagagcctgctgtatgaccatgaaaatgccagcaccctcatcctgacccccaccagcaaggatgtgctgagcaacctggtgatgatcagccggggcaaggagagctacaagatgtctgacaagctgaagggcaacaactatgaaagtgatgtggagctgaccaagaacatccccatggagaagaaccaggatgtgtgtgccctgaatgaaaactacaagaatgtggagctgctgcccccagagaagtacatgagggtggccagccccagcaggaaggtgcagttcaaccagaacaccaacctgcgggtcatccagaagaaccaggaggagaccaccagcatcagcaagatcaccgtgaacccagattctgaggagctgttcagtgacaatgaaaacaactttgtgttccaggtggccaatgaaagaaacaacctggccctgggcaacaccaaggagctgcacgagacagacctgacctgtgtgaatgagcccatcttcaagaacagcaccatggtgctgtatggagacacaggagacaagcaggccacccaggtgtccatcaagaaggacctggtgtatgtgctggccgaggagaacaagaacagcgtgaagcagcacatcaagatgaccctgggccaggacctgaagagtgacatcagcctgaacatcgacaagatccctgagaagaacaatgactacatgaacaagtgggccggcctgctgggccccatcagcaaccacagctttggaggcagcttcagaacagccagcaacaaggagatcaagctgtctgagcacaacatcaagaagagcaagatgttcttcaaggacatcgaggagcagtaccccaccagcctggcctgtgtggagatcgtgaacaccctggccctggacaaccagaagaagctgagcaagccccagagcatcaacacagtgtctgcccacctgcagagctctgtggtggtgtctgactgcaagaacagccacatcaccccccagatgctgttcagcaagcaggacttcaacagcaaccacaacctgacccccagccagaaggccgagatcacagagctgagcaccatcctggaggagagcggcagccagtttgagttcacccagttcaggaagcccagctacatcctgcagaagagcacctttgaggtgcctgagaaccagatgaccatcctgaagaccaccagcgaggagtgcagagatgctgacctgcacgtgatcatgaatgcccccagcatcggccaggtggacagcagcaagcagtttgagggcaccgtggagatcaagaggaagtttgctggcctgctgaagaatgactgcaacaagagcgccagcggctacctgacagatgaaaatgaggtgggcttccggggcttctacagcgcccacggcaccaagctgaatgtgtccacagaggccctgcagaaggctgtgaagctgttcagtgacatcgagaacatcagcgaggagaccagcgctgaggtgcaccccatcagcctgagcagcagcaagtgccacgacagcgtggtgtccatgttcaagattgagaaccacaatgacaagacagtgtctgagaagaacaacaagtgccagctgatcctgcagaacaacatcgagatgaccaccggcacctttgtggaggagatcacagagaactacaagaggaacacagaaaatgaagacaacaagtacacagctgccagcaggaacagccacaacctggagtttgatggcagtgacagcagcaagaatgacacagtgtgcatccacaaggatgaaacagacctgctcttcacagaccagcacaacatctgcctgaagctgagcggccagttcatgaaggagggcaacacccagatcaaggaggacctgagtgacctgaccttcctggaggtggccaaggcccaggaggcctgccacggcaacaccagcaacaaggagcagctgacagccaccaagacagagcagaacatcaaggactttgagaccagtgacaccttcttccagacagccagcggcaagaacatctctgtggccaaggagagcttcaacaagatcgtgaacttctttgaccagaagccagaggagctgcacaacttcagcctgaacagcgagctgcacagcgacatcaggaagaacaagatggacatcctgtcctatgaggagacagacatcgtgaagcacaagatcctgaaggagagcgtgcctgtgggcactggaaaccagctggtgaccttccagggccagcctgagagagatgagaagatcaaggagcccaccctgctgggcttccacacagccagcggcaagaaggtgaagatcgccaaggagagcctggacaaggtgaagaacctgtttgatgagaaggagcagggcaccagcgagatcaccagcttcagccaccagtgggccaagaccctgaagtaccgggaggcctgcaaggacctggagctggcctgtgagaccatcgagatcacagctgcccccaagtgcaaggagatgcagaacagcctgaacaatgacaagaacctggtgtccattgaaacagtggtgccccccaagctgctgagtgacaacctgtgccggcagacagagaacctgaagaccagcaagagcatcttcctgaaggtgaaggtgcatgaaaatgtggagaaggagacagccaagagccctgccacctgctacaccaaccagagcccctacagcgtgattgaaaattctgccctggccttctacaccagctgcagcaggaagacctctgtgtcccagaccagcctgctggaggccaagaagtggctgcgggagggcatctttgatggccagcctgagcgcatcaacacagctgactatgtgggcaactacctgtatgagaacaacagcaacagcaccatcgccgagaatgacaagaaccacctgtctgagaagcaggacacctacctgagcaacagctccatgagcaacagctacagctaccacagtgatgaggtgtacaatgacagcggctacctgagcaagaacaagctggacagcggcatcgagcctgtgctgaagaatgtggaggaccagaagaacaccagcttcagcaaggtgatcagcaatgtgaaggatgccaatgcctacccccagacagtgaatgaagacatctgtgtggaggagctggtgaccagcagcagcccctgcaagaacaagaatgctgccatcaagctgagcatcagcaacagcaacaactttgaggtgggccccccagccttccgcatcgccagcggcaagatcgtgtgtgtgtcccatgagaccatcaagaaggtgaaggacatcttcacagacagcttcagcaaggtgatcaaggagaacaatgaaaacaagagcaagatctgccagaccaagatcatggccggctgctatgaggccctggatgacagcgaggacatcctgcacaacagcctggacaatgatgagtgcagcacccacagccacaaggtgtttgctgacatccagagcgaggagatcctgcagcacaaccagaacatgagcggcctggagaaggtgtccaagatcagcccctgtgatgtgtccctggagaccagtgacatctgcaagtgcagcatcggcaagctgcacaagtctgtgtcctctgccaacacctgtggcatcttcagcacagccagcggcaagtctgtgcaggtgtctgatgccagcctgcagaatgcccggcaggtgttttctgaaattgaggacagcaccaagcaggtgttcagcaaggtgctcttcaagagcaatgagcacagcgaccagctgacccgggaggagaacacagccatccgcaccccagagcacctgatcagccagaagggcttctcctacaacgtggtgaacagcagcgccttcagcggcttcagcacagccagcggcaagcaggtgtccatcctggagagcagcctgcacaaggtgaagggcgtgctggaggagtttgacctgatcagaacagagcacagcctgcactacagccccaccagccggcagaatgtgtccaagatcctgccccgggtggacaagaggaaccctgagcactgtgtgaacagcgagatggagaagacctgcagcaaggagttcaagctgagcaacaacctgaatgtggagggcggcagcagcgagaacaaccacagcatcaaggtgagcccctacctgagccagttccagcaggacaagcagcagctggtgctgggcaccaaggtgtccctggtggagaacatccacgtgctgggcaaggagcaggccagccccaagaatgtgaagatggagatcggcaagacagagaccttcagtgatgtgcctgtgaagaccaacatcgaggtgtgcagcacctacagcaaggacagcgagaactactttgaaacagaagctgtggagatcgccaaggccttcatggaggatgatgagctgacagacagcaagctgcccagccacgccacccacagcctcttcacctgcccagaaaatgaggagatggtgctgagcaacagcagaattggcaagagaagaggagagcccctcatcctggtgggggagcccagcatcaagaggaacctgctgaatgaatttgaccgcatcatcgagaaccaggagaagagcctgaaggccagcaagagcaccccagatggcaccatcaaggaccggcggctcttcatgcaccacgtgtccctggagcccatcacctgtgtgcccttccgcaccaccaaggagcggcaggagatccagaaccccaacttcaccgcccctggccaggagttcctgagcaagagccacctgtatgagcacctgaccctggagaagagcagcagcaacctggccgtgtctggccaccccttctaccaggtgtctgccaccagaaatgagaagatgaggcacctgatcaccaccggccggcccaccaaggtgtttgtgccccccttcaagaccaagagccacttccaccgggtggagcagtgtgtgaggaacatcaacctggaggagaaccggcagaagcagaacattgatggccacggcagtgatgacagcaagaacaagatcaatgacaatgagatccaccagttcaacaagaacaacagcaaccaggccgtggccgtgaccttcaccaagtgtgaggaggagcccctggacctgatcaccagcctgcagaatgcccgggacatccaggacatgaggatcaagaagaagcagaggcagagggtcttcccccagcccggcagcctgtacctggccaagaccagcaccctgccccgcatcagcctgaaggctgctgtgggcggccaggtgcccagcgcctgcagccacaagcagctgtacacctatggagtgtccaagcactgcatcaagatcaacagcaagaatgctgagagcttccagttccacacagaggactactttgggaaggagagcctgtggacaggcaagggcatccagctggctgatggcggctggctgatccccagcaatgatggcaaggccggcaaggaggagttctaccgggccctgtgtgacaccccaggagtggaccccaagctgatcagccgcatctgggtgtacaaccactaccgctggatcatctggaagctggccgccatggagtgtgccttccccaaggagtttgccaaccgctgcctgagccctgagcgggtgctgctgcagctgaagtaccgctatgacacagaaattgacaggagccgccgcagcgccatcaagaagatcatggagagagatgacacagctgccaagaccctggtgctgtgtgtgtctgacatcatcagcctgagcgccaacatcagcgagaccagcagcaacaagaccagcagcgctgacacccagaaggtggccatcatcgagctgacagatggctggtatgctgtgaaggcccagctggacccccccctgctggccgtgctgaagaatggccgcctgactgtgggccagaagatcatcctgcacggggctgagctggtgggcagcccagatgcctgcacccccctggaggcccctgagagcctgatgctgaagatcagcgccaacagcaccaggcctgcccgctggtacaccaagctgggcttcttcccagacccccggcccttccccctgcccctgagcagcctcttcagtgatggcggcaatgtgggctgtgtggatgtgatcatccagagggcctaccccatccagtggatggagaagaccagcagcggcctgtacatcttcagaaatgaaagagaggaggagaaggaggccgccaagtatgtggaggcccagcagaagaggctggaggccctcttcaccaagatccaggaggagtttgaggagcacgaggagaacaccaccaagccctacctgcccagccgggccctgacccggcagcaggtgcgggccctgcaggatggagctgagctgtatgaagctgtgaagaatgctgctgaccctgcctacctggagggctacttcagcgaggagcagctgcgggccctgaacaaccaccggcagatgctgaatgacaagaagcaggcccagatccagctggagatcaggaaggccatggagagcgctgagcagaaggagcagggcctgagcagagatgtgaccaccgtgtggaagctgcgcatcgtgtcctacagcaagaaggagaaggacagcgtcatcctgagcatctggaggcccagcagtgacctgtacagcctgctgacagagggcaagcgctaccgcatctaccacctggccaccagcaagagcaagagcaagtctgagcgggccaacatccagctggccgccaccaagaagacccagtaccagcagctgcctgtgtctgatgagatcctcttccagatctaccagccccgggagcccctgcacttcagcaagttcctggaccctgacttccagcccagctgcagcgaggtggacctgattggatttgtggtgtctgtggtgaagaagacaggcctggccccctttgtgtacctgagtgatgagtgctacaacctgctggccatcaagttctggattgacctgaatgaagacatcatcaagccccacatgctgattgctgccagcaacctgcagtggaggcctgagagcaagagcggcctgctgaccctgtttgctggggacttcagcgtcttcagcgccagccccaaggagggccacttccaggagaccttcaacaagatgaagaacacagtggagaacatcgacatcctgtgcaatgaagctgagaacaagctgatgcacatcctgcacgccaatgaccccaagtggagcacccccaccaaggactgcaccagcggcccctacacagcccagatcatccctggcactggaaacaagctgctgatgagcagccccaactgtgagatctactaccagagccccctgagcctgtgcatggccaagaggaagtctgtgtccacccctgtgtctgcccagatgaccagcaagagctgcaagggggagaaggagattgatgaccagaagaactgcaagaagaggcgggccctggacttcctgagccggctgcccctgcccccacctgtgagccccatctgcacctttgtgtccccagctgcccagaaggccttccagccccccaggagctgtggcaccaagtatgagacccccatcaagaagaaggagctgaacagcccccagatgacccccttcaagaagttcaatgagatcagcctgctggagagcaacagcattgctgatgaggagctggccctgatcaacacccaggccctgctgagcggcagcactggagagaagcagttcatctctgtgtctgagagcaccaggacagcccccaccagcagcgaggactacctgcggctgaagaggcgctgcaccaccagcctcatcaaggagcaggagagcagccaggccagcacagaagaatgtgagaagaacaagcaggacaccatcaccaccaagaagtacatctag

SEQ ID NO: 329599 - DNA, 10257 bp, Artificial Sequence
  derived and/or modified sequence
atgcccatcggcagcaaggagcggcccaccttcttcgagatcttcaaaacccgctgcaataaggccgatttggggcctatcagtttgaactggtttgaggaactgagctctgaggcacccccctacaattcggaacccgctgaggaatccgagcacaaaaataataactatgaacctaacttgttcaagacgcctcaacgcaagccttcctacaatcagctggcaagcactccaatcatatttaaagaacagggactgaccctgcccctgtatcaaagcccagtaaaggaactggataaattcaaacttgacctcgggagaaatgttcctaattctagacataaatcactgaggacagtcaaaacaaagatggaccaagcagatgatgtgtcatgcccgcttcttaacagctgcctatcagaatcccctgtggtcctccagtgtacccatgtaaccccacagagagacaaatcagtggtatgcgggagcctgtttcacaccccgaagttcgtgaagggccgacagacccctaagcacatctccgaatcactgggggcagaggtggatcccgatatgagttggtcctcgagcttagcaacccccccaactttgtcatcaacagtgttaatcgttagaaacgaggaagcttccgagactgtgtttccccacgacacgaccgccaatgtcaaatcttatttttcaaatcacgacgaatccctgaagaaaaacgataggttcattgcctcggtgaccgattctgagaacactaaccaacgagaagcggcctctcacggctttggtaagacatcaggcaactcattcaaggtcaactcgtgcaaagaccatattggcaaaagtatgccaaacgtgcttgaagatgaggtctacgagaccgtggtggatacaagtgaggaagattcattctctctctgcttttcaaagtgccggacaaagaatctccagaaagtccgcaccagtaaaacaagaaaaaaaatcttccatgaggctaacgcggatgagtgtgagaagtccaagaaccaggtaaaagaaaagtatagcttcgtgtctgaggtggaacccaatgacactgaccccctagattctaatgtggccaatcaaaaaccttttgagtctgggtccgacaagatctccaaagaggtagttccttccttagcctgtgaatggagccagttgactctcagtggcctcaatggggcccaaatggaaaaaatccccttactgcacatcagttcttgtgaccaaaatatttcagaaaaggacctgctggacactgaaaataaacgcaagaaagactttttgacaagcgagaacagtttacccagaatttcgtccttaccaaaaagtgaaaaacctctcaatgaggagaccgtcgttaataagcgtgatgaggaacagcaccttgagtctcatactgactgtattctggcggttaaacaagccatcagtggaacttccccagtggccagcagttttcaggggattaagaagtccatctttagaattcgcgaatcccccaaggagacctttaacgcttccttcagcggccacatgaccgaccccaactttaagaaagaaaccgaagcgagtgagtcaggcctcgaaatacacactgtgtgctcccagaaggaagactcactgtgccctaatcttattgacaatggctcttggcccgccactaccactcagaatagcgtagccctcaaaaacgcaggcctgatcagcacgctcaaaaagaaaaccaataaatttatatatgctatccacgacgagacaagctataagggaaagaaaatccctaaggaccagaagtctgagcttataaattgcagcgcacaattcgaagctaacgcattcgaggctcctctcacatttgccaatgccgacagcgggttattgcattcctcagtgaagcggagctgtagccagaatgacagtgaagaaccaaccctgtcattgacgtcaagtttcggtactatcctgcggaagtgcagccgcaacgagacatgctcgaataacaccgtcatctcccaggatctcgattacaaggaagcaaagtgtaataaagagaaactgcagctcttcatcactcccgaggccgacagcctgagttgcctccaggagggccagtgcgagaacgacccgaaaagtaaaaaggttagcgatataaaggaagaggtgctggcggccgcctgccatcccgtgcagcactcaaaggtcgaatacagcgataccgatttccaatcccagaagagcctcttgtacgatcatgagaatgcgagtacccttatcctgactcccacaagcaaggatgttctgtctaaccttgtaatgattagccgtggcaaggagagttacaagatgagcgataaactaaaaggaaataattacgagagcgatgtagagctcacaaagaatatccccatggaaaagaaccaggatgtatgcgcactgaacgagaactataagaacgtggaactgctacctcctgaaaaatacatgcgggtggcttcaccttcgagaaaggtccaattcaatcagaatacaaacctcagggtgatacaaaagaaccaagaagaaacaacatctatttcaaaaatcacggtgaatccagactctgaggagctctttagcgacaacgaaaataatttcgtgttccaggtggctaacgaaaggaataacctcgccctcggcaataccaaggagcttcacgaaactgatctgacctgcgtcaatgagcccatctttaaaaactccactatggtgctttacggcgataccggcgacaagcaggccacacaggtgagcataaaaaaagacctagtctacgtgctggccgaggagaataaaaatagcgttaagcaacatatcaagatgaccctgggccaggacttaaaatcagacatttcactgaacattgacaagattcccgaaaaaaataacgactacatgaataaatgggctggactcctgggaccaattagcaaccactctttcgggggcagctttcgaacagcctctaataaagagatcaagcttagtgagcacaacattaaaaagtcgaagatgtttttcaaagatatagaggagcagtatccaacttcgttagcttgcgtcgaaatcgtgaatacccttgctctggataaccagaagaagctgagcaaacctcagagtatcaacacagtgtcagctcatttacagagcagcgtagtcgtttccgattgcaaaaactctcatattacaccgcaaatgctctttagtaaacaggactttaactctaatcacaatctgacacccagccagaaggctgagattactgagctgtcgactatcctggaggaaagcggttcgcagttcgaatttacacagttcagaaaaccaagctacattttgcagaaaagcacatttgaagtgcctgagaaccaaatgactattctcaaaaccacaagcgaggaatgccgcgacgcagacttacatgtaatcatgaatgcaccatcaatcggtcaggtcgacagtagcaagcagttcgaaggcacagtggaaatcaaacgtaagttcgctggtttgctgaaaaacgattgcaataagtccgccagcggttatctgactgatgagaacgaggtgggattccggggcttctactctgcccatggcaccaaattgaacgtttccacagaggcgctgcaaaaagctgttaaactgtttagcgatattgagaacatttctgaggaaacatcagccgaagtacaccccattagtctctctagtagcaagtgtcacgactcagtggtctccatgttcaagatcgagaatcacaacgataagaccgtgagtgaaaagaataacaagtgtcaactgatattgcagaacaacatcgagatgacgaccggaacattcgtcgaggaaataacagaaaattataagcgtaacactgagaatgaggataacaagtacacggctgcctcacgcaattcccacaatctcgagttcgacgggtccgactcttccaaaaatgacactgtttgtatacacaaagacgaaaccgacctgctcttcactgatcaacataatatctgtctaaaactctccggtcagttcatgaaagaagggaatacacagatcaaggaggacctgtctgatctgactttcctggaggtggcaaaagcgcaggaagcttgtcacggcaacacctccaataaagagcaactgaccgctacaaaaacggaacaaaatattaaagacttcgagaccagcgatacattttttcagaccgcttccgggaaaaacattagcgtggctaaggaatcctttaataaaatcgtaaatttttttgatcaaaagcccgaggagctccacaacttctccctgaactcagagctgcactccgacatccgtaaaaacaaaatggacatcctttcctatgaggagacagacatagtgaagcacaagatcctgaaggaatccgtgccggtcggcaccggcaatcagctggtgacctttcagggacagcctgaacgtgacgaaaagataaaggaacccaccctgctgggattccatacggcttctggaaagaaagtaaaaattgccaaagaatcgctggacaaggttaaaaatctttttgatgaaaaggagcagggcacatcggagataacttctttcagccaccagtgggccaagaccttgaaatatagggaagcttgcaaagatctcgagctggcttgtgagactatcgagatcaccgctgcccccaagtgcaaagaaatgcagaattccctcaataatgacaagaatctggtgagtattgagactgtggtcccaccaaagttgctgtccgacaatctctgcagacaaaccgagaatctgaaaacaagcaaaagtatctttctgaaagtgaaggtgcatgaaaacgtggagaaggagacggcgaagtctcccgccacgtgctacacaaaccaatctccttattccgtgattgaaaacagcgccctcgccttttatacctcttgctccaggaaaacgtccgtgtcccagacctccttactggaggcgaaaaaatggctgcgtgagggaatcttcgacggccaacctgagcgtattaataccgcagattacgtggggaactatctgtacgaaaataactctaacagcactatagccgagaatgacaaaaatcacctctcagagaaacaggacacttacctctccaactccagcatgagcaattcctactcctatcacagcgacgaggtctacaacgattcagggtacctgtcgaagaacaagctcgattctggcatcgaacccgtgctcaagaacgtggaagaccagaaaaatacttccttttctaaagttatctccaatgtgaaagacgcaaacgcctacccacaaacggttaatgaggacatctgtgtggaggagctggtaacttcctcaagcccgtgtaagaacaaaaatgcagccatcaagctgtcaatcagcaattctaacaatttcgaagtcggcccccccgctttccggatcgcctcaggcaaaatagtgtgcgtgtctcacgagactatcaaaaaagtaaaggacatattcaccgattccttttctaaggtaatcaaggagaataatgagaacaaaagcaaaatatgccaaacaaaaattatggcaggttgttacgaagcgctagatgactcagaggatattctgcacaatagcctggataatgacgaatgctcgacccacagtcataaggtatttgcagatatacaaagtgaagagattctgcagcacaaccaaaatatgtccggactggagaaggtgtccaagatatcgccttgtgacgtttccctcgagacttctgacatatgtaaatgcagtatcggaaaactacacaagtccgtatccagcgccaacacatgcggaatctttagtactgcatccgggaagagcgtccaggtgagcgatgcaagcctgcagaacgccagacaggttttttctgaaatcgaggactccacaaaacaggttttttcaaaggtcttgtttaagagcaatgaacattcggaccaactcaccagagaagagaatactgctatccggacccctgaacacctcatcagccagaaaggcttttcttacaatgtggttaacagtagcgccttttcaggattctccaccgccagtggtaaacaggtgagcattttagagtcttccctccacaaggtgaagggagttctagaggaattcgatttgatccgaacagagcacagcctgcactacagtcctaccagtaggcagaatgtctctaaaatcctgccccgcgttgacaagaggaacccagagcattgtgtcaactcggaaatggagaagacctgctctaaagagttcaagttgtccaacaacctaaacgtagaaggtgggagcagtgagaataatcactcaatcaaagtctcgccctacctgagtcagtttcagcaggataagcagcagctggttttagggacaaaggtgagccttgtagaaaacatacatgtcctggggaaagaacaggcatccccaaaaaacgtgaagatggaaatcggaaagaccgagactttctccgatgtacctgtgaagacgaatatcgaggtctgcagcacctactcgaaagattcagagaactactttgaaacagaggcggtggagattgctaaggcatttatggaggacgatgagctaacagacagcaaactgccaagccacgctacgcatagtctgttcacctgccctgagaatgaggagatggttctgtccaactcccgaattggtaaaagacgaggggagcctctaattttggttggagaacccagtattaaacggaatctgctgaatgaattcgaccgaattatcgaaaaccaggaaaaatccttaaaggcatcaaaaagtacgcccgacggaaccattaaagatcgcagattgttcatgcaccatgtgtccctggagcctatcacctgtgtccctttcaggacgacaaaggaacggcaagagatacagaatcctaattttactgccccaggtcaggagttcctgtccaagtcacatctgtacgaacacctgaccctggagaagagcagcagcaaccttgcagtgtcagggcatcccttctaccaggtgtccgccacacgcaacgagaagatgcgccacttgataactactgggcgtcctaccaaagtgtttgtgcccccattcaaaaccaaatctcacttccatagggtcgagcagtgtgttcgaaatattaacctggaggaaaatagacagaaacagaatattgatggtcacggatcagacgactcaaaaaataagatcaatgataatgagattcatcagtttaataaaaacaactctaaccaggcggtcgctgtgactttcacgaagtgcgaagaggaaccactggatcttatcacgtcattgcagaatgccagggacattcaggatatgagaatcaagaaaaagcagcgtcaacgggtctttccacagcccggcagtctgtatctggctaagacaagtaccctcccgcggatttcactgaaggccgctgttggcggccaggtcccatcagcctgctctcataaacagttatatacctatggcgtgagcaagcattgcataaagatcaactccaaaaacgccgagtcctttcagtttcataccgaggattacttcgggaaagaatccctgtggaccggaaagggaattcagttggccgatggcggctggctgattccttccaatgatggcaaggccggcaaggaagaattctatcgagcactttgcgacactccaggggtcgacccaaagttaatcagccgcatttgggtttacaatcattatcgttggattatatggaaactggctgctatggaatgcgcttttccaaaagaatttgctaaccgctgtctgtcaccagaacgggtgctgcttcagcttaagtaccgctatgataccgagatcgaccggtcccgaaggtcagcaataaagaagatcatggagcgtgatgataccgcagcgaaaaccttagtgttatgtgtgtcagacatcatatcacttagtgccaatattagcgaaacatcctcaaataaaacatccagcgcggacacccaaaaggtggccatcattgagctgaccgatggttggtacgcagtcaaggcacagttagatcctcctctcctggcagttttgaaaaacggcaggctgactgtaggccagaagattattctccacggagcagaactggtcggctcccctgacgcatgcaccccgctggaagctcccgagagtttaatgctgaagatatcagccaactccacaaggcccgcacgctggtacacaaaactggggtttttccctgaccccaggccatttccgctgcctctgtccagtctgttttctgacggaggaaatgttggatgcgtggacgtgatcatccagcgtgcttatcctatccaatggatggagaagacatctagtggcctatacatatttcgcaatgagagagaggaagagaaagaagccgcaaagtacgtggaggcacagcagaagagactggaggccctgttcacaaaaatccaagaagagttcgaggagcacgaggagaatactacaaagccataccttccgagtcgggctctgacccggcagcaggtgagggccctgcaggatggagctgagctgtacgaagctgttaaaaatgcggccgaccctgcttatttggagggatattttagtgaagaacagctaagggctttgaacaatcatagacagatgctgaatgacaaaaaacaagcgcagattcagctggagatccgaaaagctatggaatctgcagagcagaaagaacaaggactaagtcgagacgtaacaactgtttggaaactgcggattgtgagctattcaaaaaaggagaaggacagcgttatcctgtcaatctggcgtccctctagcgacctttattcactattaacagaggggaaaaggtacaggatataccatctggcaactagcaagagcaaaagcaagagtgagagggccaatatacagctggcggcgactaaaaagacccagtatcagcagctccccgtctccgacgagattctgtttcagatatatcaacctcgcgaacctctccatttcagcaagttcctagaccccgatttccagccaagttgcagtgaggtcgacctgattggcttcgttgtgtctgtggtgaagaagaccgggctggcaccattcgtatatctgtctgacgaatgttataacttattagccataaagttttggattgatctcaacgaagacatcatcaaaccacacatgcttatcgccgctagcaatctccagtggagaccggagagtaagagtggtctgctgactctgtttgctggtgatttcagtgtgttcagtgcctctcccaaagagggacacttccaagagacttttaataagatgaagaacacagtagaaaatattgacatactttgtaacgaggccgaaaacaaattgatgcatatacttcacgccaacgatcctaagtggagtacaccgaccaaagactgtacctctggcccctacacagcccagattatccctggaacaggcaacaaactactcatgtctagccccaactgcgaaatctactaccaatcacccctctccctctgtatggctaaacgaaaaagtgtgagtacccccgtttcagcacaaatgaccagcaaaagctgcaagggcgagaaggaaatagatgaccagaagaattgcaaaaaacgccgggcactcgactttctctctcgacttcctctccccccccccgtcagtccgatctgtacttttgtcagccctgcagctcagaaggcgttccaaccccctagatcctgcggaacaaaatacgagactccaataaagaagaaagaactaaatagccctcagatgactcctttcaagaagtttaacgaaatctctcttctcgaatccaattcgattgcagatgaggaactggctctaatcaatacccaagctctgctctctggcagcacaggggaaaagcagtttatctcagtgagcgagtctactagaacggccccaacatcctcagaggactacttgcgactgaagcgacgatgcacgacatcccttattaaggaacaggagtcttcccaagctagcaccgaagagtgtgaaaagaacaagcaggatacgatcactactaagaagtacatttag

SEQ ID NO: 329600 - DNA, 10257 bp, Artificial Sequence
  derived and/or modified sequence
atgcccatcggcagcaaggagcggcccaccttcttcgagatcttcaaaactaggtgcaacaaagctgaccttggcccaatcagtctgaactggtttgaagagctctccagtgaggcaccaccttataacagcgagcccgcggaggagagcgagcacaagaacaacaattatgagccaaacctgtttaagactcctcagcggaaaccttcctacaaccagttggcatccacgccgattatattcaaggagcaagggctcactctgcccctataccagtcccccgttaaggagctggacaaatttaaactcgatcttggaagaaatgtgccaaacagccgccacaaaagtttgagaactgtgaaaacaaagatggatcaagccgacgatgtttcctgtccgctgctcaactcttgcctctctgaatccccagttgtcctgcagtgcacacacgtgacgccccaacgggacaagtcagtggtttgtggcagtctgttccatactcctaagttcgtcaaggggaggcagaccccgaagcacatctcagagtccctgggcgccgaggtggatcccgacatgtcttggtcatcttcgctggccacaccccccaccctgtctagtacagttctgatagtgagaaatgaggaggcttcagaaacggtcttcccacacgatacaaccgccaacgtcaagtcttatttttctaaccacgacgagagcctgaagaagaatgatcgtttcattgcctctgtgaccgactccgaaaacacaaaccagcgcgaagccgcgagtcatggctttggaaaaacctccggcaactctttcaaagtcaattcttgtaaggaccacataggcaaatcaatgcccaacgtgctagaagatgaggtgtatgaaaccgtcgtggatacatcagaagaggactctttcagcctgtgctttagtaagtgccgcactaagaacctgcagaaggttcgaaccagtaaaactaggaaaaagatattccacgaagccaatgcagatgagtgcgaaaaaagtaaaaaccaggtgaaggagaagtactcttttgtgagcgaggttgagcccaatgataccgaccccctcgacagcaatgtagcaaaccagaagcctttcgaaagcggctcagacaagatttctaaagaggtggtgccttccttggcttgtgaatggagccagctaactctgtcgggcctaaacggggcgcagatggagaaaattccacttctgcatatctcttcctgcgatcagaacatctccgagaaagatttattagacacggaaaacaaacgaaagaaagatttcctgacatccgagaactctttaccccgcatatcttctctgcctaagtcagaaaaaccactcaacgaggaaaccgtggtcaacaaacgagacgaagagcagcatcttgagagccacaccgactgcattttggccgtcaagcaggccatttcaggaacctcacccgtcgcctcttcattccagggcataaagaaatccatcttcagaattagagagtctcctaaagagacctttaacgcatccttctcgggccacatgaccgatccgaactttaaaaaggagactgaggctagtgagagcggcctggagatacacaccgtgtgctcccaaaaggaagattcactctgccccaacctgattgataacgggtcttggcctgctaccacgacccagaacagcgtagctctgaagaatgctggactcatttccacactaaagaaaaaaaccaataagttcatttatgccattcacgatgagacctcatataagggaaagaaaattcccaaagatcagaaatcagaattaattaactgctctgcccagttcgaggctaacgcctttgaggctcctttgaccttcgccaacgcggattctggccttctgcactcgagcgtgaagaggagctgcagccagaatgatagtgaggagcccaccctgagccttactagttcctttgggactatcctgcgaaagtgcagccggaatgaaacgtgttcaaataacacggtcatcagccaagacctggattataaggaagctaagtgtaataaagagaagttacagctctttattacgccagaggctgattcgctgtcttgcttgcaggagggacagtgtgagaacgatcctaagtcgaagaaggttagcgatatcaaggaagaggtgttagccgccgcctgccacccagtccagcacagtaaggtagaatacagcgataccgacttccagagtcagaagtctctgctctatgatcacgagaatgcttccaccttgatacttacccctaccagtaaagacgtcctgagtaatcttgttatgatatcgagaggtaaggagtcctataaaatgtcagacaaactgaaggggaataactacgagtcagacgtcgaactcactaagaacatccctatggaaaagaaccaggacgtgtgcgcactgaatgagaattacaaaaacgtcgaattactgcctcccgagaagtatatgagggtggcttcaccctctaggaaggttcagtttaaccagaatactaacttacgggtgatccaaaaaaatcaggaggagactacaagcatctcaaaaataactgtcaaccccgattcggaggaactgttctccgacaatgagaataactttgtgttccaggtggctaatgagaggaataatctggccttggggaatactaaggaacttcacgagaccgatttaacatgtgtcaatgaacctatctttaagaacagtacaatggtgctatacggcgacaccggagataaacaggcaacccaggtgagtataaagaaggacttggtttatgtgctagcggaggagaacaaaaatagcgtgaaacaacatatcaagatgactctgggacaagatctgaagagtgatatcagtctaaatattgacaagatccccgagaaaaacaacgactacatgaataagtgggcgggactgttagggcccatatcgaaccattcattcggggggtcctttaggacagcctctaataaggagattaaacttagcgagcataatataaaaaagagcaagatgtttttcaaagatattgaggagcagtaccccacctctctggcctgcgtagagatcgtcaacactctggcgctggacaatcagaaaaagctttccaagccccagtcgatcaataccgtgagcgcccaccttcagtcttcagtcgttgtgagcgactgtaagaacagtcacatcacgccacagatgctgttctctaagcaggattttaattctaaccacaatcttactccctctcaaaaagcagaaattaccgaattgtccacaatattggaggaaagcggcagtcagtttgagttcacgcagtttagaaaaccaagttatatcctccaaaagagtacctttgaggttccagaaaatcagatgaccatcctgaagactacgtcagaggaatgcagagatgcggatctgcatgtcatcatgaatgcccctagcatcggtcaggtcgactcatcgaaacagtttgaaggaactgtcgaaattaaacgcaagttcgccggacttctgaagaacgactgtaacaaaagcgcctccggttatttgacagatgaaaatgaggtcggtttccgcggattctatagcgcccatggcactaagctgaacgtgtccactgaggccctgcaaaaagccgtcaaactgtttagtgatattgaaaacattagtgaagaaacttctgcagaggtccaccccatcagtttgagctcctccaaatgccatgattccgtggtgagcatgtttaaaattgaaaatcataacgataagaccgtgtctgagaaaaacaacaagtgtcagttgattctgcagaacaatatcgagatgacaaccggaacttttgttgaagagatcaccgaaaattacaaaaggaacaccgagaacgaggacaacaagtatactgcagctagtcggaattcccacaacctagagttcgatggttctgatagtagtaaaaatgatacggtgtgtattcataaagacgagacggatctcctgtttacagaccagcacaatatctgcttgaaactcagcggccaattcatgaaagaaggtaacacccaaattaaagaggatttatcagatctgacatttctggaggtcgcaaaggcgcaagaggcatgtcacggaaacacttccaataaggaacagctgaccgcaactaaaactgaacaaaatatcaaagatttcgagacatcagatacatttttccaaacagcgtcaggaaagaacatcagcgtggccaaggaatcctttaataaaatcgtgaattttttcgaccagaagccagaagagttacacaacttcagcctgaatagcgaactgcattctgacattagaaagaacaaaatggatatactctcatacgaagaaactgacatagtgaagcacaaaatcctgaaggagtcagtacccgtgggaactggcaatcaattggttaccttccagggtcagccagaaagagacgagaaaatcaaggagccaaccctgcttggattccatacagcatctgggaagaaagtaaaaattgcaaaggaaagcttggataaagtgaaaaacctgttcgacgaaaaggagcagggcacatctgaaataacatccttctctcaccagtgggccaagaccctcaaatatagagaggcctgtaaggacctcgagctggcctgcgaaaccatagagatcacagcggcgccgaagtgtaaggagatgcaaaactctctgaacaatgacaagaacctggtgtccatagaaacggtcgtcccaccgaagcttttgagcgataacctgtgtagacaaacggagaatctcaagacctccaagtccatcttcttgaaagtgaaggtccacgagaatgttgaaaaagaaacagctaagagccccgctacctgttatacaaaccagtcaccttacagcgtcatcgagaattcggcattggccttctacacctcttgcagtcggaaaactagcgtgagtcagacttccttactagaggcaaagaaatggctgcgcgagggcatttttgacggccaaccagaacggatcaacactgcagattacgtgggcaactacctgtacgaaaacaattcaaactccacaattgctgaaaacgataagaaccacctgagtgagaagcaggatacatacctctccaatagctcgatgtcaaacagttatagctatcacagcgacgaggtatataacgattccggctacctgagtaagaataagctagacagtggaatcgaacccgtacttaagaatgtagaggatcagaagaataccagttttagcaaggtcatctcaaacgttaaggacgcaaacgcctacccgcagaccgtcaacgaggacatctgtgtagaagagctggtcacctcttcctcaccgtgcaaaaataagaacgcagctataaagctgtctatctccaactcaaataatttcgaagtcggcccccccgcgttccgaattgcttctgggaaaatcgtgtgcgtgtcccatgaaacgattaaaaaggtaaaagatatctttacggacagtttcagtaaggtgatcaaggaaaacaacgagaataagtctaaaatctgtcagacaaagattatggccggctgttatgaggcgcttgacgacagcgaagacatcctacacaacagcctggataacgacgaatgctcaactcactcccataaggtgtttgccgatatacaatccgaagagatactgcagcacaatcaaaatatgtccggcttagaaaaggtgagcaaaataagcccctgcgacgtctcactagaaacaagcgacatttgcaaatgcagcatcggcaagctgcacaagtctgtgagctccgctaatacttgcggaatattcagcacagcctccggtaagtccgtacaggtgagcgatgcctctcttcaaaacgccagacaagtatttagcgagattgaagattctactaagcaggtcttcagtaaagttttattcaaaagcaatgaacacagtgaccagctgactcgagaggaaaataccgccattcgcacacctgagcacctgattagccagaaggggttcagttacaacgttgttaatagcagtgcattctcagggttctctacagcatccgggaaacaagtgtctatcctggagtcgtccttgcacaaggtgaaaggcgtattagaagagttcgaccttatccgaacagaacactccttacactactcgcccaccagtaggcagaatgtgagtaaaattctgccccgcgttgataagcggaaccctgaacactgtgtcaactccgaaatggaaaaaacatgcagcaaagagttcaagctgtctaataaccttaacgtcgaaggcggcagctccgagaataaccactccatcaaggtttcgccttacttaagccaatttcagcaagacaagcagcaactggtcctgggcacgaaagtctctctcgtcgagaacatccacgtcttgggcaaggagcaagcatcaccgaagaatgtgaaaatggaaatcgggaagacagaaaccttctcagacgtgcccgtgaaaacgaatatcgaggtttgtagcacatatagcaaagattccgagaactacttcgaaacggaggccgtggaaatcgctaaagccttcatggaggatgatgaacttacagactcaaagctgcccagccacgccactcattccttgtttacatgtcccgagaatgaggaaatggttctgagtaactctcgtatagggaagcgtcgcggagaacccttgatactggtgggggaaccaagcatcaagcgcaaccttctgaatgagtttgaccgtatcatagagaaccaagaaaaaagcctgaaagccagcaagtctactccagatggaaccattaaggaccgcagactctttatgcaccatgtgagtctcgagcccatcacctgcgtcccatttcggaccacgaaggaacgccaggagattcagaaccccaacttcactgcccctgggcaggaattcctttcaaaaagtcacctctacgagcatctgactctggaaaagagcagctccaaccttgcagttagcggacatccgttttaccaggtttctgccacccggaacgagaaaatgaggcacctgatcaccaccggaaggccaacaaaggtgttcgtccctccgttcaaaaccaagtctcatttccaccgagtggaacaatgtgtgagaaacataaatctggaagagaataggcaaaaacagaacattgacgggcacggcagcgacgacagcaagaacaagatcaacgataatgaaattcatcagtttaataagaacaatagtaaccaagcggtggcggtaaccttcacaaaatgcgaggaagaacctctggatcttataacgtcgctgcagaacgccagagatatccaggacatgcgcatcaagaaaaagcagagacagagggttttcccacagcccggctccttgtatctggctaaaacatccaccctcccaagaatcagtctgaaggccgctgtgggcgggcaggtcccaagcgcttgctcacacaagcaactgtacacatacggtgtatctaaacattgcatcaagatcaactccaagaatgctgagagctttcaatttcatacagaggactattttggtaaagaaagcttgtggactggcaaaggaatccagctggccgacggtggctggctgatccccagcaacgacggcaaggccggcaaagaagagttctatagggcgctctgtgatacgcccggggttgaccccaaactgataagtaggatttgggtgtacaaccattaccgctggattatatggaaactggctgccatggaatgcgcatttccaaaggaatttgcgaaccggtgcctctcccccgaacgggtcttattgcagctgaaatatcggtatgatacagagatcgatcggtcgaggaggtcagccattaaaaagatcatggagcgggacgacaccgcggccaagaccctggtactctgtgtgagcgatattatcagcctctctgccaacatctcagaaacatcttctaataaaacttctagcgccgatactcagaaagtggctatcattgaactgacggacggctggtatgccgtgaaagcccagctggatccccctctgctggccgtgctcaagaacgggcgccttaccgtcggtcagaagatcatcctccatggtgccgagttggtaggttctcccgacgcttgcacccctctggaagccccagagtcactgatgctgaagatctctgctaacagcacaaggcctgcgagatggtacactaagttaggtttttttcccgatccaaggccattcccgcttccattatcttcactcttctcagatggcggaaacgtcggctgtgtggacgtgataattcagcgggcctaccccatacagtggatggagaagacaagctccggactctacatttttcgaaatgaaagagaggaggaaaaggaagcagctaagtacgtcgaagcacagcaaaaacgtctggaagccctgttcactaaaattcaggaagagttcgaggaacatgaggaaaacaccaccaaaccttacctgccaagcagggctctcactcggcaacaagtgagagccttacaggatggagcggagctgtatgaagctgtgaagaatgcagctgacccggcctacctggagggttacttttccgaggaacaactccgggcgctcaataaccaccgacagatgctcaatgataagaagcaagcccaaattcaattagagattcggaaggccatggaaagcgctgaacagaaggagcagggtttgtctagagatgtcactactgtttggaaactgcggattgtgtcatacagtaagaaggagaaggattcagttatcctgtctatttggcgaccttcctctgacctatactcgttgttgacagagggcaagcggtatcgcatctaccacctggctacgtcaaaaagtaaaagcaagagcgagagagccaacatccaactcgcggccactaagaagacacaataccagcagttgcccgtgagcgatgagattctgttccaaatctaccagcctcgtgagcccctgcactttagcaaattcctggatccggactttcagcctagctgttccgaggtcgatctgattggctttgtcgtttcagtcgtgaaaaagactggtttagccccctttgtgtacctcagcgatgagtgctacaacctgcttgctataaagttttggatcgacttaaatgaagacataatcaaacctcacatgctcatcgcagcctccaacctgcagtggcgtcccgagtccaaaagcggcttgttaacactgttcgctggtgattttagcgtcttcagcgcaagtccaaaggaagggcattttcaggaaacatttaacaagatgaagaacaccgtggaaaatatcgacattctttgcaatgaggccgagaacaaattgatgcatatcctgcatgccaacgatcctaagtggtcaacccctacgaaggactgcacaagcggcccatacaccgctcagatcattcccggcactggcaataagctcctgatgagctcccccaactgcgagatttattatcagtcaccgctttctctgtgtatggccaagaggaagagtgtgagcacacccgtgagcgcccagatgacttcaaagtcctgcaaaggcgagaaggaaattgatgatcagaaaaactgtaaaaagcggcgcgcactcgactttttatctaggctgccattgccgcccccggtgagccccatatgcacttttgtgagccccgccgctcaaaaggcatttcagccacccaggtcgtgcggaactaaatatgaaacccccatcaagaagaaggaactgaactcgccgcaaatgaccccatttaagaaattcaatgagattagcctgctggagtccaactccatagctgacgaagagctggcgcttataaacactcaggctctgctgtcaggttctaccggcgagaaacagttcatcagcgttagtgaatccactcggacggctccaacgtcctcggaggactacttgcgccttaagaggcggtgcaccacatctttgattaaggagcaggagtcatcccaagcatccacagaggagtgcgaaaagaataagcaagatacaattacgactaagaaatacatatag

SEQ ID NO: 329601 - DNA, 10257 bp, Artificial Sequence
  derived and/or modified sequence
atgccaattggatccaaagagcggccaacattctttgagatcttcaaaacacgttgtaacaaggccgaccttggccctattagcctgaactggttcgaagagctttccagcgaggcaccaccctacaatagtgagccggctgaagagagcgagcataaaaataacaactacgagccaaacctattcaaaacaccacagaggaaaccatcctacaatcaactcgcctctacccctataatctttaaggagcagggcctcactctacctctctaccaaagtcctgttaaggagcttgacaaatttaagctcgaccttggacggaatgtgcccaattcacgccataaatcattgcggaccgtgaaaacaaagatggaccaggctgatgacgtgtcctgccccctcttaaactcctgtctatccgaaagtcccgtggtcttacagtgtacccacgtgactccgcaaagagataaatcggtcgtttgcgggtcactgttccacacccctaagtttgtgaaggggaggcagactcccaaacacatttccgagtccctaggagctgaagtggaccccgacatgtcttggtcctctagtctagctacacctccaactctgtcgtccacagtactgattgtgaggaatgaggaggcttcagaaactgtgtttcctcatgacacaactgcgaacgtcaaatcctatttttctaaccatgatgagagcctgaagaaaaacgaccgatttattgcttctgtgaccgattccgagaatacaaaccagcgagaggcagccagccacggttttggtaaaacttcagggaactcatttaaagtcaattcctgtaaagaccacattggtaaaagcatgcccaacgtcctggaggatgaggtttacgagacagtggttgacacttctgaagaggacagcttctcgctatgcttcagtaagtgccggactaaaaacctccagaaagtgcgcacctccaagacccggaaaaagatctttcatgaagccaacgccgacgagtgtgagaagtcaaagaatcaggttaaagagaagtactcgttcgtgtctgaggtggaacctaacgacactgatccactcgactccaacgtggccaaccagaagcccttcgaatctggttcagataagatctcaaaggaagtggtccctagcctcgcttgcgagtggtcccaacttacactttctggtctgaacggggcacaaatggaaaaaattccactgctacatatttccagctgcgaccagaacatttcggaaaaggatctgttagataccgagaacaaaaggaagaaggattttttaacttctgaaaacagcttgccacggataagctccctgcctaaaagcgagaagccgttgaacgaagagactgttgttaataaaagggacgaggaacaacatctagagtcccacacggattgtattctggccgtgaaacaggcaatctcgggaacatctcccgtggcaagcagctttcagggtattaagaagtccatattccggattagggagagcccaaaggaaacgtttaacgctagctttagtggccacatgacagatcctaattttaaaaaagagacagaggccagtgaaagtggtttggagattcatactgtgtgcagccagaaagaagatagtctatgtccaaacttgatcgacaacggcagttggcccgcaaccacaactcaaaatagtgtggctctgaaaaatgcaggactgattagcaccctcaagaaaaagacgaataagttcatttatgcaatccacgacgaaacctcatataaaggaaagaagattccaaaggaccagaagtccgagttgatcaattgtagtgctcagttcgaagctaacgccttcgaagcgcctctgacatttgctaacgctgattctggcttgcttcactccagcgtaaaacgttcgtgttcccagaacgattccgaagagcctactctctccctgaccagcagttttggaactattctccggaagtgcagtaggaatgaaacttgtagtaacaatacggtaatatctcaggacctggactacaaagaagctaagtgcaacaaggagaaactccagttattcatcactcctgaggcagacagtctgtcctgcctccaggaagggcaatgtgagaatgacccgaagagcaaaaaggtctcagatatcaaggaggaggtgctagctgccgcatgccatccagtgcagcactcaaaggttgagtattcagataccgacttccaatctcagaaatctctcctctacgaccacgagaacgccagcaccctaatcctgacccccactagtaaagacgtgctttccaacctggtcatgatcagcagggggaaagagtcttacaagatgagcgataaacttaaggggaataactacgagtctgatgtggagctgactaaaaacattcctatggagaaaaaccaggatgtgtgtgccctgaacgaaaactacaagaatgtggaattacttccccctgagaagtacatgcgggtcgccagcccaagcagaaaggtgcagttcaaccaaaacactaaccttagagtcattcagaagaaccaggaggaaactacgtcaatctctaagatcacggtgaatcctgatagtgaggagttgttctcagacaatgagaacaattttgtgttccaggtggcgaatgaaaggaataatctcgctctggggaataccaaagagttgcatgagaccgatctgacctgtgtcaacgaacccatctttaagaactctaccatggttctgtatggagacaccggggataaacaggctacacaggtttcaatcaagaaggacttggtttacgtcctcgcagaggaaaataaaaactcagtcaagcagcatatcaagatgaccctcggccaagacttgaagtctgacatctctctcaacatagacaagattcccgaaaagaataatgactacatgaataagtgggcaggactgctggggcctattagtaaccatagttttggcggttccttccggaccgcttctaataaagaaatcaagctttccgaacataatatcaagaagagtaaaatgttcttcaaagatattgaagaacagtaccctacgagtctggcctgcgtagagatcgtcaatactttagcgctggataaccagaaaaaattgagtaagccccaatccatcaacactgtcagtgcccacctccagagctctgttgtggtcagcgattgtaagaatagccacatcacacctcagatgttgttcagcaaacaggacttcaatagcaatcacaacctcacgccctcacaaaaggctgaaataaccgagctgtcaacaatcctcgaagagtccggcagccaatttgaattcacccagttcaggaaaccatcctacatcctccagaagagcacgttcgaggtgcctgaaaaccagatgacaatcctcaaaacaacttccgaagagtgcagggacgcggatctgcacgtgatcatgaatgccccatcaatcgggcaggtggactcaagtaagcagttcgaggggactgtggagataaaaaggaaattcgccggactgctgaaaaatgactgcaacaagtcagcaagtggctacctcactgatgagaatgaagttggctttcgcggattctatagcgcgcatggcacgaaactcaacgtttccacagaggccctccaaaaggctgtaaaactattttccgatatagagaatatctccgaggaaacatccgcggaggtccatcccatcagcctcagctcttctaaatgccatgatagcgtggtttccatgttcaagattgaaaatcataacgacaaaacagtgtccgaaaagaacaacaagtgccaattgatcttacaaaataatattgagatgacaaccgggactttcgtggaagagattaccgagaactataagaggaatacggagaacgaggataacaagtacacagctgcatcgcgcaatagtcataacttggagttcgatggaagtgattcctcaaagaatgataccgtttgcatccacaaagacgaaactgaccttctctttaccgaccaacacaacatatgcctgaaactctccggacagtttatgaaagagggaaatacacagattaaggaggacctgtctgatctcacttttctggaagtggccaaggcccaagaggcatgccatggtaatacctcaaataaagaacagttgactgcaaccaagactgaacaaaatatcaaggatttcgagacatccgatactttctttcaaacggcctctggaaaaaacatttccgtggctaaggagtccttcaacaagatcgtaaactttttcgatcagaaaccagaggaactgcataacttcagcctaaattctgagctgcattctgatatacggaagaataaaatggatattctgtcttacgaagagactgacattgttaaacataaaatattaaaggaaagcgttcctgtgggtacagggaatcaactggtcacgtttcagggccagccagaaagagacgaaaagataaaagaacccactttgctgggctttcacacagcaagcggtaaaaaagtgaagatcgctaaggagagtcttgataaggtcaagaatctgtttgacgagaaggagcagggtacttccgaaataaccagctttagtcatcagtgggcaaagactcttaagtacagggaagcatgtaaagatctcgaacttgcctgcgagaccattgagattaccgctgccccaaagtgcaaagaaatgcaaaattccctgaataatgataagaacctggtgagcatcgaaactgtcgtcccccctaaactactgagtgataacctgtgcaggcagactgagaatctgaagactagtaagagtatttttctgaaggtgaaggtgcacgaaaatgtggaaaaggagacagccaagagtcctgctacttgctacaccaatcaaagtccttactctgttatcgagaattctgcactggccttttacacttcatgctctcgaaagaccagtgtgtctcagacaagcttgcttgaggccaaaaagtggcttcgcgagggcatctttgacggacagcccgaacgtattaatactgctgactatgtgggtaattatctgtatgagaacaactctaactccaccattgcagaaaacgacaaaaaccatttatcggaaaagcaggatacatatcttagcaacagttccatgagcaactcgtacagttatcatagtgacgaggtctacaacgatagcgggtatctgagtaaaaataagttagatagtggtatcgaacccgtgctcaaaaacgttgaagatcagaagaatacctcctttagcaaggtcattagcaatgtgaaggatgctaatgcataccctcaaacagtgaacgaagatatctgcgtcgaagagttggtgacttcatcctcaccctgcaaaaacaagaacgccgctattaaactgtcaatttcgaattcaaacaactttgaggtagggccacccgctttccgcatcgcctccggcaagatcgtttgcgtctctcacgaaaccatcaaaaaagtcaaggatatctttaccgacagttttagcaaagtgatcaaggagaataatgagaataaatcaaagatttgccagaccaagatcatggcgggttgctatgaggcgctggacgattccgaggatatcctgcataatagtcttgacaacgacgagtgcagtacacatagccacaaagtttttgccgatatacagagcgaggaaattttacaacacaaccagaatatgtcaggcctggaaaaagtatccaaaatctctccatgtgacgtttcactagaaaccagtgatatatgtaagtgttccatcggtaaactgcacaagtccgtctccagcgcgaatacctgcggcatcttctccaccgcctcagggaagagtgttcaagtgagtgatgctagcttgcagaacgctagacaggtcttttctgaaatcgaggattccactaagcaagtgtttagcaaagtcctttttaagagtaacgaacactctgaccagctaaccagggaagagaatacggcaatacgcacgccagaacacctgatcagtcagaaggggtttagttacaacgtggtgaactcctctgccttctccgggttttcaaccgcctccgggaaacaagtctccatcttggagagctccctgcacaaggtgaagggggtactcgaggagttcgacctcatcagaacagagcacagtctgcattattctcccacgtcgagacagaacgtttcgaaaatcttaccaagagtagataaacggaatcctgaacactgtgtgaattccgaaatggagaaaacatgcagcaaagagtttaagctgtctaataatttgaacgtcgagggcggtagctcggagaataaccacagtatcaaagtgtctccttatttgagccagttccaacaagacaaacagcagcttgttctcggtacgaaggttagcctggtggaaaacatccatgtgctgggcaaagagcaggcctcaccaaaaaatgttaaaatggaaattggaaaaacagagacattttccgatgtacccgtaaagacaaacatcgaggtatgttccacatactctaaagattcagagaattacttcgaaaccgaggctgttgagattgccaaagcgtttatggaggacgatgaattgacggacagcaaactgccctcacatgctactcactcccttttcacctgccctgagaatgaggagatggtgctatctaacagccggattggcaaacgcagaggggagccactgatactcgttggcgagcctagcattaagaggaacctgctgaacgaattcgacaggatcatcgagaatcaggagaaatcgttgaaggcctccaagtctacaccagacggaaccataaaagaccggaggctctttatgcatcacgtcagcctcgagcccatcacttgcgtcccattccgcacgacaaaggaacggcaagaaatacagaaccctaatttcacagccccaggacaggagtttctttctaagagccacctgtatgagcatctaactttggaaaagtcctcatccaacctggccgtcagtggtcatccattttatcaggtctccgcaacaagaaatgagaaaatgcggcatctcattacaacaggtagacctactaaagtattcgttccgccttttaaaacaaaatctcatttccacagagtggaacaatgcgttcgaaacatcaacttggaagaaaaccgacagaaacagaacattgatgggcacggaagcgacgacagcaaaaataagattaatgacaacgagatccatcagtttaataaaaataacagtaaccaggcagtcgcagtcacattcactaaatgcgaagaggaaccactggacttaatcacatcgctccagaacgcgagagacatccaggatatgcgaataaaaaagaagcaacggcagagagttttcccacagcctggcagtttgtaccttgcaaaaaccagtactctccctcgaatctctctcaaggccgcagtggggggtcaggttccctcagcttgctctcacaagcagttatacacctatggcgtctcaaagcattgtatcaaaatcaatagcaaaaatgcagagagtttccagttccacaccgaggattatttcggcaaggagagtctttggaccggaaagggcatccaactggccgatggcggatggctgatcccctccaacgatggcaaggcaggaaaagaggagttttatcgcgcactgtgcgacacccccggagtggacccgaaattaatcagcaggatctgggtgtataaccattaccgttggattatctggaaactggccgctatggagtgcgccttccctaaggaatttgccaatcggtgcctgtcccctgagagggtacttctgcaactgaagtatcgatacgatactgagatcgaccgtagcaggcggagtgccattaagaaaatcatggaacgcgacgacaccgcggctaagactctcgtgctatgcgtttccgatatcatctcccttagtgcaaatattagtgagacctccagcaacaaaaccagcagcgccgacactcaaaaggtggctatcattgaactgacagacgggtggtacgccgtaaaagcccagcttgatcctcctcttttggccgtgctaaagaatggcagactaactgtgggccagaagattattctgcacggagctgaactggttggcagtccggacgcttgtacaccgctagaagccccagagagcctgatgctgaagatatctgctaactccactagacccgctcggtggtataccaaactggggttctttcctgatccgcgtccatttcctctgcctctgagtagcctcttctccgatggcggtaatgttgggtgcgtggacgttattattcagagggcctaccccatccagtggatggaaaagacatcctctgggctgtatatcttccggaatgagcgggaagaagagaaagaggccgcaaaatatgtggaggcccagcaaaaacgactggaggctctcttcactaaaatccaggaagagtttgaggagcatgaagaaaacaccacgaagccttacttgccgtcacgagccttaacccggcagcaggtcagagccttgcaggatggagccgagctgtacgaagctgtcaagaacgctgccgacccggcttacctcgaagggtatttttcagaagagcagctccgtgctctgaacaaccacaggcaaatgctcaacgataagaagcaggctcagatacagctggagataagaaaggctatggaaagtgctgagcaaaaggagcaggggttgagccgggatgttaccaccgtgtggaaactcaggatcgtgtcctatagtaaaaaagagaaagactcagttatcctgtccatctggcggccttctagtgatttgtactctttactcacagaaggaaaacgatatcgcatctaccatctggccactagcaaatccaaaagcaaatctgaaagggccaacatccagttggcagctacgaagaagacccagtatcagcagctgccagtttcagacgagattctgtttcagatctatcagccgagagagcctctgcacttttccaaattcctggatcccgattttcagccctcctgcagcgaggtggatttaatcgggtttgtcgtgtcagtggtcaagaaaaccggcctggcccctttcgtgtacctgagtgacgaatgttacaatctactggcaatcaaattttggattgacctgaacgaagatataatcaaaccacatatgctgatcgccgctagcaaccttcagtggcgaccagaaagcaaatccggcttgctgacattgttcgccggtgatttttccgtgttcagtgcctccccgaaggagggtcacttccaagagacctttaacaaaatgaagaatactgtggagaatatcgatatactctgtaacgaagccgagaacaaacttatgcatatcctgcatgcgaatgatcccaagtggagcaccccaacaaaggattgtactagcggaccttacacagcccagattatcccaggcacaggaaataaactgctcatgagtagccccaactgcgagatctattatcaatcacctttgtcactttgtatggccaagcggaagagtgtctccaccccagtgagcgcccagatgacgtctaagagctgcaaaggggaaaaggagatcgatgaccagaaaaattgtaagaagcggcgagctctcgactttctcagtcgcctacctctgccacctcctgtttctcccatctgcactttcgtttcgccagccgctcagaaggcctttcagccacctcgctcttgcggtactaagtatgagacaccgatcaagaagaaggagctgaacagtcctcagatgacgccgttcaagaaatttaatgaaatctctttgctggaaagcaattcaatagccgatgaagaactggctctgatcaatactcaagccctgctgtcaggcagtactggcgaaaaacagttcattagcgtttccgagtcgacaaggaccgcccctacgtcaagcgaagactaccttagactaaaaaggagatgtactacctctttaatcaaagaacaggaatcctctcaggcaagtaccgaagagtgcgaaaaaaacaagcaggatacaattactaccaaaaagtacatctac

SEQ ID NO: 329602 - DNA, 10257 bp, Artificial Sequence
  derived and/or modified sequence
atgcctatcggatccaaagagcgcccaaccttttttgagattttcaagacgaggtgtaataaagcagatctgggacctattagtctgaattggttcgaagagctttcctctgaagcgcctccgtacaattctgaacctgcggaagaaagcgaacacaagaataacaactatgagcccaatctgttcaagaccccccaacggaagcccagctataaccagcttgcctctaccccgattatcttcaaagaacagggactgacgctccccctgtaccagtctcccgtgaaggaactggataagttcaagctggacttaggacggaatgtgcctaactcacggcataaaagtctccgaactgtgaagacaaaaatggaccaggctgatgatgtgagctgtccattacttaattcctgcttatcagagtcaccggttgttctgcagtgcacccacgtcacccctcagagagacaaaagtgtagtgtgcggaagcctttttcacacgcctaaatttgtcaaggggaggcagactcccaagcatatttccgagtccctgggcgctgaggttgatccggacatgagctggtcctccagcctagctacacctccaaccttaagttccaccgttttaattgttagaaatgaggaggcgtctgaaaccgtgtttccacatgacaccaccgccaacgtaaagtcctacttctcaaatcatgacgaatccctcaaaaaaaacgacagattcatcgccagtgttaccgattcagagaatacaaatcagagagaagctgcctctcacggattcggtaagacttcaggtaacagcttcaaggtgaattcttgcaaagaccatatcgggaagagtatgccaaacgtcttggaggacgaagtttacgagactgtggtggatacctctgaggaggattccttttctctttgctttagtaagtgcaggaccaagaatcttcaaaaggttcgcacatctaaaacacgcaagaaaatctttcacgaggccaatgcagatgagtgcgagaaatccaagaaccaggtgaaagagaaatattccttcgtctctgaggttgagcctaatgatactgaccctctcgacagcaatgtagctaatcaaaagcccttcgagagcgggtcagataaaatcagtaaggaggtggtgcccagtcttgcctgcgaatggagccagttgacacttagtggtttaaacggcgctcaaatggagaaaatccccttattgcacatctcatcttgcgaccagaacatatcagagaaagacctcctggatacggagaacaagcgaaagaaggactttctgacttccgagaacagtctgccccgaatttcctcccttcctaaatcggagaaacctctcaatgaggaaactgtggtcaacaaaagagacgaggaacagcaccttgagagtcacacagattgcatcttggctgtgaagcaggcaatcagtggcacctccccagttgcaagcagttttcagggcattaagaaaagcatattccgtataagagaatctccaaaggaaacattcaacgctagcttttctggacatatgaccgatccgaatttcaagaaggagacggaggccagcgaatccggcctggagatccacacggtgtgctcacagaaggaggattcactctgtcccaacctcattgacaatggaagctggccggctaccacaacccagaattccgtggctttgaagaacgccggtctgatttccacactgaaaaagaaaaccaacaagttcatctatgctatccacgacgagacaagctataaagggaaaaaaatccctaaggaccaaaaatcagagttaatcaattgttctgcacaatttgaggctaatgcctttgaagccccacttacttttgcaaatgccgattccggactgctgcactctagcgtcaaaagatcctgctctcagaacgatagcgaagaacctacattgtctctgacgtcgtcttttggtactatcctcaggaaatgctcacgaaatgagacttgcagtaataacacagtgatatcccaagacttggattacaaagaggcaaaatgcaacaaggagaagttgcagctgtttattaccccagaggccgatagtttaagctgcctgcaggagggacagtgcgagaacgaccccaaatctaaaaaggtgtctgatattaaagaagaagtgctggctgcagcttgccatcccgtccagcactctaaagtggaatactccgatacggacttccaaagtcagaaaagtctgctgtatgaccacgaaaatgccagtaccttaattttgactcccacctccaaggacgtgctgagcaatttagttatgattagccggggtaaagagtcatataagatgtcagacaagttgaaaggaaataactatgagagtgacgtagagttgactaagaacatccctatggaaaagaaccaagacgtgtgcgccctgaatgaaaactacaaaaacgtcgagttgttacccccagagaagtacatgcgagtggcatcaccatccagaaaagtacagtttaaccagaacaccaatttacgcgtcatccaaaaaaaccaggaagaaactacgtcaatcagcaagattactgtaaatcctgatagtgaggagttgtttagcgacaatgaaaacaactttgtgttccaggtcgccaatgagaggaataacctggccctgggaaacactaaggagctgcatgaaaccgacttaacttgtgtgaacgaacccattttcaagaacagtacaatggtgctttacggggacactggagataagcaagccacacaggtctcaattaagaaggaccttgtgtacgtcctggcggaagagaacaagaacagcgtaaagcaacacattaaaatgaccctgggccaggacttgaaaagcgatatcagtttaaatatcgacaaaattcctgagaagaataatgattacatgaataaatgggccggactgctgggccctatctctaaccactcgttcggcggttcatttaggacagcatccaataaagaaattaagctgtctgaacataatattaaaaaaagtaaaatgttttttaaggacatcgaagaacagtacccaacctccttagcatgcgtcgaaattgtgaatacactcgcgttagacaaccagaagaagctgagcaaacctcagagtattaacacggtgtccgcccacctgcagtctagtgtggtggtgagcgactgcaagaacagccatatcaccccacagatgctgttttctaagcaggattttaactccaatcacaacctgacaccatcccaaaaagccgaaatcactgagttgtccacaattctggaggaatcaggcagtcaattcgaattcacccagtttcgaaaaccatcttatattcttcagaaatccacctttgaagtgcccgaaaatcagatgactatactgaagacaacttcggaggagtgtagggacgccgatctgcatgttattatgaacgctcctagcattggacaggtggattcttccaagcaattcgaaggcacggtggagatcaagcgcaaattcgcaggattattgaaaaatgactgcaacaagagcgcaagcggctatctaaccgacgagaatgaggtgggattcagaggcttttactctgcacacggaaccaagctgaacgtttccactgaggcacttcagaaggccgtaaaactttttagtgacatcgagaacatcagcgaagagacgagtgcagaggtacacccaatttctctgtcctcatctaaatgccacgactctgtcgtatctatgtttaagattgagaatcacaacgataagaccgtgtccgaaaagaataacaagtgtcagttgatcctgcagaataacatcgagatgactactggcacatttgtggaagagatcacagagaactataaacgcaacaccgagaacgaagacaataagtacacagccgctagccgcaacagccataatttggagtttgacggcagtgattcctctaaaaatgataccgtgtgtattcataaggacgaaaccgacctactcttcaccgaccaacacaatatttgtcttaagctgtctggacagttcatgaaggagggcaatacacagatcaaggaagatctctcagacctgacttttctggaggtcgcgaaggcgcaagaagcatgccatggcaacactagtaacaaggagcaactgaccgcgactaaaacagaacagaacatcaaagacttcgaaacttcagatacgtttttccagactgcttccgggaaaaacatcagcgtggctaaggaaagcttcaataagatcgtcaacttcttcgaccagaagccggaagaattacataacttttctctgaattccgagcttcacagtgatatccgtaagaataaaatggacatactgagctatgaggaaaccgacattgtaaagcacaagattctgaaggagtcagtgcccgtggggacaggcaaccaactggtgacttttcaaggacaacccgagcgtgatgagaagattaaagaacctacgcttctgggcttccatactgcctccggcaagaaggttaagattgccaaagaaagtcttgataaagttaagaatctttttgacgagaaggaacagggcaccagtgagataaccagtttttctcaccagtgggcaaagacattgaagtaccgagaagcctgtaaagacctggaactcgcatgtgagaccatcgaaatcaccgctgccccaaaatgtaaagagatgcagaactcactcaataatgacaagaatttggtgtcgatcgagacggtagtgcctccaaagctcctctctgataatctgtgcagacaaactgagaatcttaagaccagcaaatccattttcctaaaagttaaggttcacgagaatgttgagaaggaaaccgcaaagagccccgctacttgttacactaaccagagtccgtactctgtgattgaaaattccgcgctggccttctacacatcctgtagtaggaagacatcagttagtcagacatcattactggaggctaagaaatggctacgggaaggtatatttgatggccaacccgagcgcatcaataccgcagactacgttgggaactacctgtatgaaaacaatagcaactccactattgccgagaatgacaagaatcatctatccgaaaaacaggatacgtaccttagcaactccagtatgtccaactcatattcttatcatagcgatgaagtatacaatgatagtggctatctctccaagaacaagctggatagcgggatcgagcctgtgttaaaaaacgtggaagaccaaaagaacacgtcttttagtaaagtgatctctaatgtgaaggacgccaacgcgtacccacagacagtcaatgaagacatatgcgttgaagagctggtaacttccagctcaccctgtaagaacaagaacgctgccattaaattatctataagtaatagcaacaacttcgaagttgggccacctgctttccgcatcgcttcgggcaagattgtgtgtgtgagtcacgagaccatcaagaaagtgaaagacattttcaccgacagcttctctaaggtgatcaaggaaaacaacgagaataagtccaaaatttgtcaaactaagattatggctgggtgctatgaggcccttgatgacagtgaggacattctacacaattccttagacaacgacgaatgctctactcatagccacaaggttttcgctgatatacaatctgaagaaatattgcagcacaaccagaacatgtctgggcttgaaaaggtgtcaaaaataagtccttgcgatgtgtcactggaaacaagtgatatttgcaagtgctccatcggaaagctccataagagcgtgtctagcgcgaatacatgcggaatcttttctacggccagcgggaaaagcgttcaggtgtctgatgctagcctgcagaatgctagacaggtattctctgaaatcgaagacagcacaaaacaagtttttagcaaagtgctgtttaagtctaatgaacactctgatcagttgactcgagaagaaaacaccgccatcagaactcctgagcatttgataagccagaaaggcttcagttacaatgttgttaatagttccgccttcagtggtttttctacggcctctgggaaacaggtgtccatcctcgaaagcagccttcataaagtcaagggcgtcctggaagagttcgatctcatccgcacagaacatagtctccattactcacccacttccagacagaacgtgtctaagattctgcctcgcgtcgataagaggaacccggagcattgtgtcaattcagagatggagaagacctgtagcaaggaattcaaattgtctaacaacctcaacgttgaaggaggaagttcagaaaacaaccactccatcaaggttagcccctatctgtctcaatttcagcaggataaacagcagctcgttttgggcactaaagttagtttggttgaaaacatccatgttttaggcaaagagcaagcttcacccaaaaacgtcaaaatggaaataggcaagacagagaccttttccgatgtccctgtgaagacgaacatagaggtttgttctacatactctaaggattctgaaaactattttgagacagaagccgtggaaatagcgaaggcgtttatggaagatgatgagctgactgactcgaagctgccctcgcacgctacacattcccttttcacctgtccagaaaacgaagaaatggtgctctccaacagtagaatcgggaaacggagaggagaacccctcatactggtgggcgagccgtctatcaagagaaaccttctgaacgaattcgatcggatcatcgaaaaccaggaaaagtcactaaaggctagcaagagcacccctgacggaactatcaaggatagacggttgtttatgcaccacgtctctttagaaccgattacatgtgtgccctttcgcaccacaaaggagaggcaggagatccagaatcctaatttcacagcgcctgggcaggagtttttatcaaaaagtcacctttacgagcacttgaccctggaaaaatcgtcctccaacctggcggtgagtgggcatcccttttaccaggtctcagcaaccaggaatgagaaaatgcggcatctcatcacgacaggcaggcctaccaaggtcttcgtccctccatttaagacaaagtcacactttcaccgcgtcgagcaatgcgtgcgcaatattaatcttgaggagaatagacagaagcagaatatcgacggacacggctccgacgacagcaagaataaaataaatgacaacgagatacaccaatttaacaaaaacaattccaaccaggccgtggccgttacgtttaccaagtgtgaggaggagccgctggacctcataacctcccttcagaacgccagggatatccaggatatgcggataaagaaaaagcaacgccagagggtatttccacaaccgggaagcctctacctcgcaaaaactagcaccctgccacgcataagtctgaaagccgctgtggggggacaggtcccttccgcctgtagccacaagcagctgtacacctacggggtgtcaaagcattgtataaaaattaacagcaaaaacgccgaaagcttccagtttcacaccgaggattacttcggcaaggaatcactgtggaccggtaaggggatccagctggcagacggcggttggctcattccaagcaatgatggcaaagccggtaaggaagaattttaccgggctctgtgcgatactcccggagttgatcccaaattgatcagcaggatatgggtttataaccactatcgatggattatctggaaattggccgcaatggagtgcgcctttcccaaggaattcgctaataggtgcctgagcccggagagagtgctcctgcagctgaagtaccggtacgacacagaaattgataggagtagaaggtccgccattaagaaaatcatggagcgggatgacacagctgccaaaacactggtcctgtgcgtgtcagacattatttcactgagtgctaatatttctgaaacgtcaagcaacaaaacctctagcgctgatacccaaaaggtggccatcatagagttgactgatggctggtacgcagtgaaggcacagctggacccaccactcctggctgtgcttaaaaacggcagacttactgttggtcagaagattattcttcacggcgcagaactcgtggggagcccagatgcctgcaccccattggaggcaccggagagtctcatgctgaaaatcagtgcgaattccactcgcccagccagatggtataccaaactgggcttcttccccgatcctcggcctttccccctccctctgtcttctctctttagtgatgggggtaatgtgggctgcgtggacgtaatcattcaacgcgcttaccccatacagtggatggagaaaacaagctccgggctttatatattccgtaatgaacgcgaggaagagaaagaagcagccaagtatgtcgaggcacagcagaagagactagaagcactattcaccaagattcaggaagagtttgaagaacatgaagagaacaccacaaaaccatacctaccttctcgcgcactcacacggcagcaagttcgcgcactgcaggacggagccgaactttacgaagcagtcaaaaacgccgctgatcctgcctacttggagggctatttctcagaagaacagcttagagctctgaacaaccacagacagatgctcaatgacaagaagcaggcccagatacaactggaaatccgtaaggccatggagtcagccgagcagaaggagcagggtctgtcacgcgacgtcactacagtttggaaactacgaatcgtgtcatattctaaaaaggagaaagacagcgtgatcctgtctatctggaggccttctagtgatctctatagcctgctcacggaaggcaaacgatacaggatctaccatctagcgacctctaagtcaaaaagcaagtccgagagggccaacatccagcttgcggcaaccaagaagacacagtatcagcagctgcctgtctccgatgagattttatttcagatataccagccaagagaaccacttcacttttccaaattccttgaccctgactttcaaccatcgtgttccgaggtcgatcttatcgggttcgtggtgtccgtagttaagaaaacaggtttggccccttttgtatacttaagtgatgaatgttataacttgctggcaattaagttctggatagatctgaatgaagatatcatcaagccacatatgcttatcgccgctagcaatcttcaatggcggccagagtctaagagcggcttgcttacgctcttcgccggtgattttagtgtgttcagtgccagcccgaaagagggccattttcaggagaccttcaataagatgaaaaacacagtcgaaaacatagatattctgtgtaatgaggctgagaataagctgatgcacatcctgcatgccaatgatccaaagtggtcaactccaactaaggattgcacctccggcccatatactgcccagatcatacctgggacaggcaataaactgctgatgtcatcccctaattgcgagatatattatcagtcacctctgtcattgtgtatggcaaagcggaagtctgtctccacccctgtgtccgcacagatgacgagtaagtcatgcaagggggagaaggagatagacgaccaaaaaaattgtaagaagagacgcgcactggattttctgtcacggctgccactgcccccacccgtgtcccctatctgtacttttgtaagtcctgcagcacaaaaggcatttcagccccctaggtcctgcgggactaaatatgagacaccaattaagaagaaagagctgaatagccctcagatgacccccttcaagaagttcaacgaaatatcccttctggagtctaattcaattgcagatgaggagttagccctcatcaacactcaggccttactatcaggatccaccggggagaaacagtttatctcagtatccgaatcaacccgtacggcaccaacttccagtgaagactacctacgcctgaagcgacgatgcaccacaagccttattaaggaacaggaatcatctcaggcgtccacggaggaatgcgaaaagaataagcaggacacaattacaacgaagaaatacatatag

SEQ ID NO: 329603 - DNA, 10930 bp, Artificial Sequence
  derived and/or modified sequence
gggcttgtggcgcgagcttctgaaactaggcggcagaggcggagccgctgtggcactgctgcgcctctgctgcgcctcgggtgtcttttgcggcggtgggtcgccgccgggagaagcgtgaggggacagatttgtgaccggcgcggtttttgtcagcttactccggccaaaaaagaactgcacctctggagcggacttatttaccaagcattggaggaatatcgtaggtaaaaatgcctattggatccaaagagaggccaacattttttgaaatttttaagacacgctgcaacaaagcagatttaggaccaataagtcttaattggtttgaagaactttcttcagaagctccaccctataattctgaacctgcagaagaatctgaacataaaaacaacaattacgaaccaaacctatttaaaactccacaaaggaaaccatcttataatcagctggcttcaactccaataatattcaaagagcaagggctgactctgccgctgtaccaatctcctgtaaaagaattagataaattcaaattagacttaggaaggaatgttcccaatagtagacataaaagtcttcgcacagtgaaaactaaaatggatcaagcagatgatgtttcctgtccacttctaaattcttgtcttagtgaaagtcctgttgttctacaatgtacacatgtaacaccacaaagagataagtcagtggtatgtgggagtttgtttcatacaccaaagtttgtgaagggtcgtcagacaccaaaacatatttctgaaagtctaggagctgaggtggatcctgatatgtcttggtcaagttctttagctacaccacccacccttagttctactgtgctcatagtcagaaatgaagaagcatctgaaactgtatttcctcatgatactactgctaatgtgaaaagctatttttccaatcatgatgaaagtctgaagaaaaatgatagatttatcgcttctgtgacagacagtgaaaacacaaatcaaagagaagctgcaagtcatggatttggaaaaacatcagggaattcatttaaagtaaatagctgcaaagaccacattggaaagtcaatgccaaatgtcctagaagatgaagtatatgaaacagttgtagatacctctgaagaagatagtttttcattatgtttttctaaatgtagaacaaaaaatctacaaaaagtaagaactagcaagactaggaaaaaaattttccatgaagcaaacgctgatgaatgtgaaaaatctaaaaaccaagtgaaagaaaaatactcatttgtatctgaagtggaaccaaatgatactgatccattagattcaaatgtagcaaatcagaagccctttgagagtggaagtgacaaaatctccaaggaagttgtaccgtctttggcctgtgaatggtctcaactaaccctttcaggtctaaatggagcccagatggagaaaatacccctattgcatatttcttcatgtgaccaaaatatttcagaaaaagacctattagacacagagaacaaaagaaagaaagattttcttacttcagagaattctttgccacgtatttctagcctaccaaaatcagagaagccattaaatgaggaaacagtggtaaataagagagatgaagagcagcatcttgaatctcatacagactgcattcttgcagtaaagcaggcaatatctggaacttctccagtggcttcttcatttcagggtatcaaaaagtctatattcagaataagagaatcacctaaagagactttcaatgcaagtttttcaggtcatatgactgatccaaactttaaaaaagaaactgaagcctctgaaagtggactggaaatacatactgtttgctcacagaaggaggactccttatgtccaaatttaattgataatggaagctggccagccaccaccacacagaattctgtagctttgaagaatgcaggtttaatatccactttgaaaaagaaaacaaataagtttatttatgctatacatgatgaaacatcttataaaggaaaaaaaataccgaaagaccaaaaatcagaactaattaactgttcagcccagtttgaagcaaatgcttttgaagcaccacttacatttgcaaatgctgattcaggtttattgcattcttctgtgaaaagaagctgttcacagaatgattctgaagaaccaactttgtccttaactagctcttttgggacaattctgaggaaatgttctagaaatgaaacatgttctaataatacagtaatctctcaggatcttgattataaagaagcaaaatgtaataaggaaaaactacagttatttattaccccagaagctgattctctgtcatgcctgcaggaaggacagtgtgaaaatgatccaaaaagcaaaaaagtttcagatataaaagaagaggtcttggctgcagcatgtcacccagtacaacattcaaaagtggaatacagtgatactgactttcaatcccagaaaagtcttttatatgatcatgaaaatgccagcactcttattttaactcctacttccaaggatgttctgtcaaacctagtcatgatttctagaggcaaagaatcatacaaaatgtcagacaagctcaaaggtaacaattatgaatctgatgttgaattaaccaaaaatattcccatggaaaagaatcaagatgtatgtgctttaaatgaaaattataaaaacgttgagctgttgccacctgaaaaatacatgagagtagcatcaccttcaagaaaggtacaattcaaccaaaacacaaatctaagagtaatccaaaaaaatcaagaagaaactacttcaatttcaaaaataactgtcaatccagactctgaagaacttttctcagacaatgagaataattttgtcttccaagtagctaatgaaaggaataatcttgctttaggaaatactaaggaacttcatgaaacagacttgacttgtgtaaacgaacccattttcaagaactctaccatggttttatatggagacacaggtgataaacaagcaacccaagtgtcaattaaaaaagatttggtttatgttcttgcagaggagaacaaaaatagtgtaaagcagcatataaaaatgactctaggtcaagatttaaaatcggacatctccttgaatatagataaaataccagaaaaaaataatgattacatgaacaaatgggcaggactcttaggtccaatttcaaatcacagttttggaggtagcttcagaacagcttcaaataaggaaatcaagctctctgaacataacattaagaagagcaaaatgttcttcaaagatattgaagaacaatatcctactagtttagcttgtgttgaaattgtaaataccttggcattagataatcaaaagaaactgagcaagcctcagtcaattaatactgtatctgcacatttacagagtagtgtagttgtttctgattgtaaaaatagtcatataacccctcagatgttattttccaagcaggattttaattcaaaccataatttaacacctagccaaaaggcagaaattacagaactttctactatattagaagaatcaggaagtcagtttgaatttactcagtttagaaaaccaagctacatattgcagaagagtacatttgaagtgcctgaaaaccagatgactatcttaaagaccacttctgaggaatgcagagatgctgatcttcatgtcataatgaatgccccatcgattggtcaggtagacagcagcaagcaatttgaaggtacagttgaaattaaacggaagtttgctggcctgttgaaaaatgactgtaacaaaagtgcttctggttatttaacagatgaaaatgaagtggggtttaggggcttttattctgctcatggcacaaaactgaatgtttctactgaagctctgcaaaaagctgtgaaactgtttagtgatattgagaatattagtgaggaaacttctgcagaggtacatccaataagtttatcttcaagtaaatgtcatgattctgttgtttcaatgtttaagatagaaaatcataatgataaaactgtaagtgaaaaaaataataaatgccaactgatattacaaaataatattgaaatgactactggcacttttgttgaagaaattactgaaaattacaagagaaatactgaaaatgaagataacaaatatactgctgccagtagaaattctcataacttagaatttgatggcagtgattcaagtaaaaatgatactgtttgtattcataaagatgaaacggacttgctatttactgatcagcacaacatatgtcttaaattatctggccagtttatgaaggagggaaacactcagattaaagaagatttgtcagatttaacttttttggaagttgcgaaagctcaagaagcatgtcatggtaatacttcaaataaagaacagttaactgctactaaaacggagcaaaatataaaagattttgagacttctgatacattttttcagactgcaagtgggaaaaatattagtgtcgccaaagagtcatttaataaaattgtaaatttctttgatcagaaaccagaagaattgcataacttttccttaaattctgaattacattctgacataagaaagaacaaaatggacattctaagttatgaggaaacagacatagttaaacacaaaatactgaaagaaagtgtcccagttggtactggaaatcaactagtgaccttccagggacaacccgaacgtgatgaaaagatcaaagaacctactctattgggttttcatacagctagcgggaaaaaagttaaaattgcaaaggaatctttggacaaagtgaaaaacctttttgatgaaaaagagcaaggtactagtgaaatcaccagttttagccatcaatgggcaaagaccctaaagtacagagaggcctgtaaagaccttgaattagcatgtgagaccattgagatcacagctgccccaaagtgtaaagaaatgcagaattctctcaataatgataaaaaccttgtttctattgagactgtggtgccacctaagctcttaagtgataatttatgtagacaaactgaaaatctcaaaacatcaaaaagtatctttttgaaagttaaagtacatgaaaatgtagaaaaagaaacagcaaaaagtcctgcaacttgttacacaaatcagtccccttattcagtcattgaaaattcagccttagctttttacacaagttgtagtagaaaaacttctgtgagtcagacttcattacttgaagcaaaaaaatggcttagagaaggaatatttgatggtcaaccagaaagaataaatactgcagattatgtaggaaattatttgtatgaaaataattcaaacagtactatagctgaaaatgacaaaaatcatctctccgaaaaacaagatacttatttaagtaacagtagcatgtctaacagctattcctaccattctgatgaggtatataatgattcaggatatctctcaaaaaataaacttgattctggtattgagccagtattgaagaatgttgaagatcaaaaaaacactagtttttccaaagtaatatccaatgtaaaagatgcaaatgcatacccacaaactgtaaatgaagatatttgcgttgaggaacttgtgactagctcttcaccctgcaaaaataaaaatgcagccattaaattgtccatatctaatagtaataattttgaggtagggccacctgcatttaggatagccagtggtaaaatcgtttgtgtttcacatgaaacaattaaaaaagtgaaagacatatttacagacagtttcagtaaagtaattaaggaaaacaacgagaataaatcaaaaatttgccaaacgaaaattatggcaggttgttacgaggcattggatgattcagaggatattcttcataactctctagataatgatgaatgtagcacgcattcacataaggtttttgctgacattcagagtgaagaaattttacaacataaccaaaatatgtctggattggagaaagtttctaaaatatcaccttgtgatgttagtttggaaacttcagatatatgtaaatgtagtatagggaagcttcataagtcagtctcatctgcaaatacttgtgggatttttagcacagcaagtggaaaatctgtccaggtatcagatgcttcattacaaaacgcaagacaagtgttttctgaaatagaagatagtaccaagcaagtcttttccaaagtattgtttaaaagtaacgaacattcagaccagctcacaagagaagaaaatactgctatacgtactccagaacatttaatatcccaaaaaggcttttcatataatgtggtaaattcatctgctttctctggatttagtacagcaagtggaaagcaagtttccattttagaaagttccttacacaaagttaagggagtgttagaggaatttgatttaatcagaactgagcatagtcttcactattcacctacgtctagacaaaatgtatcaaaaatacttcctcgtgttgataagagaaacccagagcactgtgtaaactcagaaatggaaaaaacctgcagtaaagaatttaaattatcaaataacttaaatgttgaaggtggttcttcagaaaataatcactctattaaagtttctccatatctctctcaatttcaacaagacaaacaacagttggtattaggaaccaaagtgtcacttgttgagaacattcatgttttgggaaaagaacaggcttcacctaaaaacgtaaaaatggaaattggtaaaactgaaactttttctgatgttcctgtgaaaacaaatatagaagtttgttctacttactccaaagattcagaaaactactttgaaacagaagcagtagaaattgctaaagcttttatggaagatgatgaactgacagattctaaactgccaagtcatgccacacattctctttttacatgtcccgaaaatgaggaaatggttttgtcaaattcaagaattggaaaaagaagaggagagccccttatcttagtgggagaaccctcaatcaaaagaaacttattaaatgaatttgacaggataatagaaaatcaagaaaaatccttaaaggcttcaaaaagcactccagatggcacaataaaagatcgaagattgtttatgcatcatgtttctttagagccgattacctgtgtaccctttcgcacaactaaggaacgtcaagagatacagaatccaaattttaccgcacctggtcaagaatttctgtctaaatctcatttgtatgaacatctgactttggaaaaatcttcaagcaatttagcagtttcaggacatccattttatcaagtttctgctacaagaaatgaaaaaatgagacacttgattactacaggcagaccaaccaaagtctttgttccaccttttaaaactaaatcacattttcacagagttgaacagtgtgttaggaatattaacttggaggaaaacagacaaaagcaaaacattgatggacatggctctgatgatagtaaaaataagattaatgacaatgagattcatcagtttaacaaaaacaactccaatcaagcagtagctgtaactttcacaaagtgtgaagaagaacctttagatttaattacaagtcttcagaatgccagagatatacaggatatgcgaattaagaagaaacaaaggcaacgcgtctttccacagccaggcagtctgtatcttgcaaaaacatccactctgcctcgaatctctctgaaagcagcagtaggaggccaagttccctctgcgtgttctcataaacagctgtatacgtatggcgtttctaaacattgcataaaaattaacagcaaaaatgcagagtcttttcagtttcacactgaagattattttggtaaggaaagtttatggactggaaaaggaatacagttggctgatggtggatggctcataccctccaatgatggaaaggctggaaaagaagaattttatagggctctgtgtgacactccaggtgtggatccaaagcttatttctagaatttgggtttataatcactatagatggatcatatggaaactggcagctatggaatgtgcctttcctaaggaatttgctaatagatgcctaagcccagaaagggtgcttcttcaactaaaatacagatatgatacggaaattgatagaagcagaagatcggctataaaaaagataatggaaagggatgacacagctgcaaaaacacttgttctctgtgtttctgacataatttcattgagcgcaaatatatctgaaacttctagcaataaaactagtagtgcagatacccaaaaagtggccattattgaacttacagatgggtggtatgctgttaaggcccagttagatcctcccctcttagctgtcttaaagaatggcagactgacagttggtcagaagattattcttcatggagcagaactggtgggctctcctgatgcctgtacacctcttgaagccccagaatctcttatgttaaagatttctgctaacagtactcggcctgctcgctggtataccaaacttggattctttcctgaccctagaccttttcctctgcccttatcatcgcttttcagtgatggaggaaatgttggttgtgttgatgtaattattcaaagagcataccctatacagtggatggagaagacatcatctggattatacatatttcgcaatgaaagagaggaagaaaaggaagcagcaaaatatgtggaggcccaacaaaagagactagaagccttattcactaaaattcaggaggaatttgaagaacatgaagaaaacacaacaaaaccatatttaccatcacgtgcactaacaagacagcaagttcgtgctttgcaagatggtgcagagctttatgaagcagtgaagaatgcagcagacccagcttaccttgagggttatttcagtgaagagcagttaagagccttgaataatcacaggcaaatgttgaatgataagaaacaagctcagatccagttggaaattaggaaggccatggaatctgctgaacaaaaggaacaaggtttatcaagggatgtcacaaccgtgtggaagttgcgtattgtaagctattcaaaaaaagaaaaagattcagttatactgagtatttggcgtccatcatcagatttatattctctgttaacagaaggaaagagatacagaatttatcatcttgcaacttcaaaatctaaaagtaaatctgaaagagctaacatacagttagcagcgacaaaaaaaactcagtatcaacaactaccggtttcagatgaaattttatttcagatttaccagccacgggagccccttcacttcagcaaatttttagatccagactttcagccatcttgttctgaggtggacctaataggatttgtcgtttctgttgtgaaaaaaacaggacttgcccctttcgtctatttgtcagacgaatgttacaatttactggcaataaagttttggatagaccttaatgaggacattattaagcctcatatgttaattgctgcaagcaacctccagtggcgaccagaatccaaatcaggccttcttactttatttgctggagatttttctgtgttttctgctagtccaaaagagggccactttcaagagacattcaacaaaatgaaaaatactgttgagaatattgacatactttgcaatgaagcagaaaacaagcttatgcatatactgcatgcaaatgatcccaagtggtccaccccaactaaagactgtacttcagggccgtacactgctcaaatcattcctggtacaggaaacaagcttctgatgtcttctcctaattgtgagatatattatcaaagtcctttatcactttgtatggccaaaaggaagtctgtttccacacctgtctcagcccagatgacttcaaagtcttgtaaaggggagaaagagattgatgaccaaaagaactgcaaaaagagaagagccttggatttcttgagtagactgcctttacctccacctgttagtcccatttgtacatttgtttctccggctgcacagaaggcatttcagccaccaaggagttgtggcaccaaatacgaaacacccataaagaaaaaagaactgaattctcctcagatgactccatttaaaaaattcaatgaaatttctcttttggaaagtaattcaatagctgacgaagaacttgcattgataaatacccaagctcttttgtctggttcaacaggagaaaaacaatttatatctgtcagtgaatccactaggactgctcccaccagttcagaagattatctcagactgaaacgacgttgtactacatctctgatcaaagaacaggagagttcccaggccagtacggaagaatgtgagaaaaataagcaggacacaattacaactaaaaaatatatctaagcatttgcaaaggcgacaataaattattgacgcttaacctttccagtttataagactggaatataatttcaaaccacacattagtacttatgttgcacaatgagaaaagaaattagtttcaaatttacctcagcgtttgtgtatcgggcaaaaatcgttttgcccgattccgtattggtatacttttgcttcagttgcatatcttaaaactaaatgtaatttattaactaatcaagaaaaacatctttggctgagctcggtggctcatgcctgtaatcccaacactttgagaagctgaggtgggaggagtgcttgaggccaggagttcaagaccagcctgggcaacatagggagacccccatctttacaaagaaaaaaaaaaggggaaaagaaaatcttttaaatctttggatttgatcactacaagtattattttacaa

SEQ ID NO: 329604 - DNA, 10984 bp, Artificial Sequence
  derived and/or modified sequence
gtggcgcgagcttctgaaactaggcggcagaggcggagccgctgtggcactgctgcgcctctgctgcgcctcgggtgtcttttgcggcggtgggtcgccgccgggagaagcgtgaggggacagatttgtgaccggcgcggtttttgtcagcttactccggccaaaaaagaactgcacctctggagcggacttatttaccaagcattggaggaatatcgtaggtaaaaatgcctattggatccaaagagaggccaacattttttgaaatttttaagacacgctgcaacaaagcagatttaggaccaataagtcttaattggtttgaagaactttcttcagaagctccaccctataattctgaacctgcagaagaatctgaacataaaaacaacaattacgaaccaaacctatttaaaactccacaaaggaaaccatcttataatcagctggcttcaactccaataatattcaaagagcaagggctgactctgccgctgtaccaatctcctgtaaaagaattagataaattcaaattagacttaggaaggaatgttcccaatagtagacataaaagtcttcgcacagtgaaaactaaaatggatcaagcagatgatgtttcctgtccacttctaaattcttgtcttagtgaaagtcctgttgttctacaatgtacacatgtaacaccacaaagagataagtcagtggtatgtgggagtttgtttcatacaccaaagtttgtgaagggtcgtcagacaccaaaacatatttctgaaagtctaggagctgaggtggatcctgatatgtcttggtcaagttctttagctacaccacccacccttagttctactgtgctcatagtcagaaatgaagaagcatctgaaactgtatttcctcatgatactactgctaatgtgaaaagctatttttccaatcatgatgaaagtctgaagaaaaatgatagatttatcgcttctgtgacagacagtgaaaacacaaatcaaagagaagctgcaagtcatggatttggaaaaacatcagggaattcatttaaagtaaatagctgcaaagaccacattggaaagtcaatgccaaatgtcctagaagatgaagtatatgaaacagttgtagatacctctgaagaagatagtttttcattatgtttttctaaatgtagaacaaaaaatctacaaaaagtaagaactagcaagactaggaaaaaaattttccatgaagcaaacgctgatgaatgtgaaaaatctaaaaaccaagtgaaagaaaaatactcatttgtatctgaagtggaaccaaatgatactgatccattagattcaaatgtagcaaatcagaagccctttgagagtggaagtgacaaaatctccaaggaagttgtaccgtctttggcctgtgaatggtctcaactaaccctttcaggtctaaatggagcccagatggagaaaatacccctattgcatatttcttcatgtgaccaaaatatttcagaaaaagacctattagacacagagaacaaaagaaagaaagattttcttacttcagagaattctttgccacgtatttctagcctaccaaaatcagagaagccattaaatgaggaaacagtggtaaataagagagatgaagagcagcatcttgaatctcatacagactgcattcttgcagtaaagcaggcaatatctggaacttctccagtggcttcttcatttcagggtatcaaaaagtctatattcagaataagagaatcacctaaagagactttcaatgcaagtttttcaggtcatatgactgatccaaactttaaaaaagaaactgaagcctctgaaagtggactggaaatacatactgtttgctcacagaaggaggactccttatgtccaaatttaattgataatggaagctggccagccaccaccacacagaattctgtagctttgaagaatgcaggtttaatatccactttgaaaaagaaaacaaataagtttatttatgctatacatgatgaaacatcttataaaggaaaaaaaataccgaaagaccaaaaatcagaactaattaactgttcagcccagtttgaagcaaatgcttttgaagcaccacttacatttgcaaatgctgattcaggtttattgcattcttctgtgaaaagaagctgttcacagaatgattctgaagaaccaactttgtccttaactagctcttttgggacaattctgaggaaatgttctagaaatgaaacatgttctaataatacagtaatctctcaggatcttgattataaagaagcaaaatgtaataaggaaaaactacagttatttattaccccagaagctgattctctgtcatgcctgcaggaaggacagtgtgaaaatgatccaaaaagcaaaaaagtttcagatataaaagaagaggtcttggctgcagcatgtcacccagtacaacattcaaaagtggaatacagtgatactgactttcaatcccagaaaagtcttttatatgatcatgaaaatgccagcactcttattttaactcctacttccaaggatgttctgtcaaacctagtcatgatttctagaggcaaagaatcatacaaaatgtcagacaagctcaaaggtaacaattatgaatctgatgttgaattaaccaaaaatattcccatggaaaagaatcaagatgtatgtgctttaaatgaaaattataaaaacgttgagctgttgccacctgaaaaatacatgagagtagcatcaccttcaagaaaggtacaattcaaccaaaacacaaatctaagagtaatccaaaaaaatcaagaagaaactacttcaatttcaaaaataactgtcaatccagactctgaagaacttttctcagacaatgagaataattttgtcttccaagtagctaatgaaaggaataatcttgctttaggaaatactaaggaacttcatgaaacagacttgacttgtgtaaacgaacccattttcaagaactctaccatggttttatatggagacacaggtgataaacaagcaacccaagtgtcaattaaaaaagatttggtttatgttcttgcagaggagaacaaaaatagtgtaaagcagcatataaaaatgactctaggtcaagatttaaaatcggacatctccttgaatatagataaaataccagaaaaaaataatgattacatgaacaaatgggcaggactcttaggtccaatttcaaatcacagttttggaggtagcttcagaacagcttcaaataaggaaatcaagctctctgaacataacattaagaagagcaaaatgttcttcaaagatattgaagaacaatatcctactagtttagcttgtgttgaaattgtaaataccttggcattagataatcaaaagaaactgagcaagcctcagtcaattaatactgtatctgcacatttacagagtagtgtagttgtttctgattgtaaaaatagtcatataacccctcagatgttattttccaagcaggattttaattcaaaccataatttaacacctagccaaaaggcagaaattacagaactttctactatattagaagaatcaggaagtcagtttgaatttactcagtttagaaaaccaagctacatattgcagaagagtacatttgaagtgcctgaaaaccagatgactatcttaaagaccacttctgaggaatgcagagatgctgatcttcatgtcataatgaatgccccatcgattggtcaggtagacagcagcaagcaatttgaaggtacagttgaaattaaacggaagtttgctggcctgttgaaaaatgactgtaacaaaagtgcttctggttatttaacagatgaaaatgaagtggggtttaggggcttttattctgctcatggcacaaaactgaatgtttctactgaagctctgcaaaaagctgtgaaactgtttagtgatattgagaatattagtgaggaaacttctgcagaggtacatccaataagtttatcttcaagtaaatgtcatgattctgttgtttcaatgtttaagatagaaaatcataatgataaaactgtaagtgaaaaaaataataaatgccaactgatattacaaaataatattgaaatgactactggcacttttgttgaagaaattactgaaaattacaagagaaatactgaaaatgaagataacaaatatactgctgccagtagaaattctcataacttagaatttgatggcagtgattcaagtaaaaatgatactgtttgtattcataaagatgaaacggacttgctatttactgatcagcacaacatatgtcttaaattatctggccagtttatgaaggagggaaacactcagattaaagaagatttgtcagatttaacttttttggaagttgcgaaagctcaagaagcatgtcatggtaatacttcaaataaagaacagttaactgctactaaaacggagcaaaatataaaagattttgagacttctgatacattttttcagactgcaagtgggaaaaatattagtgtcgccaaagagtcatttaataaaattgtaaatttctttgatcagaaaccagaagaattgcataacttttccttaaattctgaattacattctgacataagaaagaacaaaatggacattctaagttatgaggaaacagacatagttaaacacaaaatactgaaagaaagtgtcccagttggtactggaaatcaactagtgaccttccagggacaacccgaacgtgatgaaaagatcaaagaacctactctattgggttttcatacagctagcgggaaaaaagttaaaattgcaaaggaatctttggacaaagtgaaaaacctttttgatgaaaaagagcaaggtactagtgaaatcaccagttttagccatcaatgggcaaagaccctaaagtacagagaggcctgtaaagaccttgaattagcatgtgagaccattgagatcacagctgccccaaagtgtaaagaaatgcagaattctctcaataatgataaaaaccttgtttctattgagactgtggtgccacctaagctcttaagtgataatttatgtagacaaactgaaaatctcaaaacatcaaaaagtatctttttgaaagttaaagtacatgaaaatgtagaaaaagaaacagcaaaaagtcctgcaacttgttacacaaatcagtccccttattcagtcattgaaaattcagccttagctttttacacaagttgtagtagaaaaacttctgtgagtcagacttcattacttgaagcaaaaaaatggcttagagaaggaatatttgatggtcaaccagaaagaataaatactgcagattatgtaggaaattatttgtatgaaaataattcaaacagtactatagctgaaaatgacaaaaatcatctctccgaaaaacaagatacttatttaagtaacagtagcatgtctaacagctattcctaccattctgatgaggtatataatgattcaggatatctctcaaaaaataaacttgattctggtattgagccagtattgaagaatgttgaagatcaaaaaaacactagtttttccaaagtaatatccaatgtaaaagatgcaaatgcatacccacaaactgtaaatgaagatatttgcgttgaggaacttgtgactagctcttcaccctgcaaaaataaaaatgcagccattaaattgtccatatctaatagtaataattttgaggtagggccacctgcatttaggatagccagtggtaaaatcgtttgtgtttcacatgaaacaattaaaaaagtgaaagacatatttacagacagtttcagtaaagtaattaaggaaaacaacgagaataaatcaaaaatttgccaaacgaaaattatggcaggttgttacgaggcattggatgattcagaggatattcttcataactctctagataatgatgaatgtagcacgcattcacataaggtttttgctgacattcagagtgaagaaattttacaacataaccaaaatatgtctggattggagaaagtttctaaaatatcaccttgtgatgttagtttggaaacttcagatatatgtaaatgtagtatagggaagcttcataagtcagtctcatctgcaaatacttgtgggatttttagcacagcaagtggaaaatctgtccaggtatcagatgcttcattacaaaacgcaagacaagtgttttctgaaatagaagatagtaccaagcaagtcttttccaaagtattgtttaaaagtaacgaacattcagaccagctcacaagagaagaaaatactgctatacgtactccagaacatttaatatcccaaaaaggcttttcatataatgtggtaaattcatctgctttctctggatttagtacagcaagtggaaagcaagtttccattttagaaagttccttacacaaagttaagggagtgttagaggaatttgatttaatcagaactgagcatagtcttcactattcacctacgtctagacaaaatgtatcaaaaatacttcctcgtgttgataagagaaacccagagcactgtgtaaactcagaaatggaaaaaacctgcagtaaagaatttaaattatcaaataacttaaatgttgaaggtggttcttcagaaaataatcactctattaaagtttctccatatctctctcaatttcaacaagacaaacaacagttggtattaggaaccaaagtgtcacttgttgagaacattcatgttttgggaaaagaacaggcttcacctaaaaacgtaaaaatggaaattggtaaaactgaaactttttctgatgttcctgtgaaaacaaatatagaagtttgttctacttactccaaagattcagaaaactactttgaaacagaagcagtagaaattgctaaagcttttatggaagatgatgaactgacagattctaaactgccaagtcatgccacacattctctttttacatgtcccgaaaatgaggaaatggttttgtcaaattcaagaattggaaaaagaagaggagagccccttatcttagtgggagaaccctcaatcaaaagaaacttattaaatgaatttgacaggataatagaaaatcaagaaaaatccttaaaggcttcaaaaagcactccagatggcacaataaaagatcgaagattgtttatgcatcatgtttctttagagccgattacctgtgtaccctttcgcacaactaaggaacgtcaagagatacagaatccaaattttaccgcacctggtcaagaatttctgtctaaatctcatttgtatgaacatctgactttggaaaaatcttcaagcaatttagcagtttcaggacatccattttatcaagtttctgctacaagaaatgaaaaaatgagacacttgattactacaggcagaccaaccaaagtctttgttccaccttttaaaactaaatcacattttcacagagttgaacagtgtgttaggaatattaacttggaggaaaacagacaaaagcaaaacattgatggacatggctctgatgatagtaaaaataagattaatgacaatgagattcatcagtttaacaaaaacaactccaatcaagcagtagctgtaactttcacaaagtgtgaagaagaacctttagatttaattacaagtcttcagaatgccagagatatacaggatatgcgaattaagaagaaacaaaggcaacgcgtctttccacagccaggcagtctgtatcttgcaaaaacatccactctgcctcgaatctctctgaaagcagcagtaggaggccaagttccctctgcgtgttctcataaacagctgtatacgtatggcgtttctaaacattgcataaaaattaacagcaaaaatgcagagtcttttcagtttcacactgaagattattttggtaaggaaagtttatggactggaaaaggaatacagttggctgatggtggatggctcataccctccaatgatggaaaggctggaaaagaagaattttatagggctctgtgtgacactccaggtgtggatccaaagcttatttctagaatttgggtttataatcactatagatggatcatatggaaactggcagctatggaatgtgcctttcctaaggaatttgctaatagatgcctaagcccagaaagggtgcttcttcaactaaaatacagatatgatacggaaattgatagaagcagaagatcggctataaaaaagataatggaaagggatgacacagctgcaaaaacacttgttctctgtgtttctgacataatttcattgagcgcaaatatatctgaaacttctagcaataaaactagtagtgcagatacccaaaaagtggccattattgaacttacagatgggtggtatgctgttaaggcccagttagatcctcccctcttagctgtcttaaagaatggcagactgacagttggtcagaagattattcttcatggagcagaactggtgggctctcctgatgcctgtacacctcttgaagccccagaatctcttatgttaaagatttctgctaacagtactcggcctgctcgctggtataccaaacttggattctttcctgaccctagaccttttcctctgcccttatcatcgcttttcagtgatggaggaaatgttggttgtgttgatgtaattattcaaagagcataccctatacagtggatggagaagacatcatctggattatacatatttcgcaatgaaagagaggaagaaaaggaagcagcaaaatatgtggaggcccaacaaaagagactagaagccttattcactaaaattcaggaggaatttgaagaacatgaagaaaacacaacaaaaccatatttaccatcacgtgcactaacaagacagcaagttcgtgctttgcaagatggtgcagagctttatgaagcagtgaagaatgcagcagacccagcttaccttgagggttatttcagtgaagagcagttaagagccttgaataatcacaggcaaatgttgaatgataagaaacaagctcagatccagttggaaattaggaaggccatggaatctgctgaacaaaaggaacaaggtttatcaagggatgtcacaaccgtgtggaagttgcgtattgtaagctattcaaaaaaagaaaaagattcagttatactgagtatttggcgtccatcatcagatttatattctctgttaacagaaggaaagagatacagaatttatcatcttgcaacttcaaaatctaaaagtaaatctgaaagagctaacatacagttagcagcgacaaaaaaaactcagtatcaacaactaccggtttcagatgaaattttatttcagatttaccagccacgggagccccttcacttcagcaaatttttagatccagactttcagccatcttgttctgaggtggacctaataggatttgtcgtttctgttgtgaaaaaaacaggacttgcccctttcgtctatttgtcagacgaatgttacaatttactggcaataaagttttggatagaccttaatgaggacattattaagcctcatatgttaattgctgcaagcaacctccagtggcgaccagaatccaaatcaggccttcttactttatttgctggagatttttctgtgttttctgctagtccaaaagagggccactttcaagagacattcaacaaaatgaaaaatactgttgagaatattgacatactttgcaatgaagcagaaaacaagcttatgcatatactgcatgcaaatgatcccaagtggtccaccccaactaaagactgtacttcagggccgtacactgctcaaatcattcctggtacaggaaacaagcttctgatgtcttctcctaattgtgagatatattatcaaagtcctttatcactttgtatggccaaaaggaagtctgtttccacacctgtctcagcccagatgacttcaaagtcttgtaaaggggagaaagagattgatgaccaaaagaactgcaaaaagagaagagccttggatttcttgagtagactgcctttacctccacctgttagtcccatttgtacatttgtttctccggctgcacagaaggcatttcagccaccaaggagttgtggcaccaaatacgaaacacccataaagaaaaaagaactgaattctcctcagatgactccatttaaaaaattcaatgaaatttctcttttggaaagtaattcaatagctgacgaagaacttgcattgataaatacccaagctcttttgtctggttcaacaggagaaaaacaatttatatctgtcagtgaatccactaggactgctcccaccagttcagaagattatctcagactgaaacgacgttgtactacatctctgatcaaagaacaggagagttcccaggccagtacggaagaatgtgagaaaaataagcaggacacaattacaactaaaaaatatatctaagcatttgcaaaggcgacaataaattattgacgcttaacctttccagtttataagactggaatataatttcaaaccacacattagtacttatgttgcacaatgagaaaagaaattagtttcaaatttacctcagcgtttgtgtatcgggcaaaaatcgttttgcccgattccgtattggtatacttttgcttcagttgcatatcttaaaactaaatgtaatttattaactaatcaagaaaaacatctttggctgagctcggtggctcatgcctgtaatcccaacactttgagaagctgaggtgggaggagtgcttgaggccaggagttcaagaccagcctgggcaacatagggagacccccatctttacaaagaaaaaaaaaaggggaaaagaaaatcttttaaatctttggatttgatcactacaagtattattttacaatcaacaaaatggtcatccaaactcaaacttgagaaaatatcttgctttcaaattggcact

SEQ ID NO: 329605 - DNA, 10257 bp, Artificial Sequence
  derived and/or modified sequence
atgcccatcggcagcaaggagagacccaccttcttcgagatcttcaagaccagatgcaacaaggccgacctgggccccatcagcctgaactggttcgaggagctgagcagcgaggcccccccctacaacagcgagcccgccgaggagagcgagcacaagaacaacaactacgagcccaacctgttcaagaccccccagagaaagcccagctacaaccagctggccagcacccccatcatcttcaaggagcagggcctgaccctgcccctgtaccagagccccgtgaaggagctggacaagttcaagctggacctgggcagaaacgtgcccaacagcagacacaagagcctgagaaccgtgaagaccaagatggaccaggccgacgacgtgagctgccccctgctgaacagctgcctgagcgagagccccgtggtgctgcagtgcacccacgtgaccccccagagagacaagagcgtggtgtgcggcagcctgttccacacccccaagttcgtgaagggcagacagacccccaagcacatcagcgagagcctgggcgccgaggtggaccccgacatgagctggagcagcagcctggccaccccccccaccctgagcagcaccgtgctgatcgtgagaaacgaggaggccagcgagaccgtgttcccccacgacaccaccgccaacgtgaagagctacttcagcaaccacgacgagagcctgaagaagaacgacagattcatcgccagcgtgaccgacagcgagaacaccaaccagagagaggccgccagccacggcttcggcaagaccagcggcaacagcttcaaggtgaacagctgcaaggaccacatcggcaagagcatgcccaacgtgctggaggacgaggtgtacgagaccgtggtggacaccagcgaggaggacagcttcagcctgtgcttcagcaagtgcagaaccaagaacctgcagaaggtgagaaccagcaagaccagaaagaagatcttccacgaggccaacgccgacgagtgcgagaagagcaagaaccaggtgaaggagaagtacagcttcgtgagcgaggtggagcccaacgacaccgaccccctggacagcaacgtggccaaccagaagcccttcgagagcggcagcgacaagatcagcaaggaggtggtgcccagcctggcctgcgagtggagccagctgaccctgagcggcctgaacggcgcccagatggagaagatccccctgctgcacatcagcagctgcgaccagaacatcagcgagaaggacctgctggacaccgagaacaagagaaagaaggacttcctgaccagcgagaacagcctgcccagaatcagcagcctgcccaagagcgagaagcccctgaacgaggagaccgtggtgaacaagagagacgaggagcagcacctggagagccacaccgactgcatcctggccgtgaagcaggccatcagcggcaccagccccgtggccagcagcttccagggcatcaagaagagcatcttcagaatcagagagagccccaaggagaccttcaacgccagcttcagcggccacatgaccgaccccaacttcaagaaggagaccgaggccagcgagagcggcctggagatccacaccgtgtgcagccagaaggaggacagcctgtgccccaacctgatcgacaacggcagctggcccgccaccaccacccagaacagcgtggccctgaagaacgccggcctgatcagcaccctgaagaagaagaccaacaagttcatctacgccatccacgacgagaccagctacaagggcaagaagatccccaaggaccagaagagcgagctgatcaactgcagcgcccagttcgaggccaacgccttcgaggcccccctgaccttcgccaacgccgacagcggcctgctgcacagcagcgtgaagagaagctgcagccagaacgacagcgaggagcccaccctgagcctgaccagcagcttcggcaccatcctgagaaagtgcagcagaaacgagacctgcagcaacaacaccgtgatcagccaggacctggactacaaggaggccaagtgcaacaaggagaagctgcagctgttcatcacccccgaggccgacagcctgagctgcctgcaggagggccagtgcgagaacgaccccaagagcaagaaggtgagcgacatcaaggaggaggtgctggccgccgcctgccaccccgtgcagcacagcaaggtggagtacagcgacaccgacttccagagccagaagagcctgctgtacgaccacgagaacgccagcaccctgatcctgacccccaccagcaaggacgtgctgagcaacctggtgatgatcagcagaggcaaggagagctacaagatgagcgacaagctgaagggcaacaactacgagagcgacgtggagctgaccaagaacatccccatggagaagaaccaggacgtgtgcgccctgaacgagaactacaagaacgtggagctgctgccccccgagaagtacatgagagtggccagccccagcagaaaggtgcagttcaaccagaacaccaacctgagagtgatccagaagaaccaggaggagaccaccagcatcagcaagatcaccgtgaaccccgacagcgaggagctgttcagcgacaacgagaacaacttcgtgttccaggtggccaacgagagaaacaacctggccctgggcaacaccaaggagctgcacgagaccgacctgacctgcgtgaacgagcccatcttcaagaacagcaccatggtgctgtacggcgacaccggcgacaagcaggccacccaggtgagcatcaagaaggacctggtgtacgtgctggccgaggagaacaagaacagcgtgaagcagcacatcaagatgaccctgggccaggacctgaagagcgacatcagcctgaacatcgacaagatccccgagaagaacaacgactacatgaacaagtgggccggcctgctgggccccatcagcaaccacagcttcggcggcagcttcagaaccgccagcaacaaggagatcaagctgagcgagcacaacatcaagaagagcaagatgttcttcaaggacatcgaggagcagtaccccaccagcctggcctgcgtggagatcgtgaacaccctggccctggacaaccagaagaagctgagcaagccccagagcatcaacaccgtgagcgcccacctgcagagcagcgtggtggtgagcgactgcaagaacagccacatcaccccccagatgctgttcagcaagcaggacttcaacagcaaccacaacctgacccccagccagaaggccgagatcaccgagctgagcaccatcctggaggagagcggcagccagttcgagttcacccagttcagaaagcccagctacatcctgcagaagagcaccttcgaggtgcccgagaaccagatgaccatcctgaagaccaccagcgaggagtgcagagacgccgacctgcacgtgatcatgaacgcccccagcatcggccaggtggacagcagcaagcagttcgagggcaccgtggagatcaagagaaagttcgccggcctgctgaagaacgactgcaacaagagcgccagcggctacctgaccgacgagaacgaggtgggcttcagaggcttctacagcgcccacggcaccaagctgaacgtgagcaccgaggccctgcagaaggccgtgaagctgttcagcgacatcgagaacatcagcgaggagaccagcgccgaggtgcaccccatcagcctgagcagcagcaagtgccacgacagcgtggtgagcatgttcaagatcgagaaccacaacgacaagaccgtgagcgagaagaacaacaagtgccagctgatcctgcagaacaacatcgagatgaccaccggcaccttcgtggaggagatcaccgagaactacaagagaaacaccgagaacgaggacaacaagtacaccgccgccagcagaaacagccacaacctggagttcgacggcagcgacagcagcaagaacgacaccgtgtgcatccacaaggacgagaccgacctgctgttcaccgaccagcacaacatctgcctgaagctgagcggccagttcatgaaggagggcaacacccagatcaaggaggacctgagcgacctgaccttcctggaggtggccaaggcccaggaggcctgccacggcaacaccagcaacaaggagcagctgaccgccaccaagaccgagcagaacatcaaggacttcgagaccagcgacaccttcttccagaccgccagcggcaagaacatcagcgtggccaaggagagcttcaacaagatcgtgaacttcttcgaccagaagcccgaggagctgcacaacttcagcctgaacagcgagctgcacagcgacatcagaaagaacaagatggacatcctgagctacgaggagaccgacatcgtgaagcacaagatcctgaaggagagcgtgcccgtgggcaccggcaaccagctggtgaccttccagggccagcccgagagagacgagaagatcaaggagcccaccctgctgggcttccacaccgccagcggcaagaaggtgaagatcgccaaggagagcctggacaaggtgaagaacctgttcgacgagaaggagcagggcaccagcgagatcaccagcttcagccaccagtgggccaagaccctgaagtacagagaggcctgcaaggacctggagctggcctgcgagaccatcgagatcaccgccgcccccaagtgcaaggagatgcagaacagcctgaacaacgacaagaacctggtgagcatcgagaccgtggtgccccccaagctgctgagcgacaacctgtgcagacagaccgagaacctgaagaccagcaagagcatcttcctgaaggtgaaggtgcacgagaacgtggagaaggagaccgccaagagccccgccacctgctacaccaaccagagcccctacagcgtgatcgagaacagcgccctggccttctacaccagctgcagcagaaagaccagcgtgagccagaccagcctgctggaggccaagaagtggctgagagagggcatcttcgacggccagcccgagagaatcaacaccgccgactacgtgggcaactacctgtacgagaacaacagcaacagcaccatcgccgagaacgacaagaaccacctgagcgagaagcaggacacctacctgagcaacagcagcatgagcaacagctacagctaccacagcgacgaggtgtacaacgacagcggctacctgagcaagaacaagctggacagcggcatcgagcccgtgctgaagaacgtggaggaccagaagaacaccagcttcagcaaggtgatcagcaacgtgaaggacgccaacgcctacccccagaccgtgaacgaggacatctgcgtggaggagctggtgaccagcagcagcccctgcaagaacaagaacgccgccatcaagctgagcatcagcaacagcaacaacttcgaggtgggcccccccgccttcagaatcgccagcggcaagatcgtgtgcgtgagccacgagaccatcaagaaggtgaaggacatcttcaccgacagcttcagcaaggtgatcaaggagaacaacgagaacaagagcaagatctgccagaccaagatcatggccggctgctacgaggccctggacgacagcgaggacatcctgcacaacagcctggacaacgacgagtgcagcacccacagccacaaggtgttcgccgacatccagagcgaggagatcctgcagcacaaccagaacatgagcggcctggagaaggtgagcaagatcagcccctgcgacgtgagcctggagaccagcgacatctgcaagtgcagcatcggcaagctgcacaagagcgtgagcagcgccaacacctgcggcatcttcagcaccgccagcggcaagagcgtgcaggtgagcgacgccagcctgcagaacgccagacaggtgttcagcgagatcgaggacagcaccaagcaggtgttcagcaaggtgctgttcaagagcaacgagcacagcgaccagctgaccagagaggagaacaccgccatcagaacccccgagcacctgatcagccagaagggcttcagctacaacgtggtgaacagcagcgccttcagcggcttcagcaccgccagcggcaagcaggtgagcatcctggagagcagcctgcacaaggtgaagggcgtgctggaggagttcgacctgatcagaaccgagcacagcctgcactacagccccaccagcagacagaacgtgagcaagatcctgcccagagtggacaagagaaaccccgagcactgcgtgaacagcgagatggagaagacctgcagcaaggagttcaagctgagcaacaacctgaacgtggagggcggcagcagcgagaacaaccacagcatcaaggtgagcccctacctgagccagttccagcaggacaagcagcagctggtgctgggcaccaaggtgagcctggtggagaacatccacgtgctgggcaaggagcaggccagccccaagaacgtgaagatggagatcggcaagaccgagaccttcagcgacgtgcccgtgaagaccaacatcgaggtgtgcagcacctacagcaaggacagcgagaactacttcgagaccgaggccgtggagatcgccaaggccttcatggaggacgacgagctgaccgacagcaagctgcccagccacgccacccacagcctgttcacctgccccgagaacgaggagatggtgctgagcaacagcagaatcggcaagagaagaggcgagcccctgatcctggtgggcgagcccagcatcaagagaaacctgctgaacgagttcgacagaatcatcgagaaccaggagaagagcctgaaggccagcaagagcacccccgacggcaccatcaaggacagaagactgttcatgcaccacgtgagcctggagcccatcacctgcgtgcccttcagaaccaccaaggagagacaggagatccagaaccccaacttcaccgcccccggccaggagttcctgagcaagagccacctgtacgagcacctgaccctggagaagagcagcagcaacctggccgtgagcggccaccccttctaccaggtgagcgccaccagaaacgagaagatgagacacctgatcaccaccggcagacccaccaaggtgttcgtgccccccttcaagaccaagagccacttccacagagtggagcagtgcgtgagaaacatcaacctggaggagaacagacagaagcagaacatcgacggccacggcagcgacgacagcaagaacaagatcaacgacaacgagatccaccagttcaacaagaacaacagcaaccaggccgtggccgtgaccttcaccaagtgcgaggaggagcccctggacctgatcaccagcctgcagaacgccagagacatccaggacatgagaatcaagaagaagcagagacagagagtgttcccccagcccggcagcctgtacctggccaagaccagcaccctgcccagaatcagcctgaaggccgccgtgggcggccaggtgcccagcgcctgcagccacaagcagctgtacacctacggcgtgagcaagcactgcatcaagatcaacagcaagaacgccgagagcttccagttccacaccgaggactacttcggcaaggagagcctgtggaccggcaagggcatccagctggccgacggcggctggctgatccccagcaacgacggcaaggccggcaaggaggagttctacagagccctgtgcgacacccccggcgtggaccccaagctgatcagcagaatctgggtgtacaaccactacagatggatcatctggaagctggccgccatggagtgcgccttccccaaggagttcgccaacagatgcctgagccccgagagagtgctgctgcagctgaagtacagatacgacaccgagatcgacagaagcagaagaagcgccatcaagaagatcatggagagagacgacaccgccgccaagaccctggtgctgtgcgtgagcgacatcatcagcctgagcgccaacatcagcgagaccagcagcaacaagaccagcagcgccgacacccagaaggtggccatcatcgagctgaccgacggctggtacgccgtgaaggcccagctggacccccccctgctggccgtgctgaagaacggcagactgaccgtgggccagaagatcatcctgcacggcgccgagctggtgggcagccccgacgcctgcacccccctggaggcccccgagagcctgatgctgaagatcagcgccaacagcaccagacccgccagatggtacaccaagctgggcttcttccccgaccccagacccttccccctgcccctgagcagcctgttcagcgacggcggcaacgtgggctgcgtggacgtgatcatccagagagcctaccccatccagtggatggagaagaccagcagcggcctgtacatcttcagaaacgagagagaggaggagaaggaggccgccaagtacgtggaggcccagcagaagagactggaggccctgttcaccaagatccaggaggagttcgaggagcacgaggagaacaccaccaagccctacctgcccagcagagccctgaccagacagcaggtgagagccctgcaggacggcgccgagctgtacgaggccgtgaagaacgccgccgaccccgcctacctggagggctacttcagcgaggagcagctgagagccctgaacaaccacagacagatgctgaacgacaagaagcaggcccagatccagctggagatcagaaaggccatggagagcgccgagcagaaggagcagggcctgagcagagacgtgaccaccgtgtggaagctgagaatcgtgagctacagcaagaaggagaaggacagcgtgatcctgagcatctggagacccagcagcgacctgtacagcctgctgaccgagggcaagagatacagaatctaccacctggccaccagcaagagcaagagcaagagcgagagagccaacatccagctggccgccaccaagaagacccagtaccagcagctgcccgtgagcgacgagatcctgttccagatctaccagcccagagagcccctgcacttcagcaagttcctggaccccgacttccagcccagctgcagcgaggtggacctgatcggcttcgtggtgagcgtggtgaagaagaccggcctggcccccttcgtgtacctgagcgacgagtgctacaacctgctggccatcaagttctggatcgacctgaacgaggacatcatcaagccccacatgctgatcgccgccagcaacctgcagtggagacccgagagcaagagcggcctgctgaccctgttcgccggcgacttcagcgtgttcagcgccagccccaaggagggccacttccaggagaccttcaacaagatgaagaacaccgtggagaacatcgacatcctgtgcaacgaggccgagaacaagctgatgcacatcctgcacgccaacgaccccaagtggagcacccccaccaaggactgcaccagcggcccctacaccgcccagatcatccccggcaccggcaacaagctgctgatgagcagccccaactgcgagatctactaccagagccccctgagcctgtgcatggccaagagaaagagcgtgagcacccccgtgagcgcccagatgaccagcaagagctgcaagggcgagaaggagatcgacgaccagaagaactgcaagaagagaagagccctggacttcctgagcagactgcccctgcccccccccgtgagccccatctgcaccttcgtgagccccgccgcccagaaggccttccagccccccagaagctgcggcaccaagtacgagacccccatcaagaagaaggagctgaacagcccccagatgacccccttcaagaagttcaacgagatcagcctgctggagagcaacagcatcgccgacgaggagctggccctgatcaacacccaggccctgctgagcggcagcaccggcgagaagcagttcatcagcgtgagcgagagcaccagaaccgcccccaccagcagcgaggactacctgagactgaagagaagatgcaccaccagcctgatcaaggagcaggagagcagccaggccagcaccgaggagtgcgagaagaacaagcaggacaccatcaccaccaagaagtacatctag

SEQ ID NO: 329606 - protein, 602 aa, Artificial Sequence
  derived and/or modified sequence
MPIGSKERPTFFEIFKTRCNKAGPISLNWFEELSSEAPPYNSEPAEESEHKNNNYEPNLFKTPQRKPSYNQLASTPIIFKEQGLTLPLYQSPVKELDKFKLDLGRNVPNSRHKSLRTVKTKMDQADDVSCPLLNSCLSESPVVLQCTHVTPQRDKSVVCGSLFHTPKFVKGRQTPKHISESLGAEVDPDMSWSSSLATPPTLSSTVLIVRNEEASETVFPHDTTANVKSYFSNHDESLKKNDRFIASVTDSENTNQREAASHGFGKTSGNSFKVNSCKDHIGKSMPNVLEDEVYETVVDTSEEDSFSLCFSKCRTKNLQKVRTSKTRKKIFHEANADECEKSKNQVKEKYSFVSEVEPNDTDPLDSNVANQKPFESGSDKISKEVVPSLACEWSQLTLSGLNGAQMEKIPLLHISSCDQNISEKDLLDTENKRKKDFLTSENSLPRISSLPKSEKPLNEETVVNKRDEEQHLESHTDCILAVKQAISGTSPVASSFQGIKKSIFRIRESPKETFNASFSGHMTDPNFKKETEASESGLEIHTVCSQKEDSLCPNLIDNGSWPATTTQNSVALKNAGLISTLKKKTNKFIYAIHDETSYKGKK

SEQ ID NO: 329607 - DNA, 85 bp, Artificial Sequence
  derived and/or modified sequence
tatgcaaatcaataaacataatccatcacataaacagaaacaaagacaaaatgacatgattatctcaatagatgcagaaaaggcc

SEQ ID NO: 329608 - DNA, 1033 bp, Artificial Sequence
  derived and/or modified sequence
gtcagagctggagggccgggcaccgcggccatggagggtcaacgctggctgccgctggaggccaatcccgaggtcaccaaccagtttcttaaacaattaggtctacatcctaactggcaattcgttgatgtatatggaatggatcctgaactccttagcatggtaccaagaccagtctgtgcagtcttacttctctttcctattacagaaaagtatgaagtattcagaacagaagaggaagaaaaaataaaatctcagggacaagatgttacatcatcagtatatttcatgaagcaaacaatcagcaatgcctgtggaacaattggactgattcatgctattgcaaacaataaagacaagatgcactttgaatctggatcaaccttgaaaaaattcctggaggaatctgtgtcaatgagccctgaagaacgagccagatacctggagaactatgatgccatccgagttactcatgagaccagtgcccatgaaggtcagactgagtcctcctcgccatcctcatcacagcctcattctagccactgcagaacgaaggcctcatcattgtgtcaccatgcatccctgccctgggtcaaacgtaaccatgtaggccctgcaaaggctaccagtccatctctccgtcttcgtcgctggcgacccttcttacgtctaccatctttgggtctccattctgttgcaccaagtatagatgagaaagtagatcttcattttattgcattagttcatgtagatgggcatctctatgaattagatgggcggaagccatttccaattaaccatggtgaaactagtgatgaaactttattagaggatgccatagaagtttgcaagaagtttatggagcgcgaccctgatgaactaagatttaatgcgattgctctttctgcagcatagcttgtcaataatggaaacaccaaaaactgtattatttgcaactaaattttctctgccatacactaactcaaaaattttgatattttcattaacttgatgattaaactttatgtgagtt

SEQ ID NO: 329609 - protein, 251 aa, Artificial Sequence
  derived and/or modified sequence
MVPRPVCAVLLLFPITEKYEVFRTEEEEKIKSQGQDVTSSVYFMKQTISNACGTIGLIHAIANNKDKMHFESGSTLKKFLEESVSMSPEERARYLENYDAIRVTHETSAHEGQTESSSPSSSQPHSSHCRTKASSLCHHASLPWVKRNHVGPAKATSPSLRLRRWRPFLRLPSLGLHSVAPSIDEKVDLHFIALVHVDGHLYELDGRKPFPINHGETSDETLLEDAIEVCKKFMERDPDELRFNAIALSAA

SEQ ID NO: 329610 - protein, 228 aa, Artificial Sequence
  derived and/or modified sequence
TEEEEKIKSQGQDVTSSVYFMKQTISNACGTIGLIHAIANNKDKMHFESGSTLKKFLEESVSMSPEERARYLENYDAIRVTHETSAHEGQTESSSPSSSQPHSSHCRTKASSLCHHASLPWVKRNHVGPAKATSPSLRLRRWRPFLRLPSLGLHSVAPSIDEKVDLHFIALVHVDGHLYELDGRKPFPINHGETSDETLLEDAIEVCKKFMERDPDELRFNAIALSAA

SEQ ID NO: 329611 - DNA, 756 bp, Artificial Sequence
  derived and/or modified sequence
atggtgcccagacccgtgtgcgccgtgctgctgctgttccccatcaccgagaagtacgaggtgttcagaaccgaggaggaggagaagatcaagagccagggccaggacgtgaccagcagcgtgtacttcatgaagcagaccatcagcaacgcctgcggcaccatcggcctgatccacgccatcgccaacaacaaggacaagatgcacttcgagagcggcagcaccctgaagaagttcctggaggagagcgtgagcatgagccccgaggagagagccagatacctggagaactacgacgccatcagagtgacccacgagaccagcgcccacgagggccagaccgagagcagcagccccagcagcagccagccccacagcagccactgcagaaccaaggccagcagcctgtgccaccacgccagcctgccctgggtgaagagaaaccacgtgggccccgccaaggccaccagccccagcctgagactgagaagatggagacccttcctgagactgcccagcctgggcctgcacagcgtggcccccagcatcgacgagaaggtggacctgcacttcatcgccctggtgcacgtggacggccacctgtacgagctggacggcagaaagcccttccccatcaaccacggcgagaccagcgacgagaccctgctggaggacgccatcgaggtgtgcaagaagttcatggagagagaccccgacgagctgagattcaacgccatcgccctgagcgccgcctag

SEQ ID NO: 329612 - DNA, 687 bp, Artificial Sequence
  derived and/or modified sequence
accgaggaggaggagaagatcaagagccagggccaggacgtgaccagcagcgtgtacttcatgaagcagaccatcagcaacgcctgcggcaccatcggcctgatccacgccatcgccaacaacaaggacaagatgcacttcgagagcggcagcaccctgaagaagttcctggaggagagcgtgagcatgagccccgaggagagagccagatacctggagaactacgacgccatcagagtgacccacgagaccagcgcccacgagggccagaccgagagcagcagccccagcagcagccagccccacagcagccactgcagaaccaaggccagcagcctgtgccaccacgccagcctgccctgggtgaagagaaaccacgtgggccccgccaaggccaccagccccagcctgagactgagaagatggagacccttcctgagactgcccagcctgggcctgcacagcgtggcccccagcatcgacgagaaggtggacctgcacttcatcgccctggtgcacgtggacggccacctgtacgagctggacggcagaaagcccttccccatcaaccacggcgagaccagcgacgagaccctgctggaggacgccatcgaggtgtgcaagaagttcatggagagagaccccgacgagctgagattcaacgccatcgccctgagcgccgcctag

SEQ ID NO: 329613 - DNA, 756 bp, Artificial Sequence
  derived and/or modified sequence
atggtgccaaggccagtatgcgctgtgctcctgctctttccgattaccgaaaagtatgaagtgtttcgtacagaggaggaagaaaaaataaaatcacaaggacaggacgtgacttcctctgtgtattttatgaagcaaactatctctaatgcctgcggtacaatcgggttgattcacgccattgccaacaacaaggacaaaatgcacttcgagtccggttcgacgctgaagaagtttcttgaggagtcagtgagtatgtctcccgaggagcgggccaggtaccttgagaattacgacgcgatccgggtcacgcacgagacttctgcccatgaggggcagacggaaagttcctccccatcctcttcacaaccccatagctctcattgtcggacaaaggcttcatccttgtgccaccacgcttccctgccatgggtgaaacgcaaccacgtggggccggccaaggctacctcgccatctctgcgcctgcgccgttggaggccattccttcgattacctagcctcggattgcattccgtggctccctctattgacgagaaggtggatctccatttcatcgcactggtgcacgtcgatggccacctctatgagctggacggcagaaagcccttccccattaaccacggagaaacgtcggatgagacactcctggaggatgcgatcgaggtatgcaagaaatttatggaacgggatccagacgagctcagatttaacgccattgcattgtccgccgcctag

SEQ ID NO: 329614 - DNA, 687 bp, Artificial Sequence
  derived and/or modified sequence
accgaagaagaagaaaaaattaaatcacagggtcaggatgtcacatcatccgtttatttcatgaaacagaccatctcaaatgcatgtggcaccatcgggctgatccacgcaattgcaaacaataaagacaaaatgcacttcgaaagtgggagtaccttaaagaaatttctcgaggaaagtgtttcaatgagccccgaggagagggcacggtaccttgagaactatgatgcaatacgcgtgacacacgaaacaagcgctcacgaaggacaaaccgagagcagcagtccttcatcatctcaaccccactccagccactgcagaaccaaggcatcctctctctgtcatcacgcctctctgccctgggttaagagaaatcacgtgggccccgctaaagctacaagcccttccttgcgacttaggaggtggcgcccatttctaaggttaccatccttgggtctgcactccgttgcccccagcattgacgagaaagtggacttgcatttcatagccttagtccacgtcgatggacatctgtacgagttggacgggcgtaagccttttcctattaaccacggggaaacgagcgatgaaaccctgctcgaggacgctattgaggtgtgcaaaaagtttatggagcgcgaccccgatgagttgagatttaatgccattgccctttcagctgcctag

SEQ ID NO: 329615 - DNA, 756 bp, Artificial Sequence
  derived and/or modified sequence
atggtgcccaggcctgtgtgtgctgtgctgctgctcttccccatcacagagaagtatgaggtgttcagaacagaggaggaggagaagatcaagagccagggccaggatgtgaccagctctgtgtacttcatgaagcagaccatcagcaatgcctgtggcaccatcggcctcatccacgccatcgccaacaacaaggacaagatgcactttgagagcggcagcaccctgaagaagttcctggaggagagcgtgtccatgagccctgaggagcgggcccgctacctggagaactatgatgccatccgggtgacccatgagaccagcgcccacgagggccagacagagagcagcagccccagcagcagccagccccacagcagccactgcaggaccaaggccagcagcctgtgccaccacgccagcctgccctgggtgaagagaaatcatgtgggccctgccaaggccaccagccccagcctgcggctgcggcgctggaggcccttcctgcggctgcccagcctgggcctgcacagcgtggcccccagcattgatgagaaggtggacctgcacttcatcgccctggtgcacgtggatggccacctgtatgagctggatggcaggaagcccttccccatcaaccacggggagaccagtgatgagaccctgctggaggatgccatcgaggtgtgcaagaagttcatggagcgggaccctgatgagctgcgcttcaatgccatcgccctgtctgctgcctag

SEQ ID NO: 329616 - DNA, 687 bp, Artificial Sequence
  derived and/or modified sequence
acagaggaggaggagaagatcaagagccagggccaggatgtgaccagctctgtgtacttcatgaagcagaccatcagcaatgcctgtggcaccatcggcctcatccacgccatcgccaacaacaaggacaagatgcactttgaaagtggcagcaccctgaagaagttcctggaggagagcgtgtccatgagccctgaggagcgggcccgctacctggagaactatgatgccatccgggtgacccatgagaccagcgcccacgagggccagacagagagcagcagccccagcagcagccagccccacagcagccactgcaggaccaaggccagcagcctgtgccaccacgccagcctgccctgggtgaagaggaaccacgtgggccctgccaaggccaccagccccagcctgcggctgcggcgctggaggcccttcctgcggctgcccagcctgggcctgcacagcgtggcccccagcattgatgagaaggtggacctgcacttcatcgccctggtgcacgtggatggccacctgtatgagctggatggcaggaagcccttccccatcaaccacggggagaccagtgatgagaccctgctggaggatgccatcgaggtgtgcaagaagttcatggagcgggaccctgatgagctgcgcttcaatgccatcgccctgtctgctgcctag

SEQ ID NO: 329617 - DNA, 756 bp, Artificial Sequence
  derived and/or modified sequence
atggtgccccggcccgtgtgcgccgtgctgctgctgttccccatcaccgaaaaatatgaggtgtttagaactgaagaagaggagaaaataaagtcacagggacaggatgttacatcctcagtatacttcatgaaacagacgatttcaaatgcttgcggaacgataggcctcatccacgcaattgccaataataaagacaaaatgcactttgaatccggctcgaccctgaagaagtttttggaagaatctgtgtccatgagccccgaggaaagagccagatatttggagaattacgatgctattcgtgtcacccatgagacatccgcgcatgaaggccagactgagtccagttcccctagctcttcccagccccactcatcccactgcagaacaaaagcgagttctctatgccaccacgcctccttgccgtgggtcaagcggaatcatgtcgggcccgctaaagcaacttcgccatctctcaggttgagacggtggcgacccttcctgcgcttaccaagcctaggcctgcacagtgtcgcacctagcatcgatgaaaaggtcgacctccatttcattgccctggtgcacgttgacggtcatctatacgaactcgacggacgaaagcccttccccattaaccacggtgagacttctgacgaaaccctgcttgaggacgctattgaggtgtgcaaaaaatttatggaaagagatccggatgaactgaggttcaacgctattgccctttcagccgcgtag

SEQ ID NO: 329618 - DNA, 687 bp, Artificial Sequence
  derived and/or modified sequence
accgaggaggaggagaagatcaagagccagggccaggacgtgaccagctctgtgtatttcatgaagcagacgatatcaaacgcgtgtgggaccatagggcttatccacgcgattgcgaataacaaagacaagatgcatttcgaatccgggtcaacactgaaaaagttcctcgaggaatcagtgtccatgagtcctgaggaacgcgctaggtatctcgaaaattatgatgccatccgcgtcactcatgagaccagcgcacacgagggacagaccgagtcctcatctccttctagtagccaacctcactctagtcactgtcgaacaaaagcttctagcctctgtcatcacgcctcactaccatgggtcaagcgcaaccacgtggggccggcgaaagctacaagtccctctcttagactgaggcgctggagaccattcctccggctccccagcctcggcctgcactcagttgctccttccatcgatgaaaaggtcgatctgcactttattgccttagtgcatgtggacggccatctctacgagttggacggcaggaaaccttttcccatcaatcacggcgagaccagcgatgaaaccctgctggaggatgcaatcgaggtttgcaaaaagttcatggagcgtgaccccgacgagctcagattcaacgccatcgccctaagcgctgcatag

SEQ ID NO: 329619 - DNA, 756 bp, Artificial Sequence
  derived and/or modified sequence
atggtcccacgccctgtctgtgcagttctgctgttattcccaatcacggaaaagtacgaggtgtttaggaccgaggaagaggagaaaataaaaagccaaggccaagatgtgaccagtagtgtgtactttatgaagcagacaatctcaaatgcttgcggcacaattggactgatccatgcaatagccaacaacaaagacaagatgcatttcgaatctggttcaacactgaagaaatttcttgaggaatctgtctctatgagcccagaggaacgagctaggtacctcgagaactacgatgccatccgggtgacccacgaaacctcagctcatgagggccagaccgagtcatcttcgccgtcgtctagccagccccactcctcacactgccgcaccaaggcatccagcctttgccatcacgcatccctgccttgggtcaagcgtaatcacgtgggtcctgccaaggccacgagtcctagtttgagactgcgccgatggcggccttttttgcgtctaccatccctaggtctgcattccgtagccccatccatcgacgagaaagttgatctacattttatcgccttagttcacgtcgacgggcacctgtacgagctggatggccgtaagcccttcccaatcaaccatggggagacaagcgatgagacacttctggaagatgctattgaggtttgtaaaaagttcatggagcgagatccagatgagctaagattcaatgccattgccttgtctgcagcctag

SEQ ID NO: 329620 - DNA, 687 bp, Artificial Sequence
  derived and/or modified sequence
acagaagaggaggagaagattaagagccaggggcaggacgtgacctcaagtgtttatttcatgaaacagactatctccaatgcttgcgggactattggcctgatacatgccatcgccaataacaaggacaagatgcacttcgaatcggggtcgacacttaaaaagttcctcgaagagtccgtgagcatgagtcccgaagaacgggctaggtatctcgaaaattacgacgcgattcgagtcacacacgagacaagcgctcacgaagggcagactgagtcttccagtccttcaagctcacagcctcactcctcccactgtaggaccaaagccagcagcctgtgtcatcatgccagcctaccttgggtgaaaagaaaccatgtaggacccgcaaaggcaaccagtccctccctacgactgcggcgatggcggccattccttcgtcttccatctttgggtctgcatagcgtcgcgccatctatcgacgagaaggttgacctccattttatcgccctggtgcacgttgatggccatctgtacgaactagacgggagaaaacctttccctataaaccatggggagacaagcgatgaaaccctgctggaggatgctattgaagtgtgtaagaagttcatggaacgtgatccagatgagctgcgctttaacgccatcgcactgagcgcggcttag

SEQ ID NO: 329621 - DNA, 824 bp, Artificial Sequence
  derived and/or modified sequence
acagaagaggaagaaaaaataaaatctcagggacaagatgttacatcatcagtatatttcatgaagcaaacaatcagcaatgcctgtggaacaattggactgattcatgctattgcaaacaataaagacaagatgcactttgaatctggatcaaccttgaaaaaattcctggaggaatctgtgtcaatgagccctgaagaacgagccagatacctggagaactatgatgccatccgagttactcatgagaccagtgcccatgaaggtcagactgagtcctcctcgccatcctcatcacagcctcattctagccactgcagaacgaaggcctcatcattgtgtcaccatgcatccctgccctgggtcaaacgtaaccatgtaggccctgcaaaggctaccagtccatctctccgtcttcgtcgctggcgacccttcttacgtctaccatctttgggtctccattctgttgcaccaagtatagatgagaaagtagatcttcattttattgcattagttcatgtagatgggcatctctatgaattagatgggcggaagccatttccaattaaccatggtgaaactagtgatgaaactttattagaggatgccatagaagtttgcaagaagtttatggagcgcgaccctgatgaactaagatttaatgcgattgctctttctgcagcatagcttgtcaataatggaaacaccaaaaactgtattatttgcaactaaattttctctgccatacactaactcaaaaattttgatattttcattaacttgatgattaaactttatgtgagttaaactttgccttaacctgt

SEQ ID NO: 329622 - DNA, 10199 bp, Artificial Sequence
  derived and/or modified sequence
agcgcgcggagggcggggcctccccgggctcggccgcgccgccgcctcctccgcctcctcctcctcaccagcgctaaagccgggactggaccgagcggagttgtgcgtgtcgccgaaggggggtgggccgggggaggggaggttcgttccgcggagccccagccagaaccgggaccaagaatcgccttcagccctgtctggtgcatccttggcagaaagtgaggaggaaaacacccccattgttctttggcatggacacaagttcagtgggaggattagaattgactgatcagactcctgttttattagggagtacggccatggcaactagtctcacgaatgtaggaaactcatttagtggtccagctaatcctttagtgtctagatctaataagtttcagaactcgtcagtggaagatgatgatgatgttgtttttatcgaacctgtacaacctcccccaccttctgtaccagtggtagctgatcaaagaaccataacatttacatcatcaaaaaatgaagaactacaaggaaatgattccaaaattactccttcctcaaaagagttggcatctcagaagggaagtgtaagtgagacaattgtcattgatgatgaagaggacatggaaacaaatcaagggcaagagaaaaattcctccaattttattgaacgaagacctcctgagactaaaaacagaaccaatgatgtggatttctccacttccagtttttcaagaagtaaggtaaatgcaggaatgggtaatagtggtatcaccacagaaccagactctgaaattcagattgctaatgttacaactttagaaacaggtgtaagctctgtgaatgatggccaattagaaaatactgacgggcgagatatgaacttaatgattacacatgtaacatcactgcagaataccaacttgggagatgtctctaacggactgcagtcaagtaattttggtgttaatatacaaacatacaccccatctttaacttcacagaccaagactggagtaggaccttttaatcctggtagaatgaatgtggcaggagacgtttttcagaatggagaatctgcaactcatcataatcctgattcttggatctcccagtcagcttcatttccccgtaatcagaaacaaccaggggtggactctttatcaccagtggcctcacttcctaaacagattttccagccgtctgtccaacagcagcctactaaaccagttaaagtcacttgtgcaaactgcaaaaaacctttacagaagggccagacagcttatcaacgaaaaggatcagctcacctcttttgttctaccacctgcctttcttccttctcccacaagcctgctccaaagaaactctgtgttatgtgtaaaaaagatataactacaatgaaaggaaccattgttgctcaagtggattcaagtgagtccttccaggaattctgtagtacatcttgtttatctctctatgaagacaaacagaatcctactaaaggagctctaaataaatcaagatgtacaatctgtggtaaactaactgagattcgccatgaagtcagctttaaaaatatgactcataagctgtgcagtgaccactgctttaatagatatagaatggccaatggtttaataatgaattgctgtgaacagtgtggagagtacttgcccagtaaaggtgctggaaataatgttctggtgattgatggtcaacagaaaagattttgctgtcaaagttgtgtcagtgaatacaaacaggtaggtagccatccaagcttcctgaaggaggttcgagatcacatgcaggactctttcttaatgcagcctgagaaatatggaaaactgacaacttgtactggttgccgaacacagtgcaggttttttgatatgactcagtgtataggtcctaatggatatatggagccatattgttcaactgcttgtatgaacagtcacaagacaaaatatgcaaaatcacaaagtttgggaattatttgccatttttgtaagcgaaactctttacctcaataccaagccacaatgcctgatggaaaactgtacaacttttgcaattccagttgtgtggctaaatttcaggctctaagtatgcagtcatctccaaatggccagtttgtagcgccaagtgatattcagttgaaatgcaactactgcaaaaattccttttgttcaaaaccagaaatcctggaatgggagaacaaagtgcatcagttctgcagcaaaacttgttcagatgactataagaagttgcattgcatagttacatattgcgaatactgtcaagaggagaagactcttcatgaaacagtaaatttctctggcgttaagagacctttctgtagtgaaggctgcaaattattatacaaacaggattttgccagacgtttaggattgagatgtgttacttgcaactattgttctcagctatgtaagaagggagcaactaaagaactcgatggtgttgtgagagatttctgcagtgaagattgctgtaaaaaatttcaggattggtactacaaggctgcaaggtgtgactgttgtaaatctcaaggaactcttaaagagcgagttcagtggcgtggggaaatgaaacatttctgtgatcaacattgcttactgcgtttctactgtcaacaaaatgagcccaacatgacaactcagaaaggacctgaaaacttacattatgatcagggttgtcagacatctcgaaccaaaatgacaggttcagcaccacccccttctccaacacctaacaaagagatgaagaacaaagcagttctttgcaaacctttaacaatgacaaaagctacttactgtaaacctcacatgcagaccaaatcttgtcagacagatgatacttggaggacagaatatgttccagtgcctatccctgtgcctgtgtatatcccagttcctatgcacatgtacagtcagaatattcctgttcctactacagttcctgttcctgtgccagttcctgtttttctgcctgctccattggacagcagtgagaagattcctgcagcaattgaggagctaaaaagcaaggtttcttcagatgctcttgatacagagttgcttacaatgacggatatgatgagtgaagacgaggggaaaacagagacaaccaacatcaacagtgtaattattgaaacagatataattggttcagaccttttgaagaactctgacccagagacacagtccagcatgcctgatgtaccatatgaaccagatttggatatcgaaatagattttcccagagctgctgaggagcttgatatggaaaatgaatttttattaccacctgtttttggcgaagaatatgaggaacagcccagacctcgatctaaaaaaaagggagccaagagaaaggctgtatcaggataccagtctcatgatgatagttctgacaattcagaatgcagctttcctttcaaatatacgtatggcgtaaatgcatggaaacactgggtcaaaactaggcaacttgatgaagatcttctggtattagatgagttaaaatcttctaaatcagtaaagttaaaagaggatctactctctcacaccacagctgagcttaactatgggttagctcattttgtcaatgagatccgacggccaaatggagagaattatgcacctgacagcatctattacctttgccttggaatacaggagtatttgtgtggaagtaatcgaaaagacaacatatttattgatcctggataccaaacatttgagcaagaattgaataaaatactgcgaagctggcaaccaagcatacttccagatgggtcaatattctctcgagttgaagaagactatctctggaggataaaacaactaggatcacactctccagtagctcttctgaatacactgttctactttaacactaagtattttggcctgaaaacagtggaacaacacttaagactttcctttggcactgtgtttaggcattggaaaaaaaatcctttaacgatggaaaacaaagcgtgtcttcgataccaagtgtcttccttgtgtggaacagataatgaagataaaattactactggaaaaagaaaacatgaagatgatgagccagtatttgaacaaattgaaaacacagccaatccttccagatgtcctgtgaaaatgtttgaatgctacttgtctaaaagtccacagaatcttaatcagaggatggatgttttttatttgcaaccagaatgctctagttctacagatagccctgtctggtatacgtctacttcactggaccgaaacaccttggaaaatatgcttgtacgggttcttctagtaaaagatatttatgataaagacaattatgaactggatgaagacacagactaaaaaggaacgttgcagaagcaatcgggataaaacagcattagatagtcatgctgctagatctttattatggaaaacatttcaagtttactccttctgttttgagttttgtagcagtgtacccacgctgggtattaccatgtaaataatctgtgagtgaaagttgccattattctatgtagtggttttaggatacttaacaaatacattcaaattctttttttattattatttatttgattaggtatgtttgtaactttttacattacagaatatgaatgagaatgtgccatgtataatttttttcttgtagtaagaaacatccatattgcacaactctactgttgcaaagcttccttggaagggggctcttttactgggttcttaaccagatggttgtgtatgggtagcactactaaaagtttagaacttgcagtgtctttcggaatttttaaaataaactgtaaactaataggctggggtttttgttttgttttggggttttgttttgtttggttttacattttagttactgaagccttacaaggttatgtagagagataccatcttctgtaccaaaaatagacaagagaatgctgtcaatattggtgtactgtaatgtgaatctatgctggtgaaaacaattttttgttccccttattaaaaccttagtgtccttttctcatttgtggctttctgcatcacccaatcaataaaaaacaaatatatatatgtatatatatgtatgtatgtgtgtgtgtatatatatatatatatatatatatataaatgattgtaagttgaaaacaagatcatcaagacatttcctttgtaaaaatgtctggtgaaagtataaaattctgttttcttctatgccagccataagtatctgaaatcctcttcatttatagaggtttgatttttatttctttttttccctcttaaggatacagatcatgctgcaatgttagctgtgtagtactctaaaacttagcaattttatcagaattcttgtgcctgtttacattggataaaattgtttttagaaattccactcctgaaatagttacagaaagtcaagctatgttaaataagataggatcacattttataatgaagattaccagtgtagtaattctgatattgcaaatgattgaggaacaaacaaagaaactaatagagaaagtcagtctcagaggaaatcccatttaatgttagattgtttggcttttgaaattacttcttatagaagattgcattaaaaaaaaaaacaactttgtgcttctgcatagcaatttatccattcagaccttttcttttagaataaggaaacttaaaatctactttctaaagactgaacaaagtgctagctgcaaattatcttgaaatcatttggctcttttctagcatgtgtgtaatcatgttttcttctgattcctgaatgaccatggtagcattagtgtttagaaattgttcaggggaaaattgagctattttccatagtggctagcaattgctacacatccttagatactcctctctcccataggataaatgttacagcacacaaaagaaattttctcaattctgatttggaaaatttcacaggtgtcattattgtatatctaagcaataattatctgaatgttttggcataaaaaattataatgttctaacttgttttataagttgaatgacttttcagtcccttgattttatattgttgagtgataatcagactgatagtagcaaatctgatcatacattactaaaatagattgctgattgtctatttaacgaagacaagtgggtaacatttaaaatatataatacaaaaattttctctaacttacctttttccagaactacttctttaagcacttttcctattaatgcctattgttgattaaaaggtggttaattctaaccatcttttagtcttcaaagtggtgctatattccatcaagagcaataaagtttttcccaggtgtcacttattgtatatgttaccaaataccatgaatttctgccatagtactactatcaagcaccttgtcttgctatttacagtttcttcatttgtatatttttagcttttctaagtggaaatgtctacataattttgatcttgacatgattgaggatttagagctcttgtctttgtcttgattgcaatccaacgatagattaacttgattctcagggggaaaagaaaaacttattttatgagaattgtttgttctgtgaaactcacttcacctagaacacatttcattgattcttggatcttagtttatgtggtcatagttgactgctgagaaaaggacaatgaaatgatagcaatttccttttgcttctaggtgatctctgattatagatagcatcctgtaaatataactttattgtcttgaaatgtttattgaagatgctatatttttctgttctgttttctgaagattttgccatttaaaatgatccagtgaaaaatatttatccacattgaagaaagtggatttcccatgcaaattgaatcttcattaacacattttaaaaggctttactgtattaggtaacatagatattaaaggatttttctaggcaagaagctcaactttttttttccataaaaataatttttgcttaaatagtaactcatggttttcttttattaaatggggttgttgtcagtatgttaaacattgaagtaggaggaggatgcatattgtactatgcattcaaatttatcactgttttttctgacagactttccctttgtcctttctagttatgacttgggaatggggtaacttctttatgcatagtattaagggttatagtatgaagaaatcataaaattgcaagttttggtttgcattactctaatgtgggttcatttaatctgagatcttaaatatcttgcagccttaaatcactacaaacatttgcatttttattatgccagttatttccaaaatgtattgttatacatgtcacttatgtttttaagctaatattgactgtaggataatctccttgttcccctcaaaatagtcatgaaagtgtacatgaaaatatttttaaagaataaatttctttaaattacatacttttggatttcccccttaataagccccttactcatgtttagagaagattttgaatttcatttattccattctactgtgttctgaggattatatcaatttagaagttgatgtccagaacaggttatctgtatcagttctgagaatagaaacaacctacagtgctgtcccaatttgtacttttttttctttactcggaagttagatgtcagagggacacctcaaataagtgactgtgatcccctgccttgtaatgaagtggaaaagagagggtccctaaaaatctgggcaagtggtgtcctaattagttactgagttaaaacaagttcatgaatttaggccttttgggaaagaaagagaatgtaagatttaacctgtaaatgttaagaatagaaccaaagagagggccacagaccattagttgttaagaggtatcaatcttaacagcatattttctcttgtgcaatgaaaagaacaatcgtagctcttttgggcatcttaggtcttttattctttctggatggcttacatcgaatccttgtgatttatttaaagacacatttttcctggagaggagaaagatcttctctaaaatagccttaacactgagaacatattaggcctaattttaaaagtccaattcagataactcctcagaagtaaatgcagcacactaaaattcattatcacaaaacttaatatttgttaatatgtttcctctgtgctaaaaggctgctgctaaccatggtagttagggaggaagagaaagtaaaagacattagtgttcaaaacttacatctttgggggtaaacaagacatatagtacatttaactcctagggaacttagaatatttatggtaggatagaaagagatgattgtggacacacacaagtaccccaaaaggccattatggtctagaataggtttcatagagaggattactaccacctgtgattatatggtatatgaaacatgagattttgtaacctggacattgcttttagctctgttggaaatggtcagtagagcaatttctgaatattttgatggtacggtgttgatggcatcagtccttttctgtggctttcagcccaacttaatacaagaggagttaaaaatagcacccaaaaggggtagctagagcaccctcaccatgcactaaagataaatctaaaaggtgttcaagtacattgaatcaagatgagtaatccaacttctatgttatgtaggatggatggagcacacaaattcttgcaaacattgtagaggtttttttaaacttcatccactaaggatttttttataataattacttttgaaaataaaatctcaactattttccaagttatgagtgtgctgctcttaaccctgtgagatgaaatcttcccatttggattacatatttgtagttctatatcgacatcagcagatggcaatagtatacaaatagtatacagcatgagccttccattgcttttatttctttgtttataagtatactataatccttcatctgaaacccttagggttttagaattcagaattttccccttttcagagagaatatatataatgtagattacataacaccctcaatggggcctggggcaacaccccataatcaaacattagtacattcatagtaactgggattaactatgtaaggcagtaagctacctgccttacatagtttaggtcaatttttgtcacaaacttatggaaaaactaggtttttagaaattttttggatctcagaattcgtgattagggattgctgacctctgtaaggaaactggtgtcaggtctagaattttccttctaatgaaatacgtagtcattttccccctttttaaattgcttagctttggtagaggtaactgaaggctttctttagaattcgtgtgttagattttaagaaaaatgcatgaaattgttaggacaggcataaatacaaatggcaattctagagccattacggaattttgaaacacttaacaattgctttcttttacttttcatcttgcctcaatacttgtagcattacaagtattccacgtaaataaacgtttatgaagagctgcagtcatgtcatggagccaggcatttattcattcaacaaataggttagtcttccacacacaatttcaggtgctgggaacacagaattaagacccagcccttcctctcaaggacttcgcgtagtttgggagaaacgggaatgggctggaatgtcagaataagatgggcacttaggccttattgagcatgatcacacttgtattttgaagtaaaataccctgatcaagtaatttaccaagaagctactttttgtgacacagctccgtctcctgaccgcggttccagacttcaccattacaccagtctattcccattctggaaagggagaggtatcagctcttagggggcagagattagcaaattgaaaaatagcagtgaaccagatggaaggctctcgatctttagaggttattaatcagtgtttgttcgttcaatttttaaccagtcaccttgctgttaagagcagaacataattggctggaatgtaatgtagggaatttttccctgttggatccctagcacctagaaaagttcctagcacctattaggtgttaataaatgattgttgaatgaatcagtgattacaagtacttttaagaattttgaaaataaaggaaccattggaaatacga

SEQ ID NO: 329623 - DNA, 5045 bp, Artificial Sequence
  derived and/or modified sequence
cgaaggggggtgggccgggggaggggaggttcgttccgcggagccccagccagaaccgggaccaagaatcgccttcagccctgtctggtgcatccttggcagaaagtgaggaggaaaacacccccattgttagatgaggtcttaatcatggaacatttgaagtcacgtaaagaaggttctttggcatggacacaagttcagtgggaggattagaattgactgatcagactcctgttttattagggagtacggccatggcaactagtctcacgaatgtaggaaactcatttagtggtccagctaatcctttagtgtctagatctaataagtttcagaactcgtcagtggaagatgatgatgatgttgtttttatcgaacctgtacaacctcccccaccttctgtaccagtggtagctgatcaaagaaccataacatttacatcatcaaaaaatgaagaactacaaggaaatgattccaaaattactccttcctcaaaagagttggcatctcagaagggaagtgtaagtgagacaattgtcattgatgatgaagaggacatggaaacaaatcaagggcaagagaaaaattcctccaattttattgaacgaagacctcctgagactaaaaacagaaccaatgatgtggatttctccacttccagtttttcaagaagtaaggtaaatgcaggaatgggtaatagtggtatcaccacagaaccagactctgaaattcagattgctaatgttacaactttagaaacaggtgtaagctctgtgaatgatggccaattagaaaatactgacgggcgagatatgaacttaatgattacacatgtaacatcactgcagaataccaacttgggagatgtctctaacggactgcagtcaagtaattttggtgttaatatacaaacatacaccccatctttaacttcacagaccaagactggagtaggaccttttaatcctggtagaatgaatgtggcaggagacgtttttcagaatggagaatctgcaactcatcataatcctgattcttggatctcccagtcagcttcatttccccgtaatcagaaacaaccaggggtggactctttatcaccagtggcctcacttcctaaacagattttccagccgtctgtccaacagcagcctactaaaccagttaaagtcacttgtgcaaactgcaaaaaacctttacagaagggccagacagcttatcaacgaaaaggatcagctcacctcttttgttctaccacctgcctttcttccttctcccacaagcctgctccaaagaaactctgtgttatgtgtaaaaaagatataactacaatgaaaggaaccattgttgctcaagtggattcaagtgagtccttccaggaattctgtagtacatcttgtttatctctctatgaagacaaacagaatcctactaaaggagctctaaataaatcaagatgtacaatctgtggtaaactaactgagattcgccatgaagtcagctttaaaaatatgactcataagctgtgcagtgaccactgctttaatagatatagaatggccaatggtttaataatgaattgctgtgaacagtgtggagagtacttgcccagtaaaggtgctggaaataatgttctggtgattgatggtcaacagaaaagattttgctgtcaaagttgtgtcagtgaatacaaacaggtaggtagccatccaagcttcctgaaggaggttcgagatcacatgcaggactctttcttaatgcagcctgagaaatatggaaaactgacaacttgtactggttgccgaacacagtgcaggttttttgatatgactcagtgtataggtcctaatggatatatggagccatattgttcaactgcttgtatgaacagtcacaagacaaaatatgcaaaatcacaaagtttgggaattatttgccatttttgtaagcgaaactctttacctcaataccaagccacaatgcctgatggaaaactgtacaacttttgcaattccagttgtgtggctaaatttcaggctctaagtatgcagtcatctccaaatggccagtttgtagcgccaagtgatattcagttgaaatgcaactactgcaaaaattccttttgttcaaaaccagaaatcctggaatgggaggcaagtttgcatcagttctgcagcaaaacttgttcagatgactataagaagttgcattgcatagttacatattgcgaatactgtcaagaggagaagactcttcatgaaacagtaaatttctctggcgttaagagacctttctgtagtgaaggctgcaaattattatacaaacaggattttgccagacgtttaggattgagatgtgttacttgcaactattgttctcagctatgtaagaagggagcaactaaagaactcgatggtgttgtgagagatttctgcagtgaagattgctgtaaaaaatttcaggattggtactacaaggcgtgtgactgttgtaaatctcaaggaactcttaaagagcgagttcagtggcgtggggaaatgaaacatttctgtgatcaacattgcttactgcgtttctactgtcaacaaaatgagcccaacatgacaactcagaaaggacctgaaaacttacattatgatcagggttgtcagacatctcgaaccaaaatgacaggttcagcaccacccccttctccaacacctaacaaagagatgaagaacaaagcagttctttgcaaacctttaacaatgacaaaagctacttactgtaaacctcacatgcagaccaaatcttgtcagacagatgatacttggaggacagaatatgttccagtgcctatccctgtgcctgtgtatatcccagttcctatgcacatgtacagtcagaatattcctgttcctactacagttcctgttcctgtgccagttcctgtttttctgcctgctccattggacagcagtgagaagattcctgcagcaattgaggagctaaaaagcaaggtttcttcagatgctcttgatacagagttgcttacaatgacggatatgatgagtgaagacgaggggaaaacagagacaaccaacatcaacagtgtaattattgaaacagatataattggttcagaccttttgaagaactctgacccagagacacagtccagcatgcctgatgtaccatatgaaccagatttggatatcgaaatagattttcccagagctgctgaggagcttgatatggaaaatgaatttttattaccacctgtttttggcgaagaatatgaggaacagcccagacctcgatctaaaaaaaagggagccaagagaaaggctgtatcaggataccagtctcatgatgatagttctgacaattcagaatgcagctttcctttcaaatatacgtatggcgtaaatgcatggaaacactgggtcaaaactaggcaacttgatgaagatcttctggtattagatgagttaaaatcttctaaatcagtaaagttaaaagaggatctactctctcacaccacagctgagcttaactatgggttagctcattttgtcaatgagatccgacggccaaatggagagaattatgcacctgacagcatctattacctttgccttggaatacaggagtatttgtgtggaagtaatcgaaaagacaacatatttattgatcctggataccaaacatttgagcaagaattgaataaaatactgcgaagctggcaaccaagcatacttccagatgggtcaatattctctcgagttgaagaagactatctctggaggataaaacaactaggatcacactctccagtagctcttctgaatacactgttctactttaacactaagtattttggcctgaaaacagtggaacaacacttaagactttcctttggcactgtgtttaggcattggaaaaaaaatcctttaacgatggaaaacaaagcgtgtcttcgataccaagtgtcttccttgtgtggaacagataatgaagataaaattactactggaaaaagaaaacatgaagatgatgagccagtatttgaacaaattgaaaacacagccaatccttccagatgtcctgtgaaaatgtttgaatgctacttgtctaaaagtccacagaatcttaatcagaggatggatgttttttatttgcaaccagaatgctctagttctacagatagccctgtctggtatacgtctacttcactggaccgaaacaccttggaaaatatgcttgtacgggttcttctagtaaaagatatttatgataaagacaattatgaactggatgaagacacagactaaaaaggaacgttgcagaagcaatcgggataaaacagcattagatagtcatgctgctagatctttattatggaaaacatttcaagtttactccttctgttttgagttttgtagcagtgtacccacgctgggtattaccatgtaaataatctgtgagtgaaagttgccattattctatgtagtggttttaggatacttaacaaatacattcaaattctttttttattattatttatttgattaggtatgtttgtaactttttacattacagaatatgaatgagaatgtgccatgtataatttttttcttgtagtaagaaacatccatattgcacaactctactgttgcaaagcttccttggaagggggctcttttactgggttcttaaccagatggttgtgtatgggtagcactactaaaagtttagaacttgcagtgtctttcggaatttttaaaataaactgtaaactaataggctggggtttttgttttgttttggggttttgttttgtttggttttacattttagttactgaagccttacaaggttatgtagagagataccatcttctgtaccaaaaatagacaagagaatgctgtcaatattggtgtactgtaatgtgaatctatgctggtgaaaacaattttttgttccccttattaaaaccttagtgtccttttctcatttgtggctttctgcatcacccaatcaataaaaaacaaatatatatatgt

SEQ ID NO: 329624 - DNA, 7417 bp, Artificial Sequence
  derived and/or modified sequence
ccgccgcctcctccgcctcctcctcctcaccagcgctaaagccgggactggaccgagcggagttgaccaagaatcgccttcagccctgtctggtgcatccttggcagaaagtgaggaggaaaacacccccattgttagatgaggtcttaatcatggaacatttgaagtcacgtaaagaaggttctttggcatggacacaagttcagtgggaggattagaattgactgatcagactcctgttttattagggagtacggccatggcaactagtctcacgaatgtaggaaactcatttagtggtccagctaatcctttagtgtctagatctaataagtttcagaactcgtcagtggaagatgatgatgatgttgtttttatcgaacctgtacaacctcccccaccttctgtaccagtggtagctgatcaaagaaccataacatttacatcatcaaaaaatgaagaactacaaggaaatgattccaaaattactccttcctcaaaagagttggcatctcagaagggaagtgtaagtgagacaattgtcattgatgatgaagaggacatggaaacaaatcaagggcaagagaaaaattcctccaattttattgaacgaagacctcctgagactaaaaacagaaccaatgatgtggatttctccacttccagtttttcaagaagtaaggtaaatgcaggaatgggtaatagtggtatcaccacagaaccagactctgaaattcagattgctaatgttacaactttagaaacaggtgtaagctctgtgaatgatggccaattagaaaatactgacgggcgagatatgaacttaatgattacacatgtaacatcactgcagaataccaacttgggagatgtctctaacggactgcagtcaagtaattttggtgttaatatacaaacatacaccccatctttaacttcacagaccaagactggagtaggaccttttaatcctggtagaatgaatgtggcaggagacgtttttcagaatggagaatctgcaactcatcataatcctgattcttggatctcccagtcagcttcatttccccgtaatcagaaacaaccaggggtggactctttatcaccagtggcctcacttcctaaacagattttccagccgtctgtccaacagcagcctactaaaccagttaaagtcacttgtgcaaactgcaaaaaacctttacagaagggccagacagcttatcaacgaaaaggatcagctcacctcttttgttctaccacctgcctttcttccttctcccacaagcctgctccaaagaaactctgtgttatgtgtaaaaaagatataactacaatgaaaggaaccattgttgctcaagtggattcaagtgagtccttccaggaattctgtagtacatcttgtttatctctctatgaagacaaacagaatcctactaaaggagctctaaataaatcaagatgtacaatctgtggtaaactaactgagattcgccatgaagtcagctttaaaaatatgactcataagctgtgcagtgaccactgctttaatagatatagaatggccaatggtttaataatgaattgctgtgaacagtgtggagagtacttgcccagtaaaggtgctggaaataatgttctggtgattgatggtcaacagaaaagattttgctgtcaaagttgtgtcagtgaatacaaacaggtaggtagccatccaagcttcctgaaggaggttcgagatcacatgcaggactctttcttaatgcagcctgagaaatatggaaaactgacaacttgtactggttgccgaacacagtgcaggttttttgatatgactcagtgtataggtcctaatggatatatggagccatattgttcaactgcttgtatgaacagtcacaagacaaaatatgcaaaatcacaaagtttgggaattatttgccatttttgtaagcgaaactctttacctcaataccaagccacaatgcctgatggaaaactgtacaacttttgcaattccagttgtgtggctaaatttcaggctctaagtatgcagtcatctccaaatggccagtttgtagcgccaagtgatattcagttgaaatgcaactactgcaaaaattccttttgttcaaaaccagaaatcctggaatgggaggcaagtttgcatcagttctgcagcaaaacttgttcagatgactataagaagttgcattgcatagttacatattgcgaatactgtcaagaggagaagactcttcatgaaacagtaaatttctctggcgttaagagacctttctgtagtgaaggctgcaaattattatacaaacaggattttgccagacgtttaggattgagatgtgttacttgcaactattgttctcagctatgtaagaagggagcaactaaagaactcgatggtgttgtgagagatttctgcagtgaagattgctgtaaaaaatttcaggattggtactacaaggcgtgtgactgttgtaaatctcaaggaactcttaaagagcgagttcagtggcgtggggaaatgaaacatttctgtgatcaacattgcttactgcgtttctactgtcaacaaaatgagcccaacatgacaactcagaaaggacctgaaaacttacattatgatcagggttgtcagacatctcgaaccaaaatgacaggttcagcaccacccccttctccaacacctaacaaagagatgaagaacaaagcagttctttgcaaacctttaacaatgacaaaagctacttactgtaaacctcacatgcagaccaaatcttgtcagacagatgatacttggaggacagaatatgttccagtgcctatccctgtgcctgtgtatatcccagttcctatgcacatgtacagtcagaatattcctgttcctactacagttcctgttcctgtgccagttcctgtttttctgcctgctccattggacagcagtgagaagattcctgcagcaattgaggagctaaaaagcaaggtttcttcagatgctcttgatacagagttgcttacaatgacggatatgatgagtgaagacgaggggaaaacagagacaaccaacatcaacagtgtaattattgaaacagatataattggttcagaccttttgaagaactctgacccagagacacagtccagcatgcctgatgtaccatatgaaccagatttggatatcgaaatagattttcccagagctgctgaggagcttgatatggaaaatgaatttttattaccacctgtttttggcgaagaatatgaggaacagcccagacctcgatctaaaaaaaagggagccaagagaaaggctgtatcaggataccagtctcatgatgatagttctgacaattcagaatgcagctttcctttcaaatatacgtatggcgtaaatgcatggaaacactgggtcaaaactaggcaacttgatgaagatcttctggtattagatgagttaaaatcttctaaatcagtaaagttaaaagaggatctactctctcacaccacagctgagcttaactatgggttagctcattttgtcaatgagatccgacggccaaatggagagaattatgcacctgacagcatctattacctttgccttggaatacaggagtatttgtgtggaagtaatcgaaaagacaacatatttattgatcctggataccaaacatttgagcaagaattgaataaaatactgcgaagctggcaaccaagcatacttccagatgggtcaatattctctcgagttgaagaagactatctctggaggataaaacaactaggatcacactctccagtagctcttctgaatacactgttctactttaacactaagtattttggcctgaaaacagtggaacaacacttaagactttcctttggcactgtgtttaggcattggaaaaaaaatcctttaacgatggaaaacaaagcgtgtcttcgataccaagtgtcttccttgtgtggaacagataatgaagataaaattactactggaaaaagaaaacatgaagatgatgagccagtatttgaacaaattgaaaacacagccaatccttccagatgtcctgtgaaaatgtttgaatgctacttgtctaaaagtccacagaatcttaatcagaggatggatgttttttatttgcaaccagaatgctctagttctacagatagccctgtctggtatacgtctacttcactggaccgaaacaccttggaaaatatgcttgtacgggttcttctagtaaaagatatttatgataaagacaattatgaactggatgaagacacagactaaaaaggaacgttgcagaagcaatcgggataaaacagcattagatagtcatgctgctagatctttattatggaaaacatttcaagtttactccttctgttttgagttttgtagcagtgtacccacgctgggtattaccatgtaaataatctgtgagtgaaagttgccattattctatgtagtggttttaggatacttaacaaatacattcaaattctttttttattattatttatttgattaggtatgtttgtaactttttacattacagaatatgaatgagaatgtgccatgtataatttttttcttgtagtaagaaacatccatattgcacaactctactgttgcaaagcttccttggaagggggctcttttactgggttcttaaccagatggttgtgtatgggtagcactactaaaagtttagaacttgcagtgtctttcggaatttttaaaataaactgtaaactaataggctggggtttttgttttgttttggggttttgttttgtttggttttacattttagttactgaagccttacaaggttatgtagagagataccatcttctgtaccaaaaatagacaagagaatgctgtcaatattggtgtactgtaatgtgaatctatgctggtgaaaacaattttttgttccccttattaaaaccttagtgtccttttctcatttgtggctttctgcatcacccaatcaataaaaaacaaatatatatatgtatatatatgtatgtatgtgtgtgtgtatatatatatatatatatatatatataaatgattgtaagttgaaaacaagatcatcaagacatttcctttgtaaaaatgtctggtgaaagtataaaattctgttttcttctatgccagccataagtatctgaaatcctcttcatttatagaggtttgatttttatttctttttttccctcttaaggatacagatcatgctgcaatgttagctgtgtagtactctaaaacttagcaattttatcagaattcttgtgcctgtttacattggataaaattgtttttagaaattccactcctgaaatagttacagaaagtcaagctatgttaaataagataggatcacattttataatgaagattaccagtgtagtaattctgatattgcaaatgattgaggaacaaacaaagaaactaatagagaaagtcagtctcagaggaaatcccatttaatgttagattgtttggcttttgaaattacttcttatagaagattgcattaaaaaaaaaaacaactttgtgcttctgcatagcaatttatccattcagaccttttcttttagaataaggaaacttaaaatctactttctaaagactgaacaaagtgctagctgcaaattatcttgaaatcatttggctcttttctagcatgtgtgtaatcatgttttcttctgattcctgaatgaccatggtagcattagtgtttagaaattgttcaggggaaaattgagctattttccatagtggctagcaattgctacacatccttagatactcctctctcccataggataaatgttacagcacacaaaagaaattttctcaattctgatttggaaaatttcacaggtgtcattattgtatatctaagcaataattatctgaatgttttggcataaaaaattataatgttctaacttgttttataagttgaatgacttttcagtcccttgattttatattgttgagtgataatcagactgatagtagcaaatctgatcatacattactaaaatagattgctgattgtctatttaacgaagacaagtgggtaacatttaaaatatataatacaaaaattttctctaacttacctttttccagaactacttctttaagcacttttcctattaatgcctattgttgattaaaaggtggttaattctaaccatcttttagtcttcaaagtggtgctatattccatcaagagcaataaagtttttcccaggtgtcacttattgtatatgttaccaaataccatgaatttctgccatagtactactatcaagcaccttgtcttgctatttacagtttcttcatttgtatatttttagcttttctaagtggaaatgtctacataattttgatcttgacatgattgaggatttagagctcttgtctttgtcttgattgcaatccaacgatagattaacttgattctcagggggaaaagaaaaacttattttatgagaattgtttgttctgtgaaactcacttcacctagaacacatttcattgattcttggatcttagtttatgtggtcatagttgactgctgagaaaaggacaatgaaatgatagcaatttccttttgcttctaggtgatctctgattatagatagcatcctgtaaatataactttattgtcttgaaatgtttattgaagatgctatatttttctgttctgttttctgaagattttgccatttaaaatgatccagtgaaaaatatttatccacattgaagaaagtggatttcccatgcaaattgaatcttcattaacacattttaaaaggctttactgtattaggtaacatagatattaaaggatttttctaggcaagaagctcaactttttttttccataaaaataatttttgcttaaatagtaactcatggttttcttttattaaatggggttgttgtcagtatgttaaacattgaagtaggaggaggatgcatattgtactatgcattcaaatttatcactgttttttctgacagactttccctttgtcctttctagttatgacttgggaatggggtaacttctttatgcatagtattaagggttatagtatgaagaaatcataaaattgcaagttttggtttgcattactctaatgtgggttcatttaatctgagatcttaaatatcttgcagccttaaatcactacaaacatttgcatttttattatgccagttatttccaaaatgtattgttatacatgtcacttatgtttttaagctaatattgactgtaggataatctccttgttcccctcaaaatagtcatgaaagtgtacatgaaaatatttttaaagaataaatttctttaaatta

SEQ ID NO: 329625 - DNA, 10246 bp, Artificial Sequence
  derived and/or modified sequence
agcgcgcggagggcggggcctccccgggctcggccgcgccgccgcctcctccgcctcctcctcctcaccagcgctaaagccgggactggaccgagcggagttgtgcgtgtcgccgaaggggggtgggccgggggaggggaggttcgttccgcggagccccagccagaaccgggaccaagaatcgccttcagccctgtctggtgcatccttggcagaaagtgaggaggaaaacacccccattgttagatgaggtcttaatcatggaacatttgaagtcacgtaaagaaggttctttggcatggacacaagttcagtgggaggattagaattgactgatcagactcctgttttattagggagtacggccatggcaactagtctcacgaatgtaggaaactcatttagtggtccagctaatcctttagtgtctagatctaataagtttcagaactcgtcagtggaagatgatgatgatgttgtttttatcgaacctgtacaacctcccccaccttctgtaccagtggtagctgatcaaagaaccataacatttacatcatcaaaaaatgaagaactacaaggaaatgattccaaaattactccttcctcaaaagagttggcatctcagaagggaagtgtaagtgagacaattgtcattgatgatgaagaggacatggaaacaaatcaagggcaagagaaaaattcctccaattttattgaacgaagacctcctgagactaaaaacagaaccaatgatgtggatttctccacttccagtttttcaagaagtaaggtaaatgcaggaatgggtaatagtggtatcaccacagaaccagactctgaaattcagattgctaatgttacaactttagaaacaggtgtaagctctgtgaatgatggccaattagaaaatactgacgggcgagatatgaacttaatgattacacatgtaacatcactgcagaataccaacttgggagatgtctctaacggactgcagtcaagtaattttggtgttaatatacaaacatacaccccatctttaacttcacagaccaagactggagtaggaccttttaatcctggtagaatgaatgtggcaggagacgtttttcagaatggagaatctgcaactcatcataatcctgattcttggatctcccagtcagcttcatttccccgtaatcagaaacaaccaggggtggactctttatcaccagtggcctcacttcctaaacagattttccagccgtctgtccaacagcagcctactaaaccagttaaagtcacttgtgcaaactgcaaaaaacctttacagaagggccagacagcttatcaacgaaaaggatcagctcacctcttttgttctaccacctgcctttcttccttctcccacaagcctgctccaaagaaactctgtgttatgtgtaaaaaagatataactacaatgaaaggaaccattgttgctcaagtggattcaagtgagtccttccaggaattctgtagtacatcttgtttatctctctatgaagacaaacagaatcctactaaaggagctctaaataaatcaagatgtacaatctgtggtaaactaactgagattcgccatgaagtcagctttaaaaatatgactcataagctgtgcagtgaccactgctttaatagatatagaatggccaatggtttaataatgaattgctgtgaacagtgtggagagtacttgcccagtaaaggtgctggaaataatgttctggtgattgatggtcaacagaaaagattttgctgtcaaagttgtgtcagtgaatacaaacaggtaggtagccatccaagcttcctgaaggaggttcgagatcacatgcaggactctttcttaatgcagcctgagaaatatggaaaactgacaacttgtactggttgccgaacacagtgcaggttttttgatatgactcagtgtataggtcctaatggatatatggagccatattgttcaactgcttgtatgaacagtcacaagacaaaatatgcaaaatcacaaagtttgggaattatttgccatttttgtaagcgaaactctttacctcaataccaagccacaatgcctgatggaaaactgtacaacttttgcaattccagttgtgtggctaaatttcaggctctaagtatgcagtcatctccaaatggccagtttgtagcgccaagtgatattcagttgaaatgcaactactgcaaaaattccttttgttcaaaaccagaaatcctggaatgggagaacaaagtgcatcagttctgcagcaaaacttgttcagatgactataagaagttgcattgcatagttacatattgcgaatactgtcaagaggagaagactcttcatgaaacagtaaatttctctggcgttaagagacctttctgtagtgaaggctgcaaattattatacaaacaggattttgccagacgtttaggattgagatgtgttacttgcaactattgttctcagctatgtaagaagggagcaactaaagaactcgatggtgttgtgagagatttctgcagtgaagattgctgtaaaaaatttcaggattggtactacaaggctgcaaggtgtgactgttgtaaatctcaaggaactcttaaagagcgagttcagtggcgtggggaaatgaaacatttctgtgatcaacattgcttactgcgtttctactgtcaacaaaatgagcccaacatgacaactcagaaaggacctgaaaacttacattatgatcagggttgtcagacatctcgaaccaaaatgacaggttcagcaccacccccttctccaacacctaacaaagagatgaagaacaaagcagttctttgcaaacctttaacaatgacaaaagctacttactgtaaacctcacatgcagaccaaatcttgtcagacagatgatacttggaggacagaatatgttccagtgcctatccctgtgcctgtgtatatcccagttcctatgcacatgtacagtcagaatattcctgttcctactacagttcctgttcctgtgccagttcctgtttttctgcctgctccattggacagcagtgagaagattcctgcagcaattgaggagctaaaaagcaaggtttcttcagatgctcttgatacagagttgcttacaatgacggatatgatgagtgaagacgaggggaaaacagagacaaccaacatcaacagtgtaattattgaaacagatataattggttcagaccttttgaagaactctgacccagagacacagtccagcatgcctgatgtaccatatgaaccagatttggatatcgaaatagattttcccagagctgctgaggagcttgatatggaaaatgaatttttattaccacctgtttttggcgaagaatatgaggaacagcccagacctcgatctaaaaaaaagggagccaagagaaaggctgtatcaggataccagtctcatgatgatagttctgacaattcagaatgcagctttcctttcaaatatacgtatggcgtaaatgcatggaaacactgggtcaaaactaggcaacttgatgaagatcttctggtattagatgagttaaaatcttctaaatcagtaaagttaaaagaggatctactctctcacaccacagctgagcttaactatgggttagctcattttgtcaatgagatccgacggccaaatggagagaattatgcacctgacagcatctattacctttgccttggaatacaggagtatttgtgtggaagtaatcgaaaagacaacatatttattgatcctggataccaaacatttgagcaagaattgaataaaatactgcgaagctggcaaccaagcatacttccagatgggtcaatattctctcgagttgaagaagactatctctggaggataaaacaactaggatcacactctccagtagctcttctgaatacactgttctactttaacactaagtattttggcctgaaaacagtggaacaacacttaagactttcctttggcactgtgtttaggcattggaaaaaaaatcctttaacgatggaaaacaaagcgtgtcttcgataccaagtgtcttccttgtgtggaacagataatgaagataaaattactactggaaaaagaaaacatgaagatgatgagccagtatttgaacaaattgaaaacacagccaatccttccagatgtcctgtgaaaatgtttgaatgctacttgtctaaaagtccacagaatcttaatcagaggatggatgttttttatttgcaaccagaatgctctagttctacagatagccctgtctggtatacgtctacttcactggaccgaaacaccttggaaaatatgcttgtacgggttcttctagtaaaagatatttatgataaagacaattatgaactggatgaagacacagactaaaaaggaacgttgcagaagcaatcgggataaaacagcattagatagtcatgctgctagatctttattatggaaaacatttcaagtttactccttctgttttgagttttgtagcagtgtacccacgctgggtattaccatgtaaataatctgtgagtgaaagttgccattattctatgtagtggttttaggatacttaacaaatacattcaaattctttttttattattatttatttgattaggtatgtttgtaactttttacattacagaatatgaatgagaatgtgccatgtataatttttttcttgtagtaagaaacatccatattgcacaactctactgttgcaaagcttccttggaagggggctcttttactgggttcttaaccagatggttgtgtatgggtagcactactaaaagtttagaacttgcagtgtctttcggaatttttaaaataaactgtaaactaataggctggggtttttgttttgttttggggttttgttttgtttggttttacattttagttactgaagccttacaaggttatgtagagagataccatcttctgtaccaaaaatagacaagagaatgctgtcaatattggtgtactgtaatgtgaatctatgctggtgaaaacaattttttgttccccttattaaaaccttagtgtccttttctcatttgtggctttctgcatcacccaatcaataaaaaacaaatatatatatgtatatatatgtatgtatgtgtgtgtgtatatatatatatatatatatatatataaatgattgtaagttgaaaacaagatcatcaagacatttcctttgtaaaaatgtctggtgaaagtataaaattctgttttcttctatgccagccataagtatctgaaatcctcttcatttatagaggtttgatttttatttctttttttccctcttaaggatacagatcatgctgcaatgttagctgtgtagtactctaaaacttagcaattttatcagaattcttgtgcctgtttacattggataaaattgtttttagaaattccactcctgaaatagttacagaaagtcaagctatgttaaataagataggatcacattttataatgaagattaccagtgtagtaattctgatattgcaaatgattgaggaacaaacaaagaaactaatagagaaagtcagtctcagaggaaatcccatttaatgttagattgtttggcttttgaaattacttcttatagaagattgcattaaaaaaaaaaacaactttgtgcttctgcatagcaatttatccattcagaccttttcttttagaataaggaaacttaaaatctactttctaaagactgaacaaagtgctagctgcaaattatcttgaaatcatttggctcttttctagcatgtgtgtaatcatgttttcttctgattcctgaatgaccatggtagcattagtgtttagaaattgttcaggggaaaattgagctattttccatagtggctagcaattgctacacatccttagatactcctctctcccataggataaatgttacagcacacaaaagaaattttctcaattctgatttggaaaatttcacaggtgtcattattgtatatctaagcaataattatctgaatgttttggcataaaaaattataatgttctaacttgttttataagttgaatgacttttcagtcccttgattttatattgttgagtgataatcagactgatagtagcaaatctgatcatacattactaaaatagattgctgattgtctatttaacgaagacaagtgggtaacatttaaaatatataatacaaaaattttctctaacttacctttttccagaactacttctttaagcacttttcctattaatgcctattgttgattaaaaggtggttaattctaaccatcttttagtcttcaaagtggtgctatattccatcaagagcaataaagtttttcccaggtgtcacttattgtatatgttaccaaataccatgaatttctgccatagtactactatcaagcaccttgtcttgctatttacagtttcttcatttgtatatttttagcttttctaagtggaaatgtctacataattttgatcttgacatgattgaggatttagagctcttgtctttgtcttgattgcaatccaacgatagattaacttgattctcagggggaaaagaaaaacttattttatgagaattgtttgttctgtgaaactcacttcacctagaacacatttcattgattcttggatcttagtttatgtggtcatagttgactgctgagaaaaggacaatgaaatgatagcaatttccttttgcttctaggtgatctctgattatagatagcatcctgtaaatataactttattgtcttgaaatgtttattgaagatgctatatttttctgttctgttttctgaagattttgccatttaaaatgatccagtgaaaaatatttatccacattgaagaaagtggatttcccatgcaaattgaatcttcattaacacattttaaaaggctttactgtattaggtaacatagatattaaaggatttttctaggcaagaagctcaactttttttttccataaaaataatttttgcttaaatagtaactcatggttttcttttattaaatggggttgttgtcagtatgttaaacattgaagtaggaggaggatgcatattgtactatgcattcaaatttatcactgttttttctgacagactttccctttgtcctttctagttatgacttgggaatggggtaacttctttatgcatagtattaagggttatagtatgaagaaatcataaaattgcaagttttggtttgcattactctaatgtgggttcatttaatctgagatcttaaatatcttgcagccttaaatcactacaaacatttgcatttttattatgccagttatttccaaaatgtattgttatacatgtcacttatgtttttaagctaatattgactgtaggataatctccttgttcccctcaaaatagtcatgaaagtgtacatgaaaatatttttaaagaataaatttctttaaattacatacttttggatttcccccttaataagccccttactcatgtttagagaagattttgaatttcatttattccattctactgtgttctgaggattatatcaatttagaagttgatgtccagaacaggttatctgtatcagttctgagaatagaaacaacctacagtgctgtcccaatttgtacttttttttctttactcggaagttagatgtcagagggacacctcaaataagtgactgtgatcccctgccttgtaatgaagtggaaaagagagggtccctaaaaatctgggcaagtggtgtcctaattagttactgagttaaaacaagttcatgaatttaggccttttgggaaagaaagagaatgtaagatttaacctgtaaatgttaagaatagaaccaaagagagggccacagaccattagttgttaagaggtatcaatcttaacagcatattttctcttgtgcaatgaaaagaacaatcgtagctcttttgggcatcttaggtcttttattctttctggatggcttacatcgaatccttgtgatttatttaaagacacatttttcctggagaggagaaagatcttctctaaaatagccttaacactgagaacatattaggcctaattttaaaagtccaattcagataactcctcagaagtaaatgcagcacactaaaattcattatcacaaaacttaatatttgttaatatgtttcctctgtgctaaaaggctgctgctaaccatggtagttagggaggaagagaaagtaaaagacattagtgttcaaaacttacatctttgggggtaaacaagacatatagtacatttaactcctagggaacttagaatatttatggtaggatagaaagagatgattgtggacacacacaagtaccccaaaaggccattatggtctagaataggtttcatagagaggattactaccacctgtgattatatggtatatgaaacatgagattttgtaacctggacattgcttttagctctgttggaaatggtcagtagagcaatttctgaatattttgatggtacggtgttgatggcatcagtccttttctgtggctttcagcccaacttaatacaagaggagttaaaaatagcacccaaaaggggtagctagagcaccctcaccatgcactaaagataaatctaaaaggtgttcaagtacattgaatcaagatgagtaatccaacttctatgttatgtaggatggatggagcacacaaattcttgcaaacattgtagaggtttttttaaacttcatccactaaggatttttttataataattacttttgaaaataaaatctcaactattttccaagttatgagtgtgctgctcttaaccctgtgagatgaaatcttcccatttggattacatatttgtagttctatatcgacatcagcagatggcaatagtatacaaatagtatacagcatgagccttccattgcttttatttctttgtttataagtatactataatccttcatctgaaacccttagggttttagaattcagaattttccccttttcagagagaatatatataatgtagattacataacaccctcaatggggcctggggcaacaccccataatcaaacattagtacattcatagtaactgggattaactatgtaaggcagtaagctacctgccttacatagtttaggtcaatttttgtcacaaacttatggaaaaactaggtttttagaaattttttggatctcagaattcgtgattagggattgctgacctctgtaaggaaactggtgtcaggtctagaattttccttctaatgaaatacgtagtcattttccccctttttaaattgcttagctttggtagaggtaactgaaggctttctttagaattcgtgtgttagattttaagaaaaatgcatgaaattgttaggacaggcataaatacaaatggcaattctagagccattacggaattttgaaacacttaacaattgctttcttttacttttcatcttgcctcaatacttgtagcattacaagtattccacgtaaataaacgtttatgaagagctgcagtcatgtcatggagccaggcatttattcattcaacaaataggttagtcttccacacacaatttcaggtgctgggaacacagaattaagacccagcccttcctctcaaggacttcgcgtagtttgggagaaacgggaatgggctggaatgtcagaataagatgggcacttaggccttattgagcatgatcacacttgtattttgaagtaaaataccctgatcaagtaatttaccaagaagctactttttgtgacacagctccgtctcctgaccgcggttccagacttcaccattacaccagtctattcccattctggaaagggagaggtatcagctcttagggggcagagattagcaaattgaaaaatagcagtgaaccagatggaaggctctcgatctttagaggttattaatcagtgtttgttcgttcaatttttaaccagtcaccttgctgttaagagcagaacataattggctggaatgtaatgtagggaatttttccctgttggatccctagcacctagaaaagttcctagcacctattaggtgttaataaatgattgttgaatgaatcagtgattacaagtacttttaagaattttgaaaataaaggaaccattggaaatacga

SEQ ID NO: 329626 - protein, 1377 aa, Artificial Sequence
  derived and/or modified sequence
MDTSSVGGLELTDQTPVLLGSTAMATSLTNVGNSFSGPANPLVSRSNKFQNSSVEDDDDVVFIEPVQPPPPSVPVVADQRTITFTSSKNEELQGNDSKITPSSKELASQKGSVSETIVIDDEEDMETNQGQEKNSSNFIERRPPETKNRTNDVDFSTSSFSRSKVNAGMGNSGITTEPDSEIQIANVTTLETGVSSVNDGQLENTDGRDMNLMITHVTSLQNTNLGDVSNGLQSSNFGVNIQTYTPSLTSQTKTGVGPFNPGRMNVAGDVFQNGESATHHNPDSWISQSASFPRNQKQPGVDSLSPVASLPKQIFQPSVQQQPTKPVKVTCANCKKPLQKGQTAYQRKGSAHLFCSTTCLSSFSHKPAPKKLCVMCKKDITTMKGTIVAQVDSSESFQEFCSTSCLSLYEDKQNPTKGALNKSRCTICGKLTEIRHEVSFKNMTHKLCSDHCFNRYRMANGLIMNCCEQCGEYLPSKGAGNNVLVIDGQQKRFCCQSCVSEYKQVGSHPSFLKEVRDHMQDSFLMQPEKYGKLTTCTGCRTQCRFFDMTQCIGPNGYMEPYCSTACMNSHKTKYAKSQSLGIICHFCKRNSLPQYQATMPDGKLYNFCNSSCVAKFQALSMQSSPNGQFVAPSDIQLKCNYCKNSFCSKPEILEWENKVHQFCSKTCSDDYKKLHCIVTYCEYCQEEKTLHETVNFSGVKRPFCSEGCKLLYKQDFARRLGLRCVTCNYCSQLCKKGATKELDGVVRDFCSEDCCKKFQDWYYKAARCDCCKSQGTLKERVQWRGEMKHFCDQHCLLRFYCQQNEPNMTTQKGPENLHYDQGCQTSRTKMTGSAPPPSPTPNKEMKNKAVLCKPLTMTKATYCKPHMQTKSCQTDDTWRTEYVPVPIPVPVYIPVPMHMYSQNIPVPTTVPVPVPVPVFLPAPLDSSEKIPAAIEELKSKVSSDALDTELLTMTDMMSEDEGKTETTNINSVIIETDIIGSDLLKNSDPETQSSMPDVPYEPDLDIEIDFPRAAEELDMENEFLLPPVFGEEYEEQPRPRSKKKGAKRKAVSGYQSHDDSSDNSECSFPFKYTYGVNAWKHWVKTRQLDEDLLVLDELKSSKSVKLKEDLLSHTTAELNYGLAHFVNEIRRPNGENYAPDSIYYLCLGIQEYLCGSNRKDNIFIDPGYQTFEQELNKILRSWQPSILPDGSIFSRVEEDYLWRIKQLGSHSPVALLNTLFYFNTKYFGLKTVEQHLRLSFGTVFRHWKKNPLTMENKACLRYQVSSLCGTDNEDKITTGKRKHEDDEPVFEQIENTANPSRCPVKMFECYLSKSPQNLNQRMDVFYLQPECSSSTDSPVWYTSTSLDRNTLENMLVRVLLVKDIYDKDNYELDEDTD

SEQ ID NO: 329627 - protein, 1375 aa, Artificial Sequence
  derived and/or modified sequence
MDTSSVGGLELTDQTPVLLGSTAMATSLTNVGNSFSGPANPLVSRSNKFQNSSVEDDDDVVFIEPVQPPPPSVPVVADQRTITFTSSKNEELQGNDSKITPSSKELASQKGSVSETIVIDDEEDMETNQGQEKNSSNFIERRPPETKNRTNDVDFSTSSFSRSKVNAGMGNSGITTEPDSEIQIANVTTLETGVSSVNDGQLENTDGRDMNLMITHVTSLQNTNLGDVSNGLQSSNFGVNIQTYTPSLTSQTKTGVGPFNPGRMNVAGDVFQNGESATHHNPDSWISQSASFPRNQKQPGVDSLSPVASLPKQIFQPSVQQQPTKPVKVTCANCKKPLQKGQTAYQRKGSAHLFCSTTCLSSFSHKPAPKKLCVMCKKDITTMKGTIVAQVDSSESFQEFCSTSCLSLYEDKQNPTKGALNKSRCTICGKLTEIRHEVSFKNMTHKLCSDHCFNRYRMANGLIMNCCEQCGEYLPSKGAGNNVLVIDGQQKRFCCQSCVSEYKQVGSHPSFLKEVRDHMQDSFLMQPEKYGKLTTCTGCRTQCRFFDMTQCIGPNGYMEPYCSTACMNSHKTKYAKSQSLGIICHFCKRNSLPQYQATMPDGKLYNFCNSSCVAKFQALSMQSSPNGQFVAPSDIQLKCNYCKNSFCSKPEILEWEASLHQFCSKTCSDDYKKLHCIVTYCEYCQEEKTLHETVNFSGVKRPFCSEGCKLLYKQDFARRLGLRCVTCNYCSQLCKKGATKELDGVVRDFCSEDCCKKFQDWYYKACDCCKSQGTLKERVQWRGEMKHFCDQHCLLRFYCQQNEPNMTTQKGPENLHYDQGCQTSRTKMTGSAPPPSPTPNKEMKNKAVLCKPLTMTKATYCKPHMQTKSCQTDDTWRTEYVPVPIPVPVYIPVPMHMYSQNIPVPTTVPVPVPVPVFLPAPLDSSEKIPAAIEELKSKVSSDALDTELLTMTDMMSEDEGKTETTNINSVIIETDIIGSDLLKNSDPETQSSMPDVPYEPDLDIEIDFPRAAEELDMENEFLLPPVFGEEYEEQPRPRSKKKGAKRKAVSGYQSHDDSSDNSECSFPFKYTYGVNAWKHWVKTRQLDEDLLVLDELKSSKSVKLKEDLLSHTTAELNYGLAHFVNEIRRPNGENYAPDSIYYLCLGIQEYLCGSNRKDNIFIDPGYQTFEQELNKILRSWQPSILPDGSIFSRVEEDYLWRIKQLGSHSPVALLNTLFYFNTKYFGLKTVEQHLRLSFGTVFRHWKKNPLTMENKACLRYQVSSLCGTDNEDKITTGKRKHEDDEPVFEQIENTANPSRCPVKMFECYLSKSPQNLNQRMDVFYLQPECSSSTDSPVWYTSTSLDRNTLENMLVRVLLVKDIYDKDNYELDEDTD

SEQ ID NO: 329628 - protein, 377 aa, Artificial Sequence
  derived and/or modified sequence
MQDSFLMQPEKYGKLTTCTGCRTQCRFFDMTQCIGPNGYMEPYCSTACMNSHKTKYAKSQSLGIICHFCKRNSLPQYQATMPDGKLYNFCNSSCVAKFQALSMQSSPNGQFVAPSDIQLKCNYCKNSFCSKPEILEWENKVHQFCSKTCSDDYKKLHCIVTYCEYCQEEKTLHETVNFSGVKRPFCSEGCKLLYKQDFARRLGLRCVTCNYCSQLCKKGATKELDGVVRDFCSEDCCKKFQDWYYKAARCDCCKSQGTLKERVQWRGEMKHFCDQHCLLRFYCQQNEPNMTTQKGPENLHYDQGCQTSRTKMTGSAPPPSPTPNKEMKNKAVLCKPLTMTKATYCKPHMQTKSCQTDITWRIQHLILNHYDQSLIKA

SEQ ID NO: 329629 - DNA, 4134 bp, Artificial Sequence
  derived and/or modified sequence
atggacaccagcagcgtgggcggcctggagctgaccgaccagacccccgtgctgctgggcagcaccgccatggccaccagcctgaccaacgtgggcaacagcttcagcggccccgccaaccccctggtgagcagaagcaacaagttccagaacagcagcgtggaggacgacgacgacgtggtgttcatcgagcccgtgcagccccccccccccagcgtgcccgtggtggccgaccagagaaccatcaccttcaccagcagcaagaacgaggagctgcagggcaacgacagcaagatcacccccagcagcaaggagctggccagccagaagggcagcgtgagcgagaccatcgtgatcgacgacgaggaggacatggagaccaaccagggccaggagaagaacagcagcaacttcatcgagagaagaccccccgagaccaagaacagaaccaacgacgtggacttcagcaccagcagcttcagcagaagcaaggtgaacgccggcatgggcaacagcggcatcaccaccgagcccgacagcgagatccagatcgccaacgtgaccaccctggagaccggcgtgagcagcgtgaacgacggccagctggagaacaccgacggcagagacatgaacctgatgatcacccacgtgaccagcctgcagaacaccaacctgggcgacgtgagcaacggcctgcagagcagcaacttcggcgtgaacatccagacctacacccccagcctgaccagccagaccaagaccggcgtgggccccttcaaccccggcagaatgaacgtggccggcgacgtgttccagaacggcgagagcgccacccaccacaaccccgacagctggatcagccagagcgccagcttccccagaaaccagaagcagcccggcgtggacagcctgagccccgtggccagcctgcccaagcagatcttccagcccagcgtgcagcagcagcccaccaagcccgtgaaggtgacctgcgccaactgcaagaagcccctgcagaagggccagaccgcctaccagagaaagggcagcgcccacctgttctgcagcaccacctgcctgagcagcttcagccacaagcccgcccccaagaagctgtgcgtgatgtgcaagaaggacatcaccaccatgaagggcaccatcgtggcccaggtggacagcagcgagagcttccaggagttctgcagcaccagctgcctgagcctgtacgaggacaagcagaaccccaccaagggcgccctgaacaagagcagatgcaccatctgcggcaagctgaccgagatcagacacgaggtgagcttcaagaacatgacccacaagctgtgcagcgaccactgcttcaacagatacagaatggccaacggcctgatcatgaactgctgcgagcagtgcggcgagtacctgcccagcaagggcgccggcaacaacgtgctggtgatcgacggccagcagaagagattctgctgccagagctgcgtgagcgagtacaagcaggtgggcagccaccccagcttcctgaaggaggtgagagaccacatgcaggacagcttcctgatgcagcccgagaagtacggcaagctgaccacctgcaccggctgcagaacccagtgcagattcttcgacatgacccagtgcatcggccccaacggctacatggagccctactgcagcaccgcctgcatgaacagccacaagaccaagtacgccaagagccagagcctgggcatcatctgccacttctgcaagagaaacagcctgccccagtaccaggccaccatgcccgacggcaagctgtacaacttctgcaacagcagctgcgtggccaagttccaggccctgagcatgcagagcagccccaacggccagttcgtggcccccagcgacatccagctgaagtgcaactactgcaagaacagcttctgcagcaagcccgagatcctggagtgggagaacaaggtgcaccagttctgcagcaagacctgcagcgacgactacaagaagctgcactgcatcgtgacctactgcgagtactgccaggaggagaagaccctgcacgagaccgtgaacttcagcggcgtgaagagacccttctgcagcgagggctgcaagctgctgtacaagcaggacttcgccagaagactgggcctgagatgcgtgacctgcaactactgcagccagctgtgcaagaagggcgccaccaaggagctggacggcgtggtgagagacttctgcagcgaggactgctgcaagaagttccaggactggtactacaaggccgccagatgcgactgctgcaagagccagggcaccctgaaggagagagtgcagtggagaggcgagatgaagcacttctgcgaccagcactgcctgctgagattctactgccagcagaacgagcccaacatgaccacccagaagggccccgagaacctgcactacgaccagggctgccagaccagcagaaccaagatgaccggcagcgcccccccccccagccccacccccaacaaggagatgaagaacaaggccgtgctgtgcaagcccctgaccatgaccaaggccacctactgcaagccccacatgcagaccaagagctgccagaccgacgacacctggagaaccgagtacgtgcccgtgcccatccccgtgcccgtgtacatccccgtgcccatgcacatgtacagccagaacatccccgtgcccaccaccgtgcccgtgcccgtgcccgtgcccgtgttcctgcccgcccccctggacagcagcgagaagatccccgccgccatcgaggagctgaagagcaaggtgagcagcgacgccctggacaccgagctgctgaccatgaccgacatgatgagcgaggacgagggcaagaccgagaccaccaacatcaacagcgtgatcatcgagaccgacatcatcggcagcgacctgctgaagaacagcgaccccgagacccagagcagcatgcccgacgtgccctacgagcccgacctggacatcgagatcgacttccccagagccgccgaggagctggacatggagaacgagttcctgctgccccccgtgttcggcgaggagtacgaggagcagcccagacccagaagcaagaagaagggcgccaagagaaaggccgtgagcggctaccagagccacgacgacagcagcgacaacagcgagtgcagcttccccttcaagtacacctacggcgtgaacgcctggaagcactgggtgaagaccagacagctggacgaggacctgctggtgctggacgagctgaagagcagcaagagcgtgaagctgaaggaggacctgctgagccacaccaccgccgagctgaactacggcctggcccacttcgtgaacgagatcagaagacccaacggcgagaactacgcccccgacagcatctactacctgtgcctgggcatccaggagtacctgtgcggcagcaacagaaaggacaacatcttcatcgaccccggctaccagaccttcgagcaggagctgaacaagatcctgagaagctggcagcccagcatcctgcccgacggcagcatcttcagcagagtggaggaggactacctgtggagaatcaagcagctgggcagccacagccccgtggccctgctgaacaccctgttctacttcaacaccaagtacttcggcctgaagaccgtggagcagcacctgagactgagcttcggcaccgtgttcagacactggaagaagaaccccctgaccatggagaacaaggcctgcctgagataccaggtgagcagcctgtgcggcaccgacaacgaggacaagatcaccaccggcaagagaaagcacgaggacgacgagcccgtgttcgagcagatcgagaacaccgccaaccccagcagatgccccgtgaagatgttcgagtgctacctgagcaagagcccccagaacctgaaccagagaatggacgtgttctacctgcagcccgagtgcagcagcagcaccgacagccccgtgtggtacaccagcaccagcctggacagaaacaccctggagaacatgctggtgagagtgctgctggtgaaggacatctacgacaaggacaactacgagctggacgaggacaccgactag

SEQ ID NO: 329630 - DNA, 4128 bp, Artificial Sequence
  derived and/or modified sequence
atggacaccagcagcgtgggcggcctggagctgaccgaccagacccccgtgctgctgggcagcaccgccatggccaccagcctgaccaacgtgggcaacagcttcagcggccccgccaaccccctggtgagcagaagcaacaagttccagaacagcagcgtggaggacgacgacgacgtggtgttcatcgagcccgtgcagccccccccccccagcgtgcccgtggtggccgaccagagaaccatcaccttcaccagcagcaagaacgaggagctgcagggcaacgacagcaagatcacccccagcagcaaggagctggccagccagaagggcagcgtgagcgagaccatcgtgatcgacgacgaggaggacatggagaccaaccagggccaggagaagaacagcagcaacttcatcgagagaagaccccccgagaccaagaacagaaccaacgacgtggacttcagcaccagcagcttcagcagaagcaaggtgaacgccggcatgggcaacagcggcatcaccaccgagcccgacagcgagatccagatcgccaacgtgaccaccctggagaccggcgtgagcagcgtgaacgacggccagctggagaacaccgacggcagagacatgaacctgatgatcacccacgtgaccagcctgcagaacaccaacctgggcgacgtgagcaacggcctgcagagcagcaacttcggcgtgaacatccagacctacacccccagcctgaccagccagaccaagaccggcgtgggccccttcaaccccggcagaatgaacgtggccggcgacgtgttccagaacggcgagagcgccacccaccacaaccccgacagctggatcagccagagcgccagcttccccagaaaccagaagcagcccggcgtggacagcctgagccccgtggccagcctgcccaagcagatcttccagcccagcgtgcagcagcagcccaccaagcccgtgaaggtgacctgcgccaactgcaagaagcccctgcagaagggccagaccgcctaccagagaaagggcagcgcccacctgttctgcagcaccacctgcctgagcagcttcagccacaagcccgcccccaagaagctgtgcgtgatgtgcaagaaggacatcaccaccatgaagggcaccatcgtggcccaggtggacagcagcgagagcttccaggagttctgcagcaccagctgcctgagcctgtacgaggacaagcagaaccccaccaagggcgccctgaacaagagcagatgcaccatctgcggcaagctgaccgagatcagacacgaggtgagcttcaagaacatgacccacaagctgtgcagcgaccactgcttcaacagatacagaatggccaacggcctgatcatgaactgctgcgagcagtgcggcgagtacctgcccagcaagggcgccggcaacaacgtgctggtgatcgacggccagcagaagagattctgctgccagagctgcgtgagcgagtacaagcaggtgggcagccaccccagcttcctgaaggaggtgagagaccacatgcaggacagcttcctgatgcagcccgagaagtacggcaagctgaccacctgcaccggctgcagaacccagtgcagattcttcgacatgacccagtgcatcggccccaacggctacatggagccctactgcagcaccgcctgcatgaacagccacaagaccaagtacgccaagagccagagcctgggcatcatctgccacttctgcaagagaaacagcctgccccagtaccaggccaccatgcccgacggcaagctgtacaacttctgcaacagcagctgcgtggccaagttccaggccctgagcatgcagagcagccccaacggccagttcgtggcccccagcgacatccagctgaagtgcaactactgcaagaacagcttctgcagcaagcccgagatcctggagtgggaggccagcctgcaccagttctgcagcaagacctgcagcgacgactacaagaagctgcactgcatcgtgacctactgcgagtactgccaggaggagaagaccctgcacgagaccgtgaacttcagcggcgtgaagagacccttctgcagcgagggctgcaagctgctgtacaagcaggacttcgccagaagactgggcctgagatgcgtgacctgcaactactgcagccagctgtgcaagaagggcgccaccaaggagctggacggcgtggtgagagacttctgcagcgaggactgctgcaagaagttccaggactggtactacaaggcctgcgactgctgcaagagccagggcaccctgaaggagagagtgcagtggagaggcgagatgaagcacttctgcgaccagcactgcctgctgagattctactgccagcagaacgagcccaacatgaccacccagaagggccccgagaacctgcactacgaccagggctgccagaccagcagaaccaagatgaccggcagcgcccccccccccagccccacccccaacaaggagatgaagaacaaggccgtgctgtgcaagcccctgaccatgaccaaggccacctactgcaagccccacatgcagaccaagagctgccagaccgacgacacctggagaaccgagtacgtgcccgtgcccatccccgtgcccgtgtacatccccgtgcccatgcacatgtacagccagaacatccccgtgcccaccaccgtgcccgtgcccgtgcccgtgcccgtgttcctgcccgcccccctggacagcagcgagaagatccccgccgccatcgaggagctgaagagcaaggtgagcagcgacgccctggacaccgagctgctgaccatgaccgacatgatgagcgaggacgagggcaagaccgagaccaccaacatcaacagcgtgatcatcgagaccgacatcatcggcagcgacctgctgaagaacagcgaccccgagacccagagcagcatgcccgacgtgccctacgagcccgacctggacatcgagatcgacttccccagagccgccgaggagctggacatggagaacgagttcctgctgccccccgtgttcggcgaggagtacgaggagcagcccagacccagaagcaagaagaagggcgccaagagaaaggccgtgagcggctaccagagccacgacgacagcagcgacaacagcgagtgcagcttccccttcaagtacacctacggcgtgaacgcctggaagcactgggtgaagaccagacagctggacgaggacctgctggtgctggacgagctgaagagcagcaagagcgtgaagctgaaggaggacctgctgagccacaccaccgccgagctgaactacggcctggcccacttcgtgaacgagatcagaagacccaacggcgagaactacgcccccgacagcatctactacctgtgcctgggcatccaggagtacctgtgcggcagcaacagaaaggacaacatcttcatcgaccccggctaccagaccttcgagcaggagctgaacaagatcctgagaagctggcagcccagcatcctgcccgacggcagcatcttcagcagagtggaggaggactacctgtggagaatcaagcagctgggcagccacagccccgtggccctgctgaacaccctgttctacttcaacaccaagtacttcggcctgaagaccgtggagcagcacctgagactgagcttcggcaccgtgttcagacactggaagaagaaccccctgaccatggagaacaaggcctgcctgagataccaggtgagcagcctgtgcggcaccgacaacgaggacaagatcaccaccggcaagagaaagcacgaggacgacgagcccgtgttcgagcagatcgagaacaccgccaaccccagcagatgccccgtgaagatgttcgagtgctacctgagcaagagcccccagaacctgaaccagagaatggacgtgttctacctgcagcccgagtgcagcagcagcaccgacagccccgtgtggtacaccagcaccagcctggacagaaacaccctggagaacatgctggtgagagtgctgctggtgaaggacatctacgacaaggacaactacgagctggacgaggacaccgactag

SEQ ID NO: 329631 - DNA, 4134 bp, Artificial Sequence
  derived and/or modified sequence
atggatacctcctccgtcggggggctagagcttacagaccagactcccgtgcttctgggaagcacggcaatggccacaagcctgacgaatgtcggcaattctttcagcggtccagccaacccgttagtctcgcgctctaataagttccaaaatagctcagtagaggacgatgacgacgttgtgttcatagagccagtgcagccaccgcccccgtcagtgcccgtggttgcagatcagcggaccataaccttcacctcttccaagaatgaagaactccagggtaacgacagtaaaattactccatccagcaaggaactggcttcgcagaaaggctccgttagcgaaaccatcgtgatcgacgatgaggaagacatggaaaccaatcagggacaggaaaagaactcgagcaactttattgagcgtcgaccccctgagacaaagaaccgaacgaacgacgtggacttctccacgtctagcttctcacgctcaaaggtgaatgccgggatgggcaactctggcattactaccgaaccagactctgaaattcagatcgcgaacgttacaactctggagacaggggtctctagtgttaacgacggccagctggaaaataccgatggcagagatatgaacctgatgataacccatgtgacctccctccagaacactaacctcggcgacgtctcaaacggcctacagtcatcaaatttcggtgtgaatattcagacatacaccccctctttaacatctcagaccaaaactggggtcgggccttttaatccaggaaggatgaacgttgccggcgacgtatttcaaaatggagaatcagccacacatcacaaccccgactcctggatatcccagtcagccagcttcccaaggaatcagaagcaacctggcgtggattccctgtccccagtagctagtctgcccaaacaaatttttcaaccgtccgtgcagcaacagccaacaaaaccagtgaaagtaacctgtgccaattgtaagaaacccttgcaaaaaggacagacagcgtaccaaagaaagggaagcgcccatttgttctgttccaccacctgcctgtcctccttcagccacaagcctgcgcctaagaaattgtgtgtaatgtgcaaaaaggatatcacaacgatgaaaggcacgatcgtggctcaggtagactccagtgaatccttccaagagttctgttcaactagctgcctgagcctgtacgaggacaaacagaatcctacaaagggagccttgaataagtcaagatgcactatctgcggcaagttaaccgagatccggcacgaagttagtttcaaaaatatgacccataagctatgttctgaccattgcttcaaccggtacaggatggcaaatggcctaatcatgaactgttgtgaacagtgtggcgaatatctgccaagcaagggagccggaaataatgtgctggtgattgatggccaacagaagagattttgctgtcagagttgcgtgtccgagtacaagcaggtcggctcgcatccctcctttcttaaggaagtgcgcgatcacatgcaggactcctttttgatgcagccagagaagtacggtaagctcactacatgcacgggatgtagaactcagtgcagatttttcgatatgacccagtgcatcggtccaaatggctatatggaaccgtactgctctactgcctgtatgaactcccataagacaaaatacgccaaatcccagtctctaggcatcatatgtcacttctgcaagcgaaactccctcccccagtaccaggccacaatgcctgatggcaagctgtataacttctgtaatagctcgtgtgtggccaaattccaagcactgagcatgcagtcaagtcctaatggccagtttgtggctcctagtgatatacagttgaaatgcaactattgtaagaactccttctgctcaaaacctgagatcttagaatgggagaataaggtgcaccagttctgcagcaaaacatgctccgacgactataagaagttgcattgtattgtcacatactgtgaatactgtcaggaggagaagactctccatgagacggtgaactttagtggcgttaagaggcctttctgctctgaggggtgtaagttgctgtacaagcaagactttgcccgccgactaggactcagatgcgtcacctgcaactattgcagccagttatgcaaaaaaggtgctaccaaggagctggacggagtcgtgcgtgacttctgttctgaggactgctgcaaaaaattccaggactggtattacaaggcagcacggtgcgactgttgtaagtctcaaggaacgctgaaggagagagttcagtggcggggggagatgaaacacttttgcgatcagcactgcttgttaagattctactgtcagcaaaatgaacctaacatgactacccagaaaggtcctgagaatctgcattatgatcaaggatgccaaacttcgcgcaccaagatgaccggtagcgcccccccaccttcaccaactccgaacaaagagatgaagaataaggccgtgctgtgtaaaccccttacaatgacaaaagcaacctattgtaaacctcacatgcagacgaaatcctgccagacggatgacacctggcgtacagagtacgttcccgtgcccatcccagtgcccgtatacatccctgtgcctatgcatatgtactctcagaatattcccgtgcctaccaccgtccccgtgcccgtgcccgtgcccgtctttctcccagcccccctggactcctccgaaaagataccagctgcaattgaagaactgaaatcgaaagtctcatcagacgccctggacacagaactactgacgatgacagatatgatgagtgaagacgaggggaaaaccgaaacaacgaacataaacagtgttattatagaaactgacatcattggatccgatctactaaaaaattccgatcctgagacccagagctcaatgccagatgttccctatgagccagatctcgatattgagattgacttccctagggcggctgaggagctggacatggagaatgagttcctcctcccccccgtgttcggtgaggagtacgaggaacagccaaggcctcgcagcaaaaagaagggggcgaagaggaaagcagtctccggatatcagtcacacgacgattcctcggataactccgaatgctccttcccgttcaaatacacctatggggttaatgcctggaaacattgggttaaaaccaggcagctggatgaagacttgcttgtgctggacgagctcaagtcctctaagagcgtgaagctcaaggaagatttgctgagccacaccacggcagagcttaactacggcctggctcatttcgtcaatgagattcggcgccctaacggtgagaattatgcccccgactcaatctactacctttgcctgggcattcaagaatacttatgcgggagcaaccgaaaggacaatattttcatcgaccccggttaccagaccttcgagcaagaattaaataaaatcctgaggtcctggcaaccctccatcctccctgatggcagtattttttctcgcgttgaagaggactatctctggagaattaagcagcttggctcccattcgcctgtcgccctcctcaacaccctgttctattttaatacaaagtattttgggctgaaaacggtcgagcagcatttaagactgtcttttggcactgtgttcagacactggaaaaagaatccattaaccatggagaataaagcttgcctaagatatcaagtttcatctctgtgtgggactgacaatgaagacaaaatcaccaccgggaaacgcaaacatgaggacgacgaacccgtgtttgagcagatagaaaatactgccaatccatcgagatgccccgtcaagatgttcgaatgctacctgtcgaagtcgcctcagaaccttaaccagcggatggatgtgttttacttacaaccggaatgctcttcgtcaactgattcccccgtctggtacacttcaactagcctggaccgcaacaccctcgaaaacatgctcgtcagagtactgctagttaaggacatctatgacaaggataattacgaactggacgaggataccgactag

SEQ ID NO: 329632 - DNA, 4128 bp, Artificial Sequence
  derived and/or modified sequence
atggacacctctagcgtgggaggcctggagcttactgaccagactcctgtgcttctgggtagcacagccatggccaccagcctcaccaatgtaggcaactcctttagcgggccagccaaccctttagtttccagatcaaataaattccagaattcttcggttgaagatgatgacgacgtggtgttcatcgagccagtgcaaccacctccgccgagtgtgccggtcgttgccgatcagcgcactataacttttaccagtagtaaaaacgaagagttgcaagggaatgatagtaagatcactccatcttccaaagaacttgctagtcagaagggctctgtctccgaaactatcgtaatcgatgatgaggaggatatggagacaaaccagggccaggaaaaaaactccagtaattttatcgaacgacgtccccccgaaaccaagaaccgaacaaatgacgtggatttctccacgtcttccttttccagaagtaaggtgaatgcaggtatggggaactcaggtatcacaacagagcctgacagcgagatccaaattgctaatgtcacaactctggagacaggtgtctcatccgtgaacgatggtcagttggaaaacactgacggccgcgatatgaacctcatgatcacgcacgtaaccagcctacaaaacacaaaccttggtgacgtgagcaacgggctgcaatcctccaattttggggtgaatatccagacttatactccaagcctgacctcccaaacaaagaccggcgttggtccattcaacccagggcggatgaatgtggccggcgacgtatttcagaatggtgaaagcgccacccatcacaaccctgactcttggatctcccaaagcgcttccttcccaaggaatcagaaacaacctggggtcgatagtcttagccctgtggcctcactcccaaaacaaatctttcaaccttctgtccaacaacaacccacaaagcccgtgaaggtcacttgtgctaactgcaaaaagccattgcaaaagggtcagacagcctatcagcgaaagggcagcgcccatctcttttgcagtaccacatgcttgtccagcttcagccataaacctgcgcctaaaaagctatgtgtcatgtgcaaaaaagacatcactactatgaagggcaccattgtcgctcaggtggactcttctgagtcctttcaagagttttgttccaccagctgtctctccttgtacgaggataaacagaaccccaccaagggcgctctcaataagtcccggtgtacaatttgcggcaaactcacagagatcagacacgaagtgagcttcaagaatatgactcacaaactctgctcagatcactgcttcaataggtacagaatggctaatgggctgatcatgaattgctgcgaacaatgcggcgagtatttgccatctaagggcgctggaaataatgtgctggtgattgacgggcagcagaagaggttttgctgccaaagttgtgtgagtgagtacaagcaggtcggctcacatccaagttttttgaaggaagtgagggatcacatgcaggatagcttcctcatgcagccagaaaagtacgggaaacttacaacatgcacgggctgccggacacagtgtaggttctttgatatgactcagtgcatcgggcccaacggctatatggaaccgtactgctctaccgcttgtatgaactcccacaagaccaaatacgctaagtctcagagcttagggatcatctgccacttttgcaaaaggaacagcttgccacagtaccaggcaacaatgccagacggtaagctgtataacttctgtaacagttcatgtgttgcgaaatttcaggccctctccatgcagtcctcaccaaacgggcagttcgtggccccctctgacattcagcttaaatgcaactattgcaagaacagcttctgctcaaaaccagaaatcctcgagtgggaggcctccctgcatcagttttgcagcaaaacctgtagcgatgactacaaaaaactgcattgtatcgtgacttattgcgagtactgtcaggaggaaaagacgctgcatgagaccgtgaactttagtggagtgaaacggcctttctgcagcgaagggtgcaaactgctgtacaaacaagacttcgcccggagacttggcctgcgctgtgtaacctgtaattattgtagtcagctgtgtaaaaagggagccaccaaagagctagatggagtcgtacgagatttctgttctgaggattgttgtaagaagtttcaggactggtattacaaagcctgcgattgctgcaagtctcaggggaccctcaaggagcgggttcagtggcgcggcgaaatgaaacacttctgtgaccagcactgcctgctgcgtttttattgccagcagaacgagcccaatatgactacgcaaaaaggcccggaaaatctgcattacgatcagggctgtcagactagccggacaaagatgaccggctcagcaccacccccaagccctactcccaataaggaaatgaagaataaagccgtgctttgtaaaccactgaccatgaccaaggccacatactgcaaaccacacatgcaaactaagtcttgtcaaactgacgacacttggaggacggaatacgtgcctgtgcccatccctgtgcctgtgtacatacctgttccgatgcacatgtacagccagaatattcctgtgccaaccaccgtgcccgtcccagtgccagttccagttttcctccctgcacccttggattcctcagaaaagatccctgctgcaatcgaggaactcaagagcaaagtgtcaagcgatgctttggacaccgagcttctgacgatgacagacatgatgtctgaagatgaggggaaaactgagaccacaaatattaattcggtgattatagagacggatattattggctcagatctactgaagaatagtgaccctgagacacagtctagcatgccagatgtcccgtacgaacccgacctggatatcgaaattgatttcccccgcgccgccgaagagctggacatggaaaatgagttcctgctgcctccagtgttcggggaagaatatgaggagcagccaagacccaggtccaaaaaaaaaggtgctaaacggaaagcagtcagtggttaccagtcccacgacgacagctcagacaattccgaatgctcttttccttttaaatatacttatggggtgaacgcctggaagcactgggttaagacgagacagctggacgaagatttattggtgctggatgagctcaagagtagtaagtcagttaagctgaaggaggacctcctttcccataccacggcggaattgaattatgggctcgcccacttcgttaacgaaatacgaaggcctaacggagaaaattatgctccggactctatctactatctttgtttgggtattcaggagtatctttgcggatctaatcggaaagataacattttcatcgatcctgggtaccagactttcgagcaggagctgaacaaaattttgcggagctggcaaccgagcatcctgccagacggatccatcttttcaagagtcgaagaagactacttgtggaggatcaagcagctgggatcccactcccctgtggctctgctgaatacactgttctattttaataccaaatactttgggctaaagacagtggaacagcacttgcgtcttagcttcggaacagtctttcggcactggaaaaaaaatcctttgaccatggaaaacaaggcttgtctccgctatcaagtatcatcactctgcgggacggacaatgaggacaagatcactactggcaaaaggaagcacgaggacgatgagcccgtgtttgaacagatcgaaaacacggctaacccatcaaggtgtccagtgaagatgttcgaatgctacttatccaagtcccctcagaacctgaaccagaggatggacgtcttttaccttcagcccgagtgctcttcaagcaccgattcaccagtgtggtatacttctacatcactcgatcgtaacacgttggaaaacatgctagtgagagtcctgcttgtgaaagacatctatgataaggataactacgaactggacgaagacacagattag

SEQ ID NO: 329633 - DNA, 4128 bp, Artificial Sequence
  derived and/or modified sequence
atggacacgtcatccgtcggaggtcttgagctcacggaccagaccccagtccttctggggagcactgcaatggccaccagtctcaccaacgtcggtaactcgttttcaggcccagctaatccgctggtgtccaggtctaataagttccagaattccagcgtggaggacgatgatgatgtagtgttcatagaacccgtgcagccaccccctccatcagtgccagtggtggccgaccagcgtaccattactttcacgtcttccaagaacgaggagcttcagggtaatgacagcaaaataacgcccagctctaaggagttagccagtcagaaaggctcggtgtcagagaccatagtgatcgatgatgaggaggacatggagacgaaccaggggcaggaaaagaattcgtccaacttcatagagcgccgtccccccgagacaaagaacagaacgaacgacgtagacttcagtacatcgtccttttcccgttctaaggtgaatgcaggcatggggaactctggcatcaccacggagcctgattctgaaattcagatcgcgaacgtgaccaccctggagactggtgtttcctctgttaatgacggtcagctcgaaaatacagacggcagagatatgaatctcatgattacgcatgtgacctctctccaaaatacaaatctgggcgatgtgagtaatgggctgcagtcttccaatttcggggttaatattcagacttacacgccaagcttgacttctcaaacgaagacaggagtcgggccattcaatcccggccggatgaatgttgcaggagatgtgttccagaatggcgaatctgctacccaccataaccccgattcctggatcagccagtccgctagctttccaagaaatcagaagcagccgggggtcgactcactcagtcctgtcgcatcactgcctaaacagatattccagcccagtgtgcagcagcagcccaccaaaccggtgaaggtgacgtgtgctaactgcaagaagccactacaaaaagggcagactgcctaccagcggaaaggtagcgcacatctgttttgctctacaacctgcctttcttcatttagtcataagccagctcccaagaagctctgcgtgatgtgcaaaaaggatataaccaccatgaagggcactatcgtagcccaggtggattccagcgaaagctttcaagagttctgcagcacgtcatgcctaagtttatatgaggataagcagaatcccactaaaggcgcccttaataaaagtcggtgcacaatctgtggaaaactgaccgaaattagacacgaggtttccttcaagaacatgacacataagctttgcagtgatcactgtttcaatcgataccgaatggcaaacgggctcatcatgaactgttgcgagcagtgtggggagtacctgccttccaagggggccggcaacaatgttcttgttatcgacggtcaacaaaaacggttttgttgccaaagttgtgtgtccgagtataagcaggtcggcagccaccccagctttctaaaggaagtgcgagatcacatgcaggactcgttcttaatgcagcccgaaaagtacggaaagcttaccacatgcaccggctgtcggacacagtgtcgattttttgatatgacccaatgcatcggtccaaatggatatatggagccctactgctctacagcgtgtatgaacagccacaaaacaaaatatgccaaatcccagagtctcggaattatatgccacttttgtaagagaaactccctgcctcaatatcaagccacaatgcctgacgggaagctttataacttttgtaacagcagttgcgttgccaaattccaagctctgagtatgcaatcttctccgaacggtcagttcgttgcgcctagcgatatacagctcaaatgcaactattgtaaaaactctttctgttcaaaacccgagattctggaatgggaggctagcttacaccagttctgttccaagacatgttccgatgactataaaaagctgcattgtatcgtaacatactgcgaatactgccaggaagagaaaactcttcatgagactgtcaacttcagtggcgtaaaacggccattttgtagcgaaggttgtaaactgctgtataaacaggacttcgcaagacgactcggcctgagatgcgtaacctgcaattactgctcccagctgtgcaagaaaggtgctacaaaagagttggacggcgtggtgcgtgacttttgcagcgaagattgctgcaaaaaatttcaggattggtactataaagcatgcgattgttgcaaaagccagggcacactgaaagaacgcgtccagtggcggggagagatgaaacacttttgcgaccaacattgcctgctgagattttactgccagcagaatgaaccgaatatgactacccagaaggggccggaaaatctacattacgatcagggctgtcagacctcacgtacaaagatgactggctctgccccccccccctctcccacccccaacaaagaaatgaagaacaaagccgtactgtgcaagcctctgactatgactaaggcaacttactgcaagccacacatgcagactaagtcttgccagaccgacgatacctggcgtacagagtatgtccctgttccaatcccggtgcccgtgtacattcccgtgcccatgcacatgtacagtcagaacatcccagttcccactacagtgcctgtgccagtccccgtccccgtatttctccccgctcccttggacagttctgagaaaattcccgcagcgatagaggaactgaaatccaaggtgagtagcgatgccttggatactgaattattgaccatgactgacatgatgtctgaagacgaagggaaaacggagaccaccaacatcaactctgtgatcatcgaaactgacattattggttctgatctactgaaaaatagtgaccctgagacacagagttctatgccagacgtaccttacgaacccgatctcgacattgaaattgatttcccaagagccgccgaggaactggacatggagaatgaatttctcctgccgccggtgttcggagaagaatatgaggagcaacctaggcccagatcaaagaaaaaaggagcgaagcgaaaggcggtgtctggctaccagtcacatgatgactcctccgataatagtgagtgcagttttccctttaaatacacatacggcgttaacgcttggaagcactgggttaaaaccaggcagctcgacgaagacttgttggtgctcgatgagctgaaatcctctaagtctgttaagcttaaggaggatttgctttcacacacaactgctgagctgaactacggcctggcacacttcgtaaacgagatacggaggccaaatggtgagaattacgcccctgactccatctattatctctgtttgggtattcaggaatatctgtgtggctcaaacaggaaggataacatctttatagaccccgggtaccaaacattcgagcaggagctgaacaaaatcttacgctcctggcagccttctattctgcctgatggctcaattttcagcagagttgaagaagattatctgtggcgtattaaacagctggggagtcattcacctgtcgcccttctcaataccttattttactttaatacgaagtactttggcctgaaaaccgtggagcagcatctgagactgtcattcgggacagtgtttcggcactggaagaagaacccactcaccatggaaaacaaggcctgtctgagataccaggtatcctccttgtgtggaaccgataatgaggacaagattaccactgggaagagaaaacatgaagatgacgagccggtttttgagcagatcgagaataccgcaaatccttctagatgtcccgtgaaaatgtttgagtgctatctttctaagagccctcagaacctgaatcaaagaatggatgttttctacctgcaaccagaatgctccagctctactgatagccctgtctggtatacttctaccagcctcgaccgcaatactctggagaacatgttggtgcgagtactcctggtgaaagacatctacgataaagacaattatgagttggacgaggataccgactag

SEQ ID NO: 329634 - DNA, 4134 bp, Artificial Sequence
  derived and/or modified sequence
atggatacttcatctgtgggcggcttagagctcacggaccagacccccgtgctgctggggtccactgccatggctacttcgctaacaaacgtgggtaactccttcagtggccctgccaatcccttggtgagcaggagcaataaatttcagaacagttcggttgaagatgatgatgacgtggtgttcatcgaacccgttcagccacccccaccttccgtgcctgtggtggcggatcagcgaactataaccttcacgagttccaagaacgaggagctgcagggaaacgacagcaaaattacaccaagctccaaagagctcgcctcacaaaagggctcggtctcagagaccatcgtgattgatgacgaggaggacatggaaacgaaccaggggcaagagaaaaattcaagcaattttatcgaacggcgccccccggaaaccaagaacagaactaatgacgtagatttctccacttccagctttagcagatccaaggtcaacgccgggatggggaactccggtataacaactgagccagattctgagattcagattgcgaacgtgactaccctggagactggggtatctagtgtcaatgacggccagttagaaaacactgacgggcgagacatgaatttaatgattacccacgtcacttcactacaaaatactaacttgggcgacgtttccaatggcctgcagtccagtaatttcggcgtgaacattcagacttatactccctctcttacaagccagacaaaaactggcgtggggcccttcaaccctgggcggatgaatgtggctggtgacgtcttccagaatggcgaaagcgctacgcatcacaacccggactcttggatttcacagtctgcctcatttccacgcaatcagaaacagccaggcgtagactccttgtcccccgtggcctctctcccaaaacagatatttcagccttcggttcagcaacagccaactaaacccgtgaaggtcacttgtgcaaactgtaagaaaccgcttcagaaaggacagactgcctatcagaggaaaggtagtgcacatctattctgctctaccacatgtctttcaagtttttcacacaagccagcccctaagaagttgtgtgtgatgtgcaaaaaagatatcaccacaatgaaaggtaccatagtggcacaggttgattcttctgaaagtttccaggagttctgctctacatcttgcctatctttatatgaggataagcagaatccaacaaagggcgccctgaacaaaagcaggtgcacaatctgcggtaaacttactgagatcagacacgaggtgtctttcaagaacatgacacataagctttgttccgatcactgttttaaccgctatcgaatggccaacggattaataatgaactgctgtgaacaatgtggggaatacctgccgtcaaaaggggcgggaaataatgtcctggtgatcgacgggcagcagaaaaggttctgttgccagagctgcgtgagcgaatacaagcaggtgggatcccacccatcattccttaaggaagtgagagaccatatgcaagactcatttctcatgcagcccgaaaagtatggaaaactcactacttgtactggatgtcgaacacagtgtcgcttcttcgatatgactcaatgtataggtccaaacggctatatggagccatattgctccaccgcctgtatgaactcccacaagacaaagtatgccaagagtcagtcactagggattatttgtcacttttgcaagcggaattccctgccacagtatcaggcaaccatgcctgacgggaagctctacaatttctgcaactcttcctgtgtggcaaaattccaggccctgagcatgcagtcctcacctaacggacagttcgtggcaccttctgatatacagctcaagtgtaactactgtaagaacagcttttgcagcaagcctgagatactagagtgggagaataaggttcatcagttttgtagcaagacctgctccgacgattataaaaagctgcactgtatcgtcacctattgtgagtattgccaagaggagaagacactgcacgagaccgtgaacttctccggcgtaaaacgtcctttctgtagtgagggatgtaaactgctgtacaagcaggacttcgctcgaagactggggctgcgatgcgtaacctgtaattactgctctcagctgtgcaagaaaggagcaaccaaggagctcgacggtgtggtgagggacttctgcagtgaagactgctgtaaaaaatttcaggactggtattataaggctgcacggtgtgactgctgtaaaagtcagggcacactaaaagagcgggttcagtggagaggtgagatgaagcatttttgcgaccagcactgcctcttacgcttctattgccaacagaacgagccgaatatgactactcaaaagggcccagaaaatctgcattacgaccagggatgtcagacctcccgaaccaaaatgaccgggagtgcccctcctcccagccctacccctaacaaggagatgaaaaacaaagctgttctgtgcaagcccctgacaatgaccaaagccacctactgtaagccacacatgcagacaaagagctgccagaccgatgatacttggcgcacagaatatgtgcctgtccccatcccagtcccagtgtacatacctgtccctatgcatatgtatagccagaacattcctgtccctaccacggtgcccgtgccggttccggtaccggtatttttgcccgccccgctcgacagctccgagaagattcctgccgccatagaagagctcaaatcaaaagtttcttccgatgccctggatactgagctcttgacaatgacagacatgatgtccgaggacgagggcaaaaccgagacgactaacattaacagtgtaattatcgagactgatatcatcggaagtgatttactgaagaactctgatcctgaaacacagtcatcgatgcccgacgtgccctacgaaccagatctagacatcgagatcgactttccccgcgccgccgaagagcttgatatggagaatgaattcttattgccacctgtgtttggggaagagtatgaggaacagcccaggccaagaagtaagaagaagggtgccaaacgcaaggccgtgtctggttaccagagtcacgacgatagtagcgacaatagtgagtgtagcttcccttttaagtacacatatggagtcaacgcatggaagcattgggtgaaaactcgccagctagatgaggatcttctggtcctcgacgaactcaagtcaagtaaatctgtaaaactgaaggaagaccttttgagtcacaccactgcggagttaaactacggcctggcccattttgtgaatgagatccggagaccaaacggagaaaattacgcccccgactccatatactatctgtgtctgggtatccaggagtatctgtgcggaagcaaccggaaggacaacatcttcatagacccggggtaccaaacgtttgagcaggagttaaacaaaatactccgatcctggcagccatcgatcttaccagacgggtccatcttttcacgagtagaggaagactacctgtggcgaatcaagcagttaggcagtcacagcccagtggctctgctgaacactttgttctattttaacactaaatattttgggctcaagacagtcgaacagcacctccgcctgagcttcggcacagtgttcaggcactggaagaagaaccccctgaccatggagaacaaggcttgccttagataccaggtgtcttctctatgtgggacggacaatgaggacaaaatcacgactgggaagagaaagcacgaagacgacgagccagtcttcgagcagattgaaaatactgctaatcccagtcgttgtcccgtgaagatgttcgagtgttacttatctaaatctccccagaacctcaatcagcggatggatgtgttttacctccagcctgagtgtagctcctcaacagatagtcccgtgtggtacacaagcacctccctcgatagaaataccctcgagaacatgctcgtccgagtcctcctcgtgaaagacatatacgataaagacaactacgagctcgacgaagataccgattag

SEQ ID NO: 329635 - DNA, 4134 bp, Artificial Sequence
  derived and/or modified sequence
atggacaccagctctgtgggcggcctggagctgacagaccagacccctgtgctgctgggcagcacagccatggccaccagcctgaccaacgtgggcaacagcttcagcggccctgccaaccccctggtgagccgcagcaacaagttccagaacagctctgtggaggatgatgatgatgtggtgttcatcgagcctgtgcagcccccaccacccagcgtgcctgtggtggccgaccagaggaccatcaccttcaccagcagcaagaatgaggagctgcagggcaatgacagcaagatcacccccagcagcaaggagctggccagccagaagggctctgtgtctgagaccatcgtgattgatgatgaggaggacatggagaccaaccagggccaggagaagaacagcagcaacttcattgaaagaagacctcctgagaccaagaacagaacaaatgatgtggacttcagcaccagcagcttcagccgcagcaaggtgaatgccggcatgggcaacagcggcatcaccacagagccagacagcgagatccagatcgccaacgtgaccaccctggagaccggggtgtcctctgtgaatgatggccagctggagaacacagatggccgggacatgaacctgatgatcacccacgtgaccagcctgcagaacaccaacctgggagatgtgtccaatggcctgcagagcagcaactttggagtgaacatccagacctacacccccagcctgaccagccagaccaagacaggagtgggccccttcaaccctggccgcatgaatgtggccggagatgtgttccagaatggagagagcgccacccaccacaacccagacagctggatcagccagagcgccagcttccccaggaaccagaagcagcccggggtggacagcctgagccctgtggccagcctgcccaagcagatcttccagcccagcgtgcagcagcagcccaccaagcctgtgaaggtgacctgtgccaactgcaagaagcccctgcagaagggccagacagcctaccagaggaagggcagcgcccacctgttctgcagcaccacctgcctgagcagcttcagccacaagccagcccccaagaagctgtgtgtgatgtgcaagaaggacatcaccaccatgaagggcaccatcgtggcccaggtggacagcagcgagagcttccaggagttctgcagcaccagctgcctgagcctgtatgaggacaagcagaaccccaccaagggggccctgaacaagagccgctgcaccatctgtgggaagctgacagagatcagacatgaggtgtccttcaagaacatgacccacaagctgtgcagcgaccactgcttcaaccgctacaggatggccaacggcctcatcatgaactgctgtgagcagtgtggggagtacctgcccagcaaaggagctggcaacaacgtgctggtgattgatggccagcagaagcgcttctgctgccagagctgtgtgtctgagtacaagcaggtgggcagccaccccagcttcctgaaggaggtgcgggaccacatgcaggacagcttcctgatgcagcctgagaagtatggcaagctgaccacctgcaccggctgcaggacccagtgccgcttctttgacatgacccagtgcatcggccccaacggctacatggagccctactgcagcacagcctgcatgaacagccacaagaccaagtatgccaagagccagagcctgggcatcatctgccacttctgcaagaggaacagcctgccccagtaccaggccaccatgccagatggcaagctgtacaacttctgcaacagcagctgtgtggccaagttccaggccctgtccatgcagagcagccccaacggccagtttgtggcccccagcgacatccagctgaagtgcaactactgcaagaacagcttctgcagcaagccagagatcctggagtgggagaacaaggtgcaccagttctgcagcaagacctgcagtgatgactacaagaagctgcactgcatcgtgacctactgtgagtactgccaggaggagaagaccctgcatgaaacagtgaacttctctggagtgaagaggcccttctgcagcgagggctgcaagctgctgtacaagcaggactttgcccggcggctgggcctgcgctgtgtgacctgcaactactgcagccagctgtgcaagaagggggccaccaaggagctggatggagtggtgcgggacttctgcagcgaggactgctgcaagaagttccaggactggtactacaaggccgcccgctgtgactgctgcaagagccagggcaccctgaaggagcgggtgcagtggagaggagagatgaagcacttctgtgaccagcactgcctgctgcgcttctactgccagcagaatgagcccaacatgaccacccagaagggccctgagaacctgcactatgaccagggctgccagaccagcaggaccaagatgactggaagtgcccccccacccagccccacccccaacaaggagatgaagaacaaggctgtgctgtgcaagcccctgaccatgaccaaggccacctactgcaagccccacatgcagaccaagagctgccagacagatgacacctggaggacagaatatgtgcctgtgcccatccctgtgcctgtgtacatccctgtgcccatgcacatgtacagccagaacatccctgtgcccaccaccgtgcctgtgcctgtgcctgtgcctgtgttcctgcctgcccccctggacagcagcgagaagatcccagctgccatcgaggagctgaagagcaaggtgtccagtgatgccctggacacagagctgctgaccatgacagacatgatgtctgaagatgagggcaagacagagaccaccaacatcaacagcgtcatcatcgagacagacatcattggaagtgacctgctgaagaacagcgaccctgagacccagagctccatgccagatgtgccctatgagccagacctggacatcgagattgacttccccagggctgctgaggagctggacatggagaatgagttcctgctgccccctgtgtttggagaggagtatgaggagcagccccggcccaggagcaagaagaagggggccaagaggaaggctgtgtctggctaccagagccatgatgacagcagtgacaacagtgaatgttccttccccttcaagtacacctacggcgtgaatgcctggaagcactgggtgaagacccggcagctggatgaggacctgctggtgctggatgagctgaagagcagcaagtctgtgaagctgaaggaggacctgctgagccacaccacagctgagctgaactacggcctggcccactttgtgaatgagatccggcggcccaatggagaaaattatgccccagacagcatctactacctgtgcctgggcatccaggagtacctgtgtggcagcaacaggaaggacaacatcttcatcgaccccggctaccagacctttgagcaggagctgaacaagatcctgcgctcctggcagcccagcatcctgcctgatggcagcatcttcagccgggtggaggaggactacctgtggaggatcaagcagctgggcagccacagccctgtggccctgctgaacaccctcttctacttcaacaccaagtacttcggcctgaagacagtggagcagcacctgcggctgagctttggcaccgtcttccgccactggaagaagaaccccctgaccatggagaacaaggcctgcctgcgctaccaggtgagcagcctgtgtggcacagacaatgaagacaagatcaccaccgggaagaggaagcatgaagatgatgagcctgtgtttgagcagatcgagaacacagccaaccccagccgctgccctgtgaagatgtttgagtgctacctgagcaagagcccccagaacctgaaccagaggatggatgtgttctacctgcagcctgagtgcagcagcagcacagacagccctgtgtggtacaccagcaccagcctggacaggaacaccctggagaacatgctggtgcgggtgctgctggtgaaggacatctatgacaaggacaactatgagctggatgaggacacagactag

SEQ ID NO: 329636 - DNA, 4128 bp, Artificial Sequence
  derived and/or modified sequence
atggacaccagctctgtgggcggcctggagctgacagaccagacccctgtgctgctgggcagcacagccatggccaccagcctgaccaacgtgggcaacagcttcagcggccctgccaaccccctggtgagccgcagcaacaagttccagaacagctctgtggaggatgatgatgatgtggtgttcatcgagcctgtgcagcccccaccacccagcgtgcctgtggtggccgaccagaggaccatcaccttcaccagcagcaagaatgaggagctgcagggcaatgacagcaagatcacccccagcagcaaggagctggccagccagaagggctctgtgtctgagaccatcgtgattgatgatgaggaggacatggagaccaaccagggccaggagaagaacagcagcaacttcattgaaagaagacctcctgagaccaagaacagaacaaatgatgtggacttcagcaccagcagcttcagccgcagcaaggtgaatgccggcatgggcaacagcggcatcaccacagagccagacagcgagatccagatcgccaacgtgaccaccctggagaccggggtgtcctctgtgaatgatggccagctggagaacacagatggccgggacatgaacctgatgatcacccacgtgaccagcctgcagaacaccaacctgggagatgtgtccaatggcctgcagagcagcaactttggagtgaacatccagacctacacccccagcctgaccagccagaccaagacaggagtgggccccttcaaccctggccgcatgaatgtggccggagatgtgttccagaatggagagagcgccacccaccacaacccagacagctggatcagccagagcgccagcttccccaggaaccagaagcagcccggggtggacagcctgagccctgtggccagcctgcccaagcagatcttccagcccagcgtgcagcagcagcccaccaagcctgtgaaggtgacctgtgccaactgcaagaagcccctgcagaagggccagacagcctaccagaggaagggcagcgcccacctgttctgcagcaccacctgcctgagcagcttcagccacaagccagcccccaagaagctgtgtgtgatgtgcaagaaggacatcaccaccatgaagggcaccatcgtggcccaggtggacagcagcgagagcttccaggagttctgcagcaccagctgcctgagcctgtatgaggacaagcagaaccccaccaagggggccctgaacaagagccgctgcaccatctgtgggaagctgacagagatcagacatgaggtgtccttcaagaacatgacccacaagctgtgcagcgaccactgcttcaaccgctacaggatggccaacggcctcatcatgaactgctgtgagcagtgtggggagtacctgcccagcaaaggagctggcaacaacgtgctggtgattgatggccagcagaagcgcttctgctgccagagctgtgtgtctgagtacaagcaggtgggcagccaccccagcttcctgaaggaggtgcgggaccacatgcaggacagcttcctgatgcagcctgagaagtatggcaagctgaccacctgcaccggctgcaggacccagtgccgcttctttgacatgacccagtgcatcggccccaacggctacatggagccctactgcagcacagcctgcatgaacagccacaagaccaagtatgccaagagccagagcctgggcatcatctgccacttctgcaagaggaacagcctgccccagtaccaggccaccatgccagatggcaagctgtacaacttctgcaacagcagctgtgtggccaagttccaggccctgtccatgcagagcagccccaacggccagtttgtggcccccagcgacatccagctgaagtgcaactactgcaagaacagcttctgcagcaagccagagatcctggagtgggaggccagcctgcaccagttctgcagcaagacctgcagtgatgactacaagaagctgcactgcatcgtgacctactgtgagtactgccaggaggagaagaccctgcatgaaacagtgaacttctctggagtgaagaggcccttctgcagcgagggctgcaagctgctgtacaagcaggactttgcccggcggctgggcctgcgctgtgtgacctgcaactactgcagccagctgtgcaagaagggggccaccaaggagctggatggagtggtgcgggacttctgcagcgaggactgctgcaagaagttccaggactggtactacaaggcctgtgactgctgcaagagccagggcaccctgaaggagcgggtgcagtggagaggagagatgaagcacttctgtgaccagcactgcctgctgcgcttctactgccagcagaatgagcccaacatgaccacccagaagggccctgagaacctgcactatgaccagggctgccagaccagcaggaccaagatgactggaagtgcccccccacccagccccacccccaacaaggagatgaagaacaaggctgtgctgtgcaagcccctgaccatgaccaaggccacctactgcaagccccacatgcagaccaagagctgccagacagatgacacctggaggacagaatatgtgcctgtgcccatccctgtgcctgtgtacatccctgtgcccatgcacatgtacagccagaacatccctgtgcccaccaccgtgcctgtgcctgtgcctgtgcctgtgttcctgcctgcccccctggacagcagcgagaagatcccagctgccatcgaggagctgaagagcaaggtgtccagtgatgccctggacacagagctgctgaccatgacagacatgatgtctgaagatgagggcaagacagagaccaccaacatcaacagcgtcatcatcgagacagacatcattggaagtgacctgctgaagaacagcgaccctgagacccagagctccatgccagatgtgccctatgagccagacctggacatcgagattgacttccccagggctgctgaggagctggacatggagaatgagttcctgctgccccctgtgtttggagaggagtatgaggagcagccccggcccaggagcaagaagaagggggccaagaggaaggctgtgtctggctaccagagccatgatgacagcagtgacaacagtgaatgttccttccccttcaagtacacctacggcgtgaatgcctggaagcactgggtgaagacccggcagctggatgaggacctgctggtgctggatgagctgaagagcagcaagtctgtgaagctgaaggaggacctgctgagccacaccacagctgagctgaactacggcctggcccactttgtgaatgagatccggcggcccaatggagaaaattatgccccagacagcatctactacctgtgcctgggcatccaggagtacctgtgtggcagcaacaggaaggacaacatcttcatcgaccccggctaccagacctttgagcaggagctgaacaagatcctgcgctcctggcagcccagcatcctgcctgatggcagcatcttcagccgggtggaggaggactacctgtggaggatcaagcagctgggcagccacagccctgtggccctgctgaacaccctcttctacttcaacaccaagtacttcggcctgaagacagtggagcagcacctgcggctgagctttggcaccgtcttccgccactggaagaagaaccccctgaccatggagaacaaggcctgcctgcgctaccaggtgagcagcctgtgtggcacagacaatgaagacaagatcaccaccgggaagaggaagcatgaagatgatgagcctgtgtttgagcagatcgagaacacagccaaccccagccgctgccctgtgaagatgtttgagtgctacctgagcaagagcccccagaacctgaaccagaggatggatgtgttctacctgcagcctgagtgcagcagcagcacagacagccctgtgtggtacaccagcaccagcctggacaggaacaccctggagaacatgctggtgcgggtgctgctggtgaaggacatctatgacaaggacaactatgagctggatgaggacacagactag

SEQ ID NO: 329637 - DNA, 4134 bp, Artificial Sequence
  derived and/or modified sequence
atggacaccagcagcgtgggcggcctggagctgaccgaccagacccccgtccttttggggagcactgctatggccacgtccttgactaacgtggggaattcctttagcggtccggcaaatccacttgtaagccgatccaacaaattccagaactcttcagttgaagatgacgacgatgtggtctttattgagccagtgcagccaccccctccatcagtcccagtggtcgcagatcagcgaaccattaccttcacatccagtaaaaatgaagaactgcagggtaacgacagtaaaattacaccgtcgtcaaaagagctggcatcgcagaaagggtccgtcagcgaaactattgtgatcgacgacgaagaggacatggagacgaatcaggggcaggagaagaattcctctaatttcatcgaacggagaccgcccgaaaccaagaataggaccaatgacgtggactttagtacttcctcgttcagtcggtcgaaggtgaacgctggcatggggaattctgggatcaccaccgagcctgattccgaaattcagattgcgaatgtgactactctagagactggcgtcagtagcgtgaatgatgggcagttggagaacacagatggaagagatatgaatcttatgattacgcacgtcacctccttgcagaatacaaatctcggtgatgtgtcaaacggactgcagtccagcaacttcggtgtgaacattcaaacctataccccaagccttactagccagactaagaccggcgttggacctttcaatcccggccgcatgaacgtggctggcgacgtgttccagaacggggagtctgcgacgcatcacaaccctgactcttggataagtcagagcgctagtttcccaaggaatcagaaacagcccggtgtggatagcttgtccccagtggcaagtctgccgaaacaaatattccagccttctgtccagcaacaacccacaaaaccagtcaaagtaacctgcgccaactgcaaaaaaccactccagaagggtcaaaccgcctaccagaggaagggttcagcccacttgttttgctctaccacatgtctgagctcatttagtcacaaacccgcccccaaaaagctatgtgtgatgtgcaagaaggacattacaacaatgaaggggactatcgtagcccaggtggatagttcagaatcctttcaggagttctgcagcacctcctgtcttagtctgtacgaagacaagcaaaatccaaccaaaggggctttgaacaagagtaggtgcactatatgtgggaagttgactgagatcaggcatgaggtgtcattcaaaaacatgactcataaactgtgctctgaccattgtttcaaccggtataggatggccaatggcctaattatgaactgctgtgagcagtgcggagaatacctgccctccaaaggtgccggtaacaatgtgttggtaatcgacggccagcagaagcggttctgttgccagtcatgcgtctctgaatataaacaggtaggatcccatccttcattcttgaaagaggtgcgtgatcatatgcaggatagcttcctcatgcaaccagagaagtatggaaagctgaccacttgcacaggctgcaggacgcaatgcaggttttttgacatgacccagtgtatcgggcccaacggatatatggagccctattgctccacagcctgtatgaactctcacaaaacaaagtacgccaaatcccagtccttgggcataatctgccacttctgcaagcgcaatagcttgccacagtaccaggcgacaatgcccgacgggaagctctataatttttgcaattcctcctgtgttgctaaatttcaggccttgtccatgcagagtagccccaacggccaatttgtggctccaagtgacattcagctgaaatgcaactactgcaagaatagtttttgcagtaagccggagatcctagagtgggaaaacaaagtacaccaattttgtagtaagacgtgctctgacgactacaagaagctgcattgtatcgtgacttactgcgagtactgccaggaggaaaagaccctacatgagacggtcaacttctctggcgtgaaacgacccttctgtagtgagggctgtaaattgctgtacaagcaagattttgcgcgccgcttaggcctgagatgcgtgacttgtaactactgttcccagctttgcaagaaaggtgccacgaaagagcttgatggtgtggtgagggatttttgttcagaggactgttgcaagaagtttcaggattggtactacaaggctgcccgctgcgattgctgcaagagtcagggtactttgaaggagcgggtccagtggagaggggagatgaaacacttctgtgaccaacactgtctgttgaggttctattgtcagcaaaacgagcctaatatgaccactcagaagggaccggagaacttgcattatgaccagggctgtcagaccagtaggacgaaaatgactgggtcggccccacctccctcgcctactcccaataaggagatgaagaacaaggcagttctgtgtaagcctttaactatgacaaaggcgacttattgtaagccacacatgcaaactaagagttgtcagactgatgacacgtggcgaaccgaatatgtgccggtccccattcccgtgccagtgtacataccagtgcccatgcacatgtacagccaaaatattcccgtcccaactacagtgccagtcccagtgccggtccccgtgttccttccagcccctctggactcaagcgagaagattcctgccgccattgaggagctgaagtctaaagtctcttccgacgccctggatacagagctccttaccatgacagacatgatgagcgaggacgaaggtaagacagaaaccacaaatattaattccgtcataatcgagactgatatcatcggcagtgatctgcttaaaaactctgaccccgagacccaatcaagcatgcctgacgtgccgtacgaaccagatcttgatatcgagatcgactttcccagggccgccgaggagctggacatggaaaacgaattcctcctgcctcccgtctttggtgaggaatatgaggaacagccacgaccccgaagtaagaaaaaaggtgctaagcggaaagcagtcagcggctaccagagccatgatgactcttccgataacagcgagtgttcttttccttttaaatatacatacggggtcaacgcttggaaacactgggtcaaaacacggcagctcgatgaagatttgctggtgctggacgagttaaaaagttccaagtcggtgaagctgaaagaggacctgctttctcataccaccgcagagctcaactatggtctggctcatttcgtcaacgaaattcgacgccctaatggagaaaactatgcccccgactccatatactatctttgtcttggaatccaggaatatttatgtggcagtaatcgtaaagataacatcttcattgatcccggctatcagaccttcgagcaggaactgaataaaattctccggtcatggcagcctagcatactgcctgacggtagtatattcagccgagtggaagaagactatctgtggcgaataaagcagctggggtcccactcccccgtcgcgctgcttaacactctgttctattttaacactaagtacttcgggctgaaaactgttgagcagcatctgcgactctcctttggcacagttttccggcactggaagaaaaatccactgaccatggaaaataaggcttgcctcagatatcaggtgagtagcttgtgcggcacggacaacgaagataagattactacgggtaagcgaaaacatgaagatgacgagcctgtctttgaacaaatcgaaaacacggctaatccgtccaggtgcccggtcaaaatgttcgaatgttacttgtcaaaatccccgcagaatctgaaccagcgaatggacgttttctacctgcaaccggagtgtagttccagcacagacagtcccgtctggtacacctccacttcactcgataggaacaccctcgaaaacatgctcgtacgtgtgctcctggtcaaagacatatatgacaaagacaattacgagctcgatgaggacaccgactag

SEQ ID NO: 329638 - DNA, 4128 bp, Artificial Sequence
  derived and/or modified sequence
atggacaccagcagcgtgggcggcctggagctgaccgaccagacccccgtcctcctgggatccacagctatggcaacttcactcactaacgtgggtaatagtttcagtggaccagcaaaccccctggtctctagatcgaacaagtttcagaattctagcgtcgaagatgatgatgacgtagtcttcattgaacctgtgcagcctccccccccgagcgtcccggtagtcgcagatcagagaacaatcactttcacttcttccaagaatgaagagttgcagggcaacgactctaaaataactccttcatctaaggaactggcgtcacaaaaagggagcgtcagcgagactatagtcatcgatgacgaggaagacatggaaactaatcagggtcaagagaaaaattctagcaatttcatcgaaaggcggccgcccgagacaaagaatcgcacaaatgatgttgatttttcaactagcagtttcagcagaagcaaggtgaatgcaggaatgggaaattccggtatcactactgagccagattcggagattcagattgccaacgtcaccactctggaaaccggtgtgagcagcgtgaacgacgggcagctggaaaacacggatgggcgggatatgaatttaatgataacgcatgttacgtcactgcagaacacaaacctgggggatgttagcaatggactgcagagttccaatttcggcgtgaacatccagacatatacaccctctttgacaagtcagaccaaaaccggcgtgggtccttttaatcctggtcgcatgaacgtggctggagatgttttccagaacggagagagcgcaacacaccacaatcctgatagttggatctcacagtcagcctcctttccaagaaaccagaaacaaccaggcgtcgattcactgtccccggtcgcctctctccctaagcagatcttccagccatcagtgcaacaacaacccacaaagcctgttaaagtaacatgcgccaactgtaagaaacccctccagaaaggtcaaacagcctatcagcgaaaaggtagcgcacatcttttttgcagcaccacttgcttatccagcttttctcacaaacctgcacccaagaagttatgcgtcatgtgcaagaaagacattacaacaatgaaaggcactattgtggcccaggtggacagtagcgagtccttccaggagttttgctcaacatcctgcctgtccttatatgaagacaagcaaaacccaacaaaaggagcacttaacaaaagtcggtgtactatttgcggtaagttaaccgagatccggcacgaggtatcttttaagaatatgacccataagctgtgctcagatcactgttttaacaggtataggatggcaaacggcctgataatgaactgttgcgaacagtgcggtgaatatcttccttcgaaaggcgccggaaacaatgttctggttattgatggacagcagaagcgattctgctgccagtcctgcgtatctgaatacaagcaggtggggagtcacccctcctttctgaaggaagtacgtgaccatatgcaggatagctttttaatgcagcctgaaaaatacggaaagctcactacctgcactggctgtagaacacagtgccgcttctttgacatgacccagtgcatcggacccaacgggtatatggaaccttactgttctacggcctgcatgaacagccacaagactaagtatgctaaatcacagagcctgggaatcatctgtcacttttgtaaaaggaactctctcccgcaataccaggccacaatgccagacgggaagctgtacaatttctgtaactcctcctgcgttgccaagttccaggctttgtctatgcaatccagcccaaacggacagttcgtggcaccttctgatatacaactcaagtgcaattattgcaagaattcattctgttctaagccggagattttagaatgggaagcttcactgcatcaattttgctctaagacttgctccgacgattataaaaaactccactgcatcgttacatattgcgaatattgccaggaggaaaagaccctacatgagacggtgaacttttccggagtcaaacgaccattttgtagcgaaggatgtaaattactttacaagcaggactttgcaaggcgcctcgggctgcggtgcgtaacgtgtaactactgttcacagctgtgcaagaaaggtgccactaaggagctggacggggtggtccgcgatttctgttctgaagactgctgcaagaagttccaggactggtattacaaagcctgcgactgctgtaaaagccagggcaccctgaaagagagagttcaatggcggggggagatgaagcatttctgcgatcagcactgccttttacgcttttactgccagcaaaacgagcccaatatgactacacagaaggggccagagaatttgcactatgatcagggatgccaaacctcccggacgaaaatgaccgggtctgctccgcccccaagccccacaccaaataaagagatgaaaaataaagccgtgctatgcaagcccttaacaatgaccaaagccacatactgcaaaccccacatgcagaccaagtcttgtcagacagatgatacttggagaactgagtacgttcccgtccccattccagtgcctgtttacataccagtgcctatgcacatgtattctcagaacatcccagtacccactacagtgcccgtaccagtgcccgtgccagtgttcctgcctgcccccctagacagcagcgagaagattcccgctgccatcgaggagctcaagtctaaggttagcagcgatgcacttgacaccgagttgttaaccatgacagacatgatgagcgaagatgagggaaaaacagagacaacgaacatcaatagtgtgataatcgaaaccgatatcatcggttccgatttattgaagaattctgaccccgaaacccagtcaagcatgccggatgtgccttacgagccagatcttgacatcgagatcgactttcctcgtgctgccgaggagcttgatatggaaaacgaattcctcctgccgcctgtgttcggagaggagtacgaagaacagcctaggcctaggagcaagaagaagggtgctaagcggaaagcggtttctggctatcagtcacacgatgactcatctgacaatagcgagtgttctttccctttcaagtatacctacggtgtgaacgcttggaagcactgggtgaaaacacggcaactggacgaggatctcctggtcctggatgaactgaagtctagcaaatcggtgaagctgaaagaagacctgctcagtcatacaacagcggagctaaattatggactcgcccatttcgtgaatgagatcagacgcccaaacggcgagaactatgccccagactcaatttattatctgtgtctgggcatccaggagtacctctgtggctccaaccggaaagataacatctttatagaccctgggtatcagacatttgagcaggagctaaataagatccttagatcctggcaaccttccatccttccagatggctcaattttctcccgggtggaggaagactatctgtggcgaataaaacaactcggcagtcacagtcctgtggctttgctaaatacacttttttatttcaacacgaagtacttcggactcaaaacggtggagcagcatttgcgcctttcctttggcaccgttttccgacactggaaaaagaatccactgaccatggagaataaggcttgcctgaggtaccaggtttccagtttgtgtgggactgataacgaggacaaaattacgaccggaaagcgcaaacatgaggacgacgaacctgtgtttgagcaaatcgagaatactgccaacccatctcgttgtcctgtgaagatgtttgaatgctatttatccaagtcaccccagaatctgaatcagagaatggatgtgttctacctgcagcccgaatgctcgtcgtccaccgattcgcccgtatggtatacctcaactagtctcgaccggaacactctggaaaatatgttagtccgggtgttactcgtcaaggacatttatgataaggacaactacgagttggatgaagatacagactag

SEQ ID NO: 329639 - DNA, 4128 bp, Artificial Sequence
  derived and/or modified sequence
atggacaccagcagcgtgggcggcctggagctgaccgaccagaccccagtgctgctcggcagtactgccatggccaccagcctcaccaacgtagggaactcttttagtggaccagccaatcctctggttagtcggagcaataagttccagaacagcagcgtcgaggatgatgacgatgtggtttttatagaaccagtccaaccgccccctcccagcgtgcccgtggtagctgaccagaggacaattaccttcactagtagtaaaaacgaggaactgcagggtaatgactccaaaatcactccttcctcaaaagagttggcatcacagaaaggcagtgtgagtgagactatcgtcattgacgacgaagaggatatggagaccaaccagggccaggaaaagaactcctcaaacttcattgagaggcgtccccccgaaacaaagaatcgtacaaacgacgtggatttctccacctctagcttttccaggtcaaaggtaaatgcaggaatgggcaacagtggcataactactgagccagatagtgaaatccagatcgccaacgtgaccactctcgaaacaggggtgagcagcgtgaatgacggtcagctggaaaacaccgatggaagagatatgaacctgatgatcactcacgtgaccagtcttcaaaatacaaacttgggcgatgtgtccaacggcctgcagtctagcaactttggggtgaacattcagacatatacaccctccctaacctctcagaccaagacaggcgttggcccattcaatcccggacgcatgaatgtggccggggacgtctttcagaacggggaaagtgccacacaccataatccagattcttggattagccagagcgcttcatttcccaggaaccagaaacaacctggagtcgacagtttgtcccccgtggcctctctccccaagcagattttccagccgagcgtgcaacagcaaccaactaaaccagttaaggtgacctgcgcaaattgtaaaaaacccctccagaagggccagacagcctaccagagaaaggggtctgcccatctgttttgtagcactacatgcctgtcttccttcagccacaagccggctcctaaaaaactgtgtgtcatgtgtaaaaaagacattaccaccatgaaaggcacaattgtggcccaggtggattcttctgagagctttcaagaattttgtagcacatcatgcctgagcctgtatgaagacaaacagaatcctaccaagggggctctgaacaaatccaggtgcactatctgtggtaagctgaccgaaatccgacatgaggtgagttttaagaacatgacgcacaaactgtgttccgatcactgcttcaaccgatacagaatggcaaatggattgattatgaactgctgcgagcaatgcggggaatacctccctagcaaaggggccggaaataatgttctggtgattgatggtcagcaaaagcgcttttgttgccagtcatgcgtcagcgagtataaacaggtgggcagtcatccatcattcctcaaggaagtccgggatcacatgcaggactctttcctgatgcagcctgagaagtacggaaagctgacaacatgtacaggatgtcgtacacagtgccgcttcttcgatatgacccagtgtataggccccaatgggtatatggagccctactgctctacagcttgtatgaactctcataaaaccaagtacgcaaaaagccaatcccttggaataatttgccacttttgcaagaggaatagccttccacagtatcaggccacgatgcctgacggcaaactgtataatttttgtaattcatcgtgtgtagctaagtttcaagctctttcaatgcagtcttcgcccaacgggcagtttgtggccccttccgacattcagctgaagtgtaattattgtaaaaattccttctgtagtaagcccgagattctcgaatgggaggccagcctccaccagttttgcagcaaaacctgctccgatgactataagaaattgcactgcatagtcacctactgcgagtactgccaggaagagaaaaccctccatgagacagtgaatttttctggggtcaaacggcccttttgcagcgaaggatgtaagctgctgtacaaacaggatttcgccagacgcctgggtctccgttgcgtgacatgcaattactgctcacagctctgcaagaagggggctacaaaggagctggacggagtcgtgcgagacttctgttcagaagactgctgtaaaaagtttcaggactggtattacaaagcgtgtgactgctgcaagtcccaggggacccttaaagagcgggtgcagtggcgaggagagatgaagcatttctgcgatcagcattgcctgctcagattttactgtcaacagaatgaacctaatatgacgacgcaaaaaggccccgagaatctccactatgatcagggctgccagacatctcgaactaagatgacgggcagcgcacccccgccgtccccaacaccaaacaaagagatgaaaaacaaggccgtgctgtgtaaacctttaaccatgacgaaagctacatattgcaaacctcatatgcagaccaagtcatgtcagactgatgacacctggaggaccgagtacgttcccgtaccaattccagtgcccgtgtacattcctgtgcctatgcatatgtatagccagaacattcctgtcccaaccaccgtgccagttccggtgcccgttcccgtatttctgccagcacccctggactcttcagagaaaatccctgctgcaatcgaggagctgaagtccaaggtgtcgtcagacgcgctggatacagaactacttacaatgaccgacatgatgagcgaggatgaagggaagacagaaactaccaatattaactcagtgattatagagaccgacatcatcggatccgatttactgaaaaactccgaccccgaaacacagagctcaatgccggacgtcccctatgaacctgacctcgatattgagatagacttcccaagggctgccgaggaactggacatggaaaacgaattcctgctgccaccagtctttggtgaagagtatgaggagcaaccacgccctaggtctaagaaaaaaggcgcaaagaggaaagctgtgtctggataccagtctcatgacgatagctccgataactctgaatgtagtttcccattcaagtacacttacggcgttaacgcctggaaacattgggtaaagaccagacagctagacgaggaccttctcgtgctggacgagttgaagtccagtaagtctgtgaaattgaaagaagatctgctaagtcacaccacagccgagctcaactacggactagctcatttcgttaacgaaattcggcggcctaacggtgaaaactacgcccctgattccatatactatctgtgtcttggaatacaggagtatctttgcgggtctaatcggaaagacaacatttttatcgatcccggataccagacattcgagcaggagcttaataaaatcctgcgttcatggcagccctccattttgcccgacggttctatcttctcccgcgtggaggaagactatctgtggcgtattaagcagctaggatctcactcccccgtggccctcctcaatactctcttttattttaacacaaagtacttcggcctcaaaaccgtggagcagcacctgagactaagcttcggcaccgtgttccgccactggaagaagaatccattaacaatggaaaacaaggcttgcttacggtaccaggtgagttctttgtgtggcacagataacgaggacaaaatcacaaccggaaagcgcaaacacgaggacgacgagccagtgtttgagcagattgagaatacggctaacccaagtcgctgtccggtgaagatgtttgagtgctatcttagcaagtctccccagaatttgaatcaaaggatggacgttttctacctgcaacctgagtgttcctctagcaccgacagccctgtttggtatacttcaaccagcctggacagaaatacgctcgagaatatgctggtgagggtgttgctggttaaggatatttatgacaaagataactacgaactggatgaagacacagactag

SEQ ID NO: 329640 - DNA, 4134 bp, Artificial Sequence
  derived and/or modified sequence
atggacaccagcagcgtgggcggcctggagctgaccgaccagaccccggtgctgctgggaagtaccgcaatggctacctctctgactaacgtgggcaactcctttagtggccccgcaaaccccctggtgtcccgttctaataagtttcagaactcgtctgtggaggacgacgatgacgttgtgttcatcgagccagtgcagccacccccaccctctgtcccagtggtcgccgatcagcggactataacttttacctcctctaaaaatgaagaattacaaggaaatgatagcaagatcacgcccagcagtaaggagttggccagccaaaaagggagcgtcagtgagaccattgtgatagacgacgaagaagacatggagactaaccagggccaggagaaaaactcctctaatttcatcgagaggcggccccctgaaaccaaaaacaggaccaatgatgtggactttagtacatcttcatttagcaggtcaaaggtaaatgccggcatgggtaacagcggtatcactacagagccagattcagagatccaaattgcgaatgtcacaactcttgaaaccggtgttagttcagtgaacgacggccagctcgagaataccgacggccgggacatgaacttgatgattactcatgtgacctctctacaaaacactaatctcggagacgtgtccaatggcctccagagctccaatttcggcgtgaatatccaaacatacaccccctcgcttacctcacaaaccaaaaccggcgtgggcccctttaatcccggcagaatgaatgtggctggcgacgtattccaaaacggcgagagcgcaacacatcacaacccagattcatggatctctcagagcgcaagctttccacgtaatcagaagcaacctggagtggactccctgtctcctgttgcctccttaccaaagcagattttccagccctcggtgcagcagcagcccaccaaacccgtgaaagtgacttgtgctaattgtaaaaagcccctgcagaaagggcagacagcgtaccagcgaaagggatccgcccatctgttctgcagtaccacttgtttaagctccttttctcacaaacccgcgcctaaaaagttgtgcgtcatgtgcaagaaggatattaccaccatgaaagggacaattgtggcccaagtagacagcagcgagtcttttcaggagttctgttccaccagctgcttgtctctgtatgaggacaagcagaatcctactaagggagctctgaacaagtctagatgcacaatttgcgggaagttgacagagatacggcacgaggtgtccttcaaaaacatgacccataaattatgctccgaccattgctttaatcgttaccgtatggccaacggcctcatcatgaattgctgcgaacagtgcggcgaatacttgccctccaagggggctggcaataatgtactcgttatcgacggccagcaaaaacggttctgctgtcagagttgtgtttctgagtacaaacaagtcggtagtcatccatcattcctcaaggaggttagggaccatatgcaggattctttcctgatgcagcccgaaaaatacggcaaactgacaacctgtacagggtgcagaactcaatgcagattcttcgacatgacccagtgcatcggaccgaacggatacatggagccctactgtagtaccgcctgcatgaattctcataaaacaaaatatgccaaatcccagagcttaggcatcatatgccacttttgcaaacgaaattctctcccccagtaccaggccacgatgcccgatgggaagctctataatttttgtaacagttcatgcgttgccaagttccaggcactgtcaatgcagagcagccccaacgggcagtttgtggccccatctgacatccagctgaagtgcaactattgcaagaactccttttgtagtaaaccagagattttagaatgggagaacaaagtccaccagttttgttcaaaaacttgctccgatgactataagaagctgcattgtattgtgacctactgcgagtactgccaagaggagaaaacactgcatgagactgtaaacttctccggggttaaaaggcccttctgtagtgaagggtgcaagctattgtacaagcaggatttcgcccggcgactcggtctgcggtgtgtcacctgtaactattgttcccagctgtgcaaaaagggggccacaaaggaactggatggggtcgttagggacttctgttccgaggactgctgcaagaagttccaggattggtactacaaagcagccaggtgcgactgttgcaagagccaaggtacccttaaagagcgggtacagtggcgaggagagatgaagcacttctgtgaccagcactgcctgctgcggttttattgccagcagaacgaaccaaatatgacaactcagaaagggccagaaaacctgcactacgatcaaggttgtcagacatcaaggacaaagatgacgggctccgccccaccccccagccctactcctaataaagagatgaagaacaaggctgtcctctgtaaaccgctgactatgacaaaggcaacatactgtaaaccgcatatgcaaacaaagtcttgccaaactgacgacacctggcgcactgaatacgtgcccgttccaattcccgttccagtgtatattccagttccgatgcatatgtatagtcagaatattccggttcccacaacggttcccgttccagtgcccgtgcccgtgtttctgcccgctcctttggatagctccgagaaaataccagccgcaattgaggaactgaaatctaaagtgtcctccgatgctttggataccgagcttctgaccatgactgatatgatgagcgaagacgaaggaaaaaccgaaactactaatattaacagtgtcattatcgaaactgacatcatcggttcagatctcctgaaaaactctgatcctgaaacacaatcctctatgcctgacgtgccttatgaacctgatcttgatattgagatcgacttcccacgggcggccgaggaactggatatggagaacgagtttctgcttccgccagtttttggagaggagtacgaggagcagccccgccctcgctcaaagaagaagggcgctaagcgaaaggcagtaagtggatatcaaagccatgatgattcttcagacaattcagagtgctcttttccatttaaatatacatatggtgtgaatgcctggaaacactgggtgaagaccaggcaactggacgaagacttgctggtgctagacgagctgaagtcatccaagtcagtgaaacttaaggaggacctgctttcgcacacgaccgctgaactgaactacgggctcgcacacttcgtaaacgagatccgcagacccaatggagagaactacgctcctgacagcatctactacttgtgcctcggtatccaggagtatttgtgtggatccaataggaaggacaatatcttcatagacccaggctaccagacctttgagcaggaactcaacaaaattctgagatcctggcagcccagcattctgccggacggctccatcttctcacgggtggaggaggattatttgtggcgcattaagcagttaggcagtcacagccctgtggcactgttgaacactctgttctattttaatactaagtattttgggctcaaaactgtagagcagcacctgcggctctctttcggcactgtctttcgccattggaagaaaaaccctctaaccatggagaataaagcttgcttgcgttaccaagtgtcatctctgtgcggaaccgacaacgaagacaagattactaccggcaagaggaagcatgaggacgatgaacctgtctttgaacagatcgagaatacggccaacccaagtcgctgtcctgtcaaaatgttcgaatgctatctatctaagagcccccagaatctcaaccagcgcatggacgtgttttatctccagccggaatgctcaagttctaccgatagtccggtgtggtataccagcacttcacttgacagaaatactttagagaatatgctggttagggtgctcctggtgaaggacatatacgacaaggacaactacgagctcgatgaagacaccgactag

SEQ ID NO: 329641 - DNA, 4134 bp, Artificial Sequence
  derived and/or modified sequence
atggatacatccagcgtcgggggactagaactgactgatcagacgccagtactcctgggcagtactgcaatggcaacaagcctcacgaacgtgggcaactcattcagtgggccagccaatccattggtgtcacggtctaataagttccagaattcatcagtagaagacgatgatgacgtagtcttcatcgagcctgtgcagccccctcccccatccgtccctgtggtggcagatcagcgcacaataaccttcacttctagtaagaatgaagagctgcaaggtaatgactccaagataacgccttcgagcaaggagttagcttcccagaaaggaagcgtgtccgagaccatagtgatcgacgatgaggaggacatggagaccaatcagggtcaggagaaaaatagcagtaacttcatcgagaggcgccctcctgaaaccaagaacaggacgaacgacgttgacttcagcaccagcagtttcagcagatcgaaagtgaatgcaggcatgggaaattccggcatcactaccgagcccgattctgaaatacaaattgcaaacgttaccacacttgagacaggagtctcatctgtgaatgatggccagctcgagaatacagacggcagagatatgaatctgatgattacgcacgtcactagcctgcagaatacaaatctaggcgacgtctcgaatggactgcagtctagcaattttggcgtcaacattcagacctacactccctcactcacctcccaaactaagacaggtgttggaccctttaaccctggccgtatgaatgtggctggcgacgtctttcagaatggtgagtcggccacccaccacaatccagactcatggatttcccagtccgcttctttccctcgcaaccagaagcaacctggagtggactccctgtctccagtagcgagtttacctaagcagatcttccagccatccgtgcaacagcagcccactaagcccgtcaaagtgacctgcgctaattgcaagaaacctctgcagaaaggccagaccgcataccagcgcaagggctcagcccacttgttctgtagtaccacatgcctgagctctttcagccacaagcctgctcctaagaagttatgcgtgatgtgtaaaaaggacatcacaacaatgaagggtaccatcgtggcacaggtagatagtagtgaatcttttcaggagttttgctccactagctgcctttctctgtatgaggacaaacagaatcccaccaagggcgctttgaataagtcacgctgcaccatctgtgggaaactgacagaaatacgacatgaggtgagcttcaagaacatgacacataaattatgtagtgaccactgcttcaatcggtacagaatggctaatgggttgatcatgaattgttgtgaacagtgcggggaatatttgcccagtaagggcgcagggaacaatgtcttggtgattgatggccaacagaaacgcttctgttgccaatcgtgcgtgagcgagtataagcaggtcggatcccacccttccttccttaaggaagtgagggatcacatgcaggactcttttcttatgcagcctgaaaagtatgggaaactcactacctgtaccggttgcagaacacagtgccgtttctttgatatgactcagtgcatcggcccaaacggatacatggagccctactgttcaacggcctgtatgaattctcacaaaacaaagtatgctaaaagtcagagtctgggcataatctgccacttctgcaagcgtaactctttaccccagtatcaggccaccatgcccgatgggaagctgtacaacttctgtaactctagctgcgtcgctaagttccaagctttgtcaatgcagtcttctcctaatggccaatttgttgcaccttccgacattcaattgaagtgtaactactgtaagaactccttttgttctaaacccgagattctggaatgggagaacaaagtgcaccagttttgctccaaaacatgcagtgatgattataagaaattacattgtatcgtgacttactgcgagtactgtcaggaggaaaagacactgcatgaaaccgttaacttcagcggagtcaagcgcccattttgtagcgaagggtgcaaactgctatataaacaggattttgcacgacgtttaggcttgaggtgcgtgacgtgcaattactgttcgcagctgtgtaagaagggcgcaaccaaggaattagatggggtcgttcgcgatttttgtagcgaggactgctgtaagaagttccaggactggtactataaggcggctagatgcgactgttgtaagagtcaggggaccctgaaagagcgcgtgcaatggaggggcgagatgaaacatttttgtgatcagcattgcctccttaggttctattgccagcagaacgagcctaatatgaccacccaaaagggtcctgagaacctccactacgaccagggctgtcagacctcccgcacaaagatgacggggtccgctcctccacctagccccacccctaataaagaaatgaaaaacaaagccgtattatgtaagccgctcacaatgactaaggcgacctactgcaaacctcacatgcaaaccaaatcctgtcagactgacgacacttggcggacagagtacgtgccagtgccaatccctgtaccagtgtatatccccgtaccaatgcatatgtattctcagaacatcccggtgcccactacagtgcctgtgcctgtgccagtgcctgtgtttctgccagctcctctggatagctcagaaaagatcccagcagcaatcgaagaactgaaatccaaggtgagctccgatgctctcgacactgagctgctgaccatgaccgatatgatgagcgaggatgaaggtaagaccgagaccaccaacatcaattccgtgataatcgagacagacatcatcgggtccgacctactcaagaactctgaccccgagactcagtctagtatgcctgatgtgccctacgagcctgatctcgatatcgagattgattttcctcgggcagcggaggagctcgatatggaaaacgagttcttgctcccccctgtatttggtgaagaatatgaagagcaacctcggcctcgctccaagaaaaaaggcgctaagaggaaggcagtaagcgggtatcagagccacgacgatagttccgataattcagagtgctcatttccttttaaatacacatacggggttaatgcttggaaacattgggtgaaaaccagacagctggatgaagacctgctggtgctggacgaactcaagagctccaaaagtgttaaactcaaggaggatctgctcagtcacaccacggcggaactgaactatgggctggcccattttgtgaacgagattcggcgtcctaatggtgagaattacgctcccgattctatctattacctctgtctcggcatccaggaatatttgtgtgggagtaatcgaaaagacaatatcttcatcgatcccggatatcagacattcgagcaggaactgaacaaaattttacgctcatggcagccaagtattctgccagacggaagcatcttcagccgcgtggaagaggattacctgtggagaattaagcagctgggatcccattcaccagtggccctcctgaataccctcttctactttaacaccaaatacttcggcctaaagaccgtggaacaacatctgcgcttatcgttcgggaccgtgttcaggcattggaagaagaatccactcacgatggaaaataaggcctgtcttcggtaccaggtcagctcactttgtgggacggataatgaggataaaataaccacaggaaagagaaaacacgaggatgacgagcctgtttttgagcagattgagaacacagccaatccctcaaggtgccctgttaagatgtttgagtgctatctgtccaaatctccccagaacttaaatcagagaatggatgtgttttacttacaacccgagtgtagcagtagtaccgatagtccagtgtggtacacttccacctccctcgataggaatactctcgaaaatatgctggtccgagtcttgctagttaaagatatctacgacaaagataactacgagctcgatgaagatacggattag

SEQ ID NO: 329642 - DNA, 4128 bp, Artificial Sequence
  derived and/or modified sequence
atggatacctccagcgtcggagggctggaactcacggatcagacgccggtgctcctaggatctactgcaatggccacaagcctgactaacgtggggaatagcttctctggcccagccaatcccctggtgtccagatccaataaattccaaaactcatcagttgaggatgatgatgatgtggtgtttatagagcctgttcaacctccgccaccttccgtacccgtagtggccgaccaacggaccatcacctttactagcagtaaaaacgaggaattacaaggaaatgacagtaaaatcaccccttctagcaaggaactcgccagccagaagggaagtgtcagtgagacaatcgtcatcgatgacgaggaagacatggagaccaaccaagggcaggagaaaaattcaagtaactttattgaacgcagacctcccgaaactaaaaaccggactaacgatgttgactttagcacatcttctttttccagatcgaaagttaatgctggaatgggaaattcaggtattacaactgaacccgatagcgagattcagattgctaacgtcaccacgctcgagacaggtgtgtccagcgtcaatgatggccagctggaaaatactgatggacgagacatgaatttaatgattactcacgtgacaagcctgcaaaacaccaatctgggtgacgtgtctaatggccttcagagcagtaattttggcgtgaatatacagacttacacaccctcacttacatcacagacgaagaccggggttggccctttcaaccccggaagaatgaatgtggctggtgacgtattccaaaatggtgagtccgctacccaccataaccccgactcctggatcagccagtctgcctcatttcccagaaatcagaaacagccaggagttgacagtctttctcctgtcgcgagcctacccaaacagatctttcagcccagtgtacaacagcaacccacaaagcctgttaaggtcacctgtgctaactgtaagaaacccctgcagaaaggtcagacagcctaccagcgtaaaggtagtgcacatctcttttgctctacaacttgcctatcctcattcagtcacaaacccgctcctaagaagttatgtgtaatgtgcaagaaagacatcactacgatgaaaggcacaatagttgcccaggtagactcctccgagtctttccaggagttctgcagtacgagttgcctgtcactgtatgaggataaacaaaaccctaccaagggggcattgaataaatctagatgcaccatctgtggcaagctgacagagattcgccacgaagtctcttttaaaaacatgactcacaagctttgcagtgaccattgcttcaatagatatagaatggcaaacggtctaattatgaactgttgcgagcaatgtggggagtaccttccctccaagggcgcagggaacaacgtactcgtgattgacggacagcaaaaacgcttttgctgccaatcctgcgtgtcagagtataagcaggtcggcagtcacccctcctttctgaaggaggtgagagaccacatgcaggactcgttccttatgcaaccagaaaagtacggcaagctcactacatgcaccgggtgtagaacccagtgcagatttttcgatatgacacaatgtatcggtccaaatggctacatggaaccatactgctccacagcttgtatgaattctcacaaaacaaaatacgcaaagtcgcagtcactgggcatcatttgtcatttctgcaaacggaattccctaccccagtatcaggctacgatgccagatgggaaactttataatttctgcaatagcagttgcgtggccaagtttcaggccttgagcatgcagagctccccaaacggtcagttcgtggccccttctgatatccagctgaaatgtaattactgcaagaatagtttttgcagcaaaccggagattctggagtgggaagcttccttacatcaattctgcagtaagacgtgctcggacgattacaagaaactccattgcattgttacttactgtgaatattgccaggaggagaaaacgctccacgagactgtcaacttttccggagttaaacgaccattctgctccgaaggctgcaagctgctctacaagcaggattttgctagaagactgggtcttcgttgtgttacttgtaattattgcagccagttatgcaaaaagggcgctactaaggaactggatggcgtagtaagggatttctgcagcgaggactgttgtaagaagtttcaggactggtactataaagcttgcgactgttgtaagagtcagggcacactgaaggagcgagttcaatggcgcggagaaatgaaacacttttgcgaccagcattgcctgctaagattctactgtcagcaaaatgaaccaaacatgacaactcagaagggacccgagaaccttcactacgatcagggctgtcaaacaagccgaaccaagatgacgggtagcgcgcctcccccttctccgacgccgaacaaggagatgaagaacaaggcggtgctgtgtaaaccgctgacaatgaccaaggccacatactgcaaaccacacatgcagacaaaatcctgccaaacagacgacacctggaggacagaatacgtcccagtaccgatcccagtgccagtttacattccagtacctatgcatatgtatagtcagaacatcccagtgcccacaacagtgcctgtcccagtgcccgttcctgtgttcctgcctgcccctctggacagttctgagaagatacccgcagccatcgaagaactcaagtctaaagtcagctctgacgcactcgacacagagttgctcacaatgaccgatatgatgtccgaggacgaaggaaaaactgaaactacgaacataaactcagtgattatcgagaccgatataatcggaagtgacctcttaaaaaattctgatcctgaaactcagagctcaatgcctgatgtgccctacgaacctgatcttgacatagagatagacttcccacgtgcagcagaggaattagacatggagaacgaatttcttttgccccctgtattcggagaggagtacgaagaacagccgcgtcccaggtcaaaaaaaaagggagcaaagagaaaagccgtgtcgggctaccagtcacacgatgactccagcgataattctgaatgcagctttccattcaaatacacatacggcgtaaacgcctggaaacattgggtgaaaacgaggcagctggatgaagacctattggtgctcgatgagctgaagagttcaaagagcgttaaactcaaggaggatctgctcagccacacaacggccgagttaaattacgggttggctcattttgtcaatgagattaggcgaccaaatggcgaaaactatgcacccgattcgatttactatctgtgtctggggattcaggaatacctgtgcggaagtaacagaaaggataatatttttatcgacccaggctaccagaccttcgaacaagaactgaacaaaatcctaagaagctggcaaccgagtatcctgcctgacggctccatcttcagccgagtggaggaagattatctctggcgtatcaagcagttagggtcccacagtcctgtggccctcttgaacaccctgttttacttcaacacaaagtactttgggttaaaaaccgttgaacagcacctccgcctctcctttggcactgtgtttaggcactggaagaagaacccactgactatggagaacaaagcctgcttgagatatcaagtgtcaagtctctgcggaactgacaacgaggacaagataaccaccggtaaaaggaaacacgaggatgatgagcccgttttcgagcagatagaaaacactgccaatccctccagatgccctgtcaagatgttcgagtgctacctctccaagtcccctcagaatttgaaccagaggatggatgtgttttacttgcagcccgaatgctcgtctagtacagattctccggtgtggtacaccagtaccagcttggaccgcaacactctggaaaacatgcttgttcgggtattgctggtgaaagacatttacgacaaagataactacgagctcgatgaagataccgactag

SEQ ID NO: 329643 - DNA, 4128 bp, Artificial Sequence
  derived and/or modified sequence
atggacacgtcttctgtcgggggactcgagctcacagatcagacaccagtattgcttggcagtaccgcgatggctacctctctgaccaacgtcggcaattcctttagcggtcccgcaaatcctctggtgagcagatcaaataagttccagaactcatccgttgaggatgatgacgacgttgtgttcatcgaacccgtccagccacctcctcctagcgttcccgtggtcgcagaccagagaacaattacttttactagttccaagaatgaggagctgcagggcaacgacagcaagattactccttccagcaaggagcttgcgtcccagaaagggagtgtgtccgagactattgtgatcgacgatgaggaggatatggagacaaaccaagggcaggagaaaaacagctccaatttcatcgagcgcaggccacctgagacaaagaacagaaccaatgatgttgactttagtacctcttcattctcgagaagcaaagttaacgccggaatggggaattcagggatcaccacagaaccagactccgagatccagatcgctaatgtcaccacgctggaaactggtgtttcttccgtaaacgacggccaactggaaaatacagatggcagggatatgaatcttatgattactcacgtaacgtcgctacagaataccaacttgggcgatgtaagcaacggtctgcagtctagtaactttggggtaaacattcagacctatacacctagcctaacatcacagaccaagaccggtgtgggcccttttaatcccggacggatgaacgtggccggagatgtttttcagaatggtgagagtgcaacgcaccacaatccagatagctggatttcacaatcagcgtcttttccacgtaatcaaaagcagcccggtgtggatagcttgagccctgtggctagtttgccgaagcagatcttccagccttcagtgcagcagcagccaaccaagccagtgaaggtgacttgcgctaattgtaagaaaccactccagaaaggacagacagcctatcagaggaaaggctccgctcacctattctgctccaccacgtgtttatcctcattctcccacaaacctgcgcctaagaagctgtgtgtgatgtgcaaaaaggatatcacaactatgaaagggacaatcgtggcccaggtcgatagctccgaaagctttcaggaattttgctctacgagctgtctctccctctacgaagacaaacagaatcctaccaagggcgcactgaataagtctagatgtacaatttgcggcaaacttactgaaatccgccatgaagtgagttttaagaatatgactcacaaactgtgttctgatcactgcttcaaccggtacagaatggcaaatggtctgattatgaactgctgcgagcagtgcggcgaatatttaccaagcaagggcgctgggaataacgtgcttgtgatagatggccagcagaagaggttttgctgccagtcctgcgtgtcggagtacaaacaggtgggctcgcacccttcgttcctgaaggaggtgcgcgaccatatgcaggatagcttcctcatgcagcctgaaaagtatgggaagctgaccacatgcacggggtgccggacacagtgcagattttttgatatgacgcagtgcatcggccctaacggttacatggagccatattgttccacagcttgcatgaattcccataagacgaaatacgctaagtcacagagcttagggatcatctgccatttttgtaagagaaattccctgccgcagtatcaagccaccatgcccgacggtaagctctataacttttgcaactcctcttgcgtggctaagtttcaggcattgtccatgcaatcttcacccaacggccagttcgttgctcctagtgacattcagctcaagtgtaactactgcaagaacagtttttgctccaaacccgaaatccttgagtgggaagccagtttgcaccagttctgtagtaaaacatgtagcgacgattacaaaaagttgcattgcattgtcacgtattgcgaatattgccaggaggaaaagacactgcacgagaccgtcaacttctccggggtgaaacgcccattttgctctgaggggtgcaagctgttgtacaagcaggattttgctcgccgattgggactgcgttgtgttacatgtaattactgctcccagttatgcaagaaaggggcaacgaaagagctggacggcgtggtgagggacttctgcagtgaggactgctgtaagaaatttcaggattggtattacaaggcttgcgattgttgcaagtcccaggggacactgaaagagcgcgttcagtggagaggtgaaatgaagcacttctgcgaccagcactgcctgctacgcttctactgccaacaaaacgagccaaacatgacaacacaaaaaggtccagagaatctccactacgatcagggctgccagacctctagaacaaaaatgaccgggtctgctccccctcccagcccaacacctaataaggagatgaagaataaggccgtgctgtgcaaaccattgaccatgaccaaggccacttactgtaaaccccacatgcagacaaaatcctgtcagactgacgacacttggagaactgaatatgtgcccgttccaatcccggtgcccgtctatatcccagtgcctatgcatatgtatagtcaaaacattccagtgcctactacagttcccgtccccgtgcccgtacctgtcttcctgccagcacctctcgatagttccgagaagattcccgctgctatcgaggaattgaaatccaaggtgagctccgacgctttggataccgagcttctgaccatgactgacatgatgtcggaggatgagggaaagacagaaaccaccaatattaacagcgtgatcatagaaactgatataatcggctccgatcttctgaaaaactcggaccccgaaacccagtcatccatgccggacgttccatacgagccagatcttgatatagagatcgattttcctagggcggctgaggaactggatatggaaaacgaattcctcttgcctccagtgttcggcgaggaatacgaggagcagcccaggccgagatcgaagaagaagggcgctaaacggaaggcagtcagcgggtaccagtcccacgacgactcttcagacaatagtgagtgtagtttcccattcaaatacacctacggcgtgaatgcctggaagcactgggtcaaaactagacagttggacgaggacttgcttgttttggatgagctgaaatcctccaagtctgtgaaactcaaagaggatctgctgagtcacactacggcggagctgaactacggcctcgcgcactttgttaatgaaatccggcgaccaaacggcgagaattatgcgccagattcgatctactacctgtgtttgggaatccaagaatacttgtgtggtagcaaccgaaaagacaacatcttcatagacccaggctatcagacattcgaacaggagttgaacaaaatactccgttcctggcagccctccatcctacccgatggcagcatattttcgcgtgtggaagaagattatctgtggcggattaaacagctggggtctcattcaccggtcgctctgctgaacacgctgttttactttaacactaaatacttcggcctaaagacagtggagcagcacctccgtctgagtttcggcacagtgtttaggcactggaagaaaaatcccctgaccatggaaaataaggcctgcctgcgttatcaggtgtcctccctgtgtggtaccgataacgaggataagatcactactggcaagcggaagcatgaggacgacgagcccgtgtttgagcagatcgagaataccgccaaccccagtagatgcccagtgaagatgtttgaatgctacctctctaagagccctcagaacctcaaccagcggatggacgtcttttatctgcagcctgaatgtagcagttccaccgactctcctgtttggtatacctcaacctcgctggatagaaacaccctggaaaatatgctcgttagggtgctactcgtcaaggacatctacgacaaggacaactatgagcttgacgaggacacggattag

SEQ ID NO: 329644 - DNA, 4134 bp, Artificial Sequence
  derived and/or modified sequence
atggatacatcctctgtaggcggtttggagctgaccgatcagacaccagtgctgcttggttcgacagcgatggctactagtctcactaatgttgggaactccttctcaggtccagctaacccgttagtctcccggagcaataagtttcagaacagctccgtggaggatgacgacgacgtggttttcattgagcccgtgcagccaccccctccatccgtacccgtggttgcggaccagcggacaatcacatttacatcctccaaaaatgaagaattacaaggaaatgactctaagattactcccagttcaaaggagctggcaagccaaaagggctcggtgtccgaaaccattgtcatcgacgacgaggaagacatggaaacgaatcagggtcaggagaaaaattcttccaattttatcgagaggcgtcctccagagactaagaatcgcaccaacgacgtggatttcagtaccagcagcttctcccgttcgaaggtgaatgccggaatgggcaacagcgggatcacgacagaaccagacagcgaaatccaaatcgcaaacgttaccaccctcgagacaggcgtgtcttctgtcaacgatggtcagctggaaaataccgacggccgagacatgaatctgatgattacacatgttacgtctctgcagaatacgaaccttggagacgtatcaaacggtctacagtcgtccaattttggagttaatatacagacttatacaccttctcttacctcacagactaagaccggagttggtccgtttaatcctggccgtatgaacgtggctggcgacgtatttcagaatggcgagtcagccacccatcataaccccgacagctggatctcccagagcgcttcgtttccaagaaaccagaaacagcctggtgtggacagcttgtccccagtcgcctctctcccaaagcagattttccaaccctcagttcagcagcagcctacaaaacctgtaaaggtgacgtgtgcgaattgcaagaaacccctacagaagggtcagacagcgtatcagaggaagggatctgcccatctgttttgctcgaccacttgcctgtctagcttctctcacaagcctgctcctaagaaactctgcgttatgtgtaagaaggacatcacgacaatgaaggggactattgtggcgcaagtggatagtagtgagagttttcaggagttctgctctacatcctgcctgtcattgtacgaggataaacagaatcctactaagggcgctctgaacaagtcccgctgcactatttgtgggaaactgaccgagatccggcatgaggtcagcttcaagaatatgacccacaagctgtgctcagaccattgttttaaccgttatcggatggcaaacgggctgattatgaactgctgcgagcaatgtggcgaataccttccctctaaaggagcgggtaacaacgtgctcgtgattgacgggcagcagaagcgattctgctgccagtcatgtgtgtcagagtacaaacaagtggggtctcatccatccttccttaaagaagtaagggatcatatgcaagattcttttctgatgcaacccgagaaatacggtaagttgactacatgtactggctgcagaacccagtgccgcttctttgacatgacccagtgtatcggcccaaacggatacatggaaccctattgctctacagcgtgcatgaattcacacaagaccaaatacgcaaaaagccaatccctgggaataatttgtcacttttgcaagcggaactccctcccccagtaccaagctacaatgccagatggcaagctctataatttttgcaattcttcttgtgtggccaaatttcaggctctgtctatgcagagctctccaaatggtcagttcgttgccccatctgacattcagctgaaatgtaattactgtaagaatagtttttgtagcaagccggaaatattggagtgggaaaataaggttcaccagttctgttccaagacctgcagcgacgattacaaaaagctccactgcatcgtgacctactgtgagtattgtcaggaagagaagacgttgcacgaaacagtgaatttcagtggagtgaagagaccattctgtagcgagggctgtaaacttctgtataagcaggatttcgccagacgcctgggcttgagatgtgtgacatgcaattattgctcccaactgtgcaagaagggcgcaactaaagaactcgatggagtcgtacgcgacttctgttctgaagattgttgcaaaaagtttcaagactggtattataaagcggctaggtgcgattgttgcaagtcacaggggaccctgaaggaacgagttcagtggagaggcgagatgaagcatttttgcgaccaacattgtctgctccgtttctactgccagcagaatgagcccaatatgacaacccagaaagggccagagaacttgcactacgatcagggctgtcagacatctcgaactaagatgacgggcagcgcaccaccaccatctccaactcccaacaaagaaatgaagaataaggccgtgctgtgcaaaccccttaccatgactaaagctacttactgtaagccccacatgcagacaaaatcctgccaaaccgacgatacttggcgcacagagtatgtccccgtgccaattccggttcctgtgtatatcccagtgcccatgcatatgtatagccagaatatcccagttcctaccaccgtgccagtgcccgttcctgtcccagtcttcctgccggcacccttggactcctctgagaaaattcctgcagctatcgaggagcttaagtccaaggtcagctccgacgcccttgacacagagctgctgacaatgacagacatgatgtcagaggacgagggaaaaacggaaaccaccaacatcaatagtgtgatcatagagactgacatcatcggatccgacctgttaaaaaactcggaccccgagactcagagttctatgcccgatgtaccttacgagcctgacctggatatcgagatcgactttcctcgtgccgcagaggagctggacatggagaacgaattcctactgcccccagtctttggtgaggagtacgaggagcagccaaggcctagaagtaagaagaaaggtgcaaaacggaaggctgtctcagggtaccagtcacatgatgacagcagcgacaatagtgaatgctcctttcctttcaagtacacatacggcgttaatgcctggaaacactgggtgaagacgagacagctcgacgaagatctgctggtgttagatgaactgaagtcctcgaagtccgtcaaactgaaggaggacctgctctctcacactacggcggagttaaactatggtcttgcccacttcgtgaacgaaatcagaaggccaaatggagagaattacgctcccgactctatttactacctgtgcctaggcatccaggagtacctgtgcggcagcaaccgaaaggataatatattcatagatccaggttatcagacgtttgaacaggaactcaacaagattttgcggtcctggcagcctagcatcctcccagatgggtcgatcttctcgagagtggaggaagattatctgtggcggatcaaacaactgggctcccactctccggtcgccttactgaataccctcttttacttcaacaccaaatattttgggctgaagaccgtcgaacagcatctgaggctgtcttttggcaccgttttcaggcattggaaaaagaatccactgacgatggaaaacaaagcttgcctgaggtaccaggtatcctctctttgcggaacggacaatgaggacaagattaccacgggcaagcggaaacatgaagatgatgagcccgtcttcgagcaaatcgagaatactgccaacccctcacggtgccctgtgaagatgtttgagtgttatctgtcgaaaagtccgcaaaatcttaaccaacggatggatgtattctatcttcaacccgagtgttcttcaagcacggattctccagtatggtacacatccacctccctcgacagaaatactctggagaacatgctggtgcgcgtgctgctagtgaaggacatatacgacaaagacaactatgagctggacgaagacaccgattag

SEQ ID NO: 329645 - DNA, 1622 bp, Artificial Sequence
  derived and/or modified sequence
tttccagtccagggccgctgagagtgggggtggctgggagcagcgcagcctccggaggaggaggcggaggccgaggaccaggaatcaccttcaagcctatgtcgtgaggctttggcagaaattaagaaggaaatatctccattgttcattggcatggaaaaatgttcagtgggaggattagagttgactgaacagactcctgctttattagggaatatggccatggcaactagtctcatggacataggggattcatttggtcatccagcttgtcctttagtcagtagatctaggaactcaccagtggaagatgatgatgatgatgatgatgttgtgtttattgaatctatacaacctccttcaatttctgctccagcaatagctgatcaaagaaacttcatatttgcatcatcaaaaaatgaaaagcctcaaggaaattattctgtaattcctccttcttcaagagatttggcatctcagaaaggaaatataagtgagacaattgttattgatgatgaagaggacatagaaacaaatggaggagcagagaaaaagtcttcctgttttatcgaatggggacttcctggaactaaaaacaaaaccaacgatttggatttctccacttccagtctttcaagaagtaaggtaaatgcaggaatgggtaatagtggtatcactacagaattgactctgaaatacattattactaatgttacaaccttagaaacaggtataagctctgtgaatgctgggcaagatgtgaacataattattacatataaaacatcactatagaataccaacttgggagatgtcgctaaaggacttcagtcaagtaattttggtgttaatatacaaacgtacaccccatctttaactccacagaccaagactggagtaagaccttttaaccctggtagaatgaatgtggcaggagacttatttcagaatggagaatttgcaactcatcatagtcctgattcttggatctcccagtcagcttcatttcccagtaatcagaaacagccaggggtggattctttatcaccagtggccttacttcgtaagcagaatttccagcctacagcccaacaacaacttactaaaccagctaaaatcacttgtgcaaattgcaaaaagcctttacagaagggacagacagcttatcaacgaaaaggatcagctcacctcttttgctctaccacctgcctttcttccttctctcataaacgtactcaaaacacacgaagcataatatgtaaaaaagatgcatctacaaagaaggctaatgtcattcttccagtagaatcaagcaaatccttccaagaattttatagtacatcttgtttgtctccctgtgaaaacaactggaatcttaaaaaaggagtttttaataagtcaagatgtacaatttgtagtaaattagcagaggtctggatttttatacctaagttgttgtttaggctaacagtgataattttaacttttaagtgctattatgtactctttcatctacataatgcacgtgttctggatgtataacatgaagctgaaaggaagaataaggatatgttagaactatcttatgggatattttataaataaaattccatttgcatagc

SEQ ID NO: 329646 - DNA, 1134 bp, Artificial Sequence
  derived and/or modified sequence
atgcaggacagcttcctgatgcagcccgagaagtacggcaagctgaccacctgcaccggctgcagaacccagtgcagattcttcgacatgacccagtgcatcggccccaacggctacatggagccctactgcagcaccgcctgcatgaacagccacaagaccaagtacgccaagagccagagcctgggcatcatctgccacttctgcaagagaaacagcctgccccagtaccaggccaccatgcccgacggcaagctgtacaacttctgcaacagcagctgcgtggccaagttccaggccctgagcatgcagagcagccccaacggccagttcgtggcccccagcgacatccagctgaagtgcaactactgcaagaacagcttctgcagcaagcccgagatcctggagtgggagaacaaggtgcaccagttctgcagcaagacctgcagcgacgactacaagaagctgcactgcatcgtgacctactgcgagtactgccaggaggagaagaccctgcacgagaccgtgaacttcagcggcgtgaagagacccttctgcagcgagggctgcaagctgctgtacaagcaggacttcgccagaagactgggcctgagatgcgtgacctgcaactactgcagccagctgtgcaagaagggcgccaccaaggagctggacggcgtggtgagagacttctgcagcgaggactgctgcaagaagttccaggactggtactacaaggccgccagatgcgactgctgcaagagccagggcaccctgaaggagagagtgcagtggagaggcgagatgaagcacttctgcgaccagcactgcctgctgagattctactgccagcagaacgagcccaacatgaccacccagaagggccccgagaacctgcactacgaccagggctgccagaccagcagaaccaagatgaccggcagcgcccccccccccagccccacccccaacaaggagatgaagaacaaggccgtgctgtgcaagcccctgaccatgaccaaggccacctactgcaagccccacatgcagaccaagagctgccagaccgacatcacctggagaatccagcacctgatcctgaaccactacgaccagagcctgatcaaggcctag

SEQ ID NO: 329647 - DNA, 1134 bp, Artificial Sequence
  derived and/or modified sequence
atgcaggattcctttctcatgcagcctgagaaatatggaaaactcacaacatgtaccgggtgccggactcagtgtcgcttttttgatatgacccagtgcatcgggcccaatggctacatggaaccatactgttcaaccgcatgtatgaactctcacaaaaccaaatacgccaaaagtcagagcttaggcataatctgccacttttgcaagcggaattcgctaccacaataccaggccacaatgcctgacggaaagctgtataatttctgcaatagttcatgcgttgctaagttccaggccctttccatgcagtcttcacctaatggtcagttcgttgccccttcggatattcagctcaaatgtaattactgtaagaattccttctgcagcaaaccagagatcttagaatgggaaaacaaggtgcatcagttttgttcaaaaacctgcagcgacgactataaaaagctgcactgtattgtaacatattgtgaatactgtcaagaggagaagaccctacatgagacggttaacttcagcggagtgaagcgccccttctgctcagaaggctgtaagcttctttataagcaggactttgcccgtcgtctcggcctccggtgcgtcacttgcaactactgtagtcaactgtgtaagaagggagctacaaaagagttagacggagttgtgcgcgatttttgttccgaagactgctgtaaaaaattccaagactggtactacaaagccgcccgatgcgactgctgcaaatcccaagggactcttaaggaacgagtgcagtggcgcggagaaatgaagcacttctgtgaccaacattgtttgctacggttctattgccagcagaacgagcctaacatgacaacccaaaaaggcccagaaaatctccactatgatcagggctgtcagacctctcgaaccaagatgactggcagcgctcctccaccttcaccaactccaaacaaggaaatgaagaacaaggccgtgctgtgtaaaccactgaccatgaccaaggccacatactgtaagccacatatgcaaaccaaatcgtgccaaaccgacattacctggcgtatccaacatctgatcctgaatcactacgatcagagcctcatcaaggcttag

SEQ ID NO: 329648 - DNA, 1134 bp, Artificial Sequence
  derived and/or modified sequence
atgcaggacagcttcctgatgcagcctgagaagtatggcaagctgaccacctgcaccggctgcaggacccagtgccgcttctttgacatgacccagtgcatcggccccaacggctacatggagccctactgcagcacagcctgcatgaacagccacaagaccaagtatgccaagagccagagcctgggcatcatctgccacttctgcaagaggaacagcctgccccagtaccaggccaccatgccagatggcaagctgtacaacttctgcaacagcagctgtgtggccaagttccaggccctgtccatgcagagcagccccaacggccagtttgtggcccccagcgacatccagctgaagtgcaactactgcaagaacagcttctgcagcaagccagagatcctggagtgggagaacaaggtgcaccagttctgcagcaagacctgcagtgatgactacaagaagctgcactgcatcgtgacctactgtgagtactgccaggaggagaagaccctgcatgaaacagtgaacttctctggagtgaagaggcccttctgcagcgagggctgcaagctgctgtacaagcaggactttgcccggcggctgggcctgcgctgtgtgacctgcaactactgcagccagctgtgcaagaagggggccaccaaggagctggatggagtggtgcgggacttctgcagcgaggactgctgcaagaagttccaggactggtactacaaggccgcccgctgtgactgctgcaagagccagggcaccctgaaggagcgggtgcagtggagaggagagatgaagcacttctgtgaccagcactgcctgctgcgcttctactgccagcagaatgagcccaacatgaccacccagaagggccctgagaacctgcactatgaccagggctgccagaccagcaggaccaagatgactggaagtgcccccccacccagccccacccccaacaaggagatgaagaacaaggctgtgctgtgcaagcccctgaccatgaccaaggccacctactgcaagccccacatgcagaccaagagctgccagacagacatcacctggaggatccagcacctgatcctgaaccactatgaccagagcctcatcaaggcctag

SEQ ID NO: 329649 - DNA, 1134 bp, Artificial Sequence
  derived and/or modified sequence
atgcaggacagcttcctgatgcagcccgagaagtacggcaagctgacaacatgtactggctgccgcactcaatgcaggttcttcgacatgacccagtgtattggccctaatggttacatggagccttattgcagcacagcctgcatgaacagccacaagacaaaatatgctaaatctcagtcgcttgggattatttgtcacttctgtaaacggaactccttgccacagtatcaggccacaatgccggatggaaaactgtacaacttttgcaattcctcctgtgtggccaaatttcaggctttaagcatgcagtcttcgcctaacggtcagttcgtggccccttccgatatacagctgaagtgtaactactgtaaaaattcattctgtagcaaaccagaaatattggaatgggagaataaagtgcatcagttttgttctaagacatgtagcgacgattacaagaaactgcattgcattgttacatattgcgagtattgccaagaggagaaaacgctgcacgaaactgtcaatttctctggggtgaaacgccccttctgctctgagggatgcaagctgctttacaagcaagatttcgcaagaaggctcggtctgcgctgtgtgacatgcaactactgctcccagctttgtaagaaaggagccacaaaggagctggatggcgtggtgcgggatttctgcagcgaggattgctgtaaaaagttccaggattggtattacaaggcagctcgttgcgactgctgcaagagtcaaggcactttgaaggaacgcgtgcagtggcgtggcgagatgaaacatttctgtgaccagcactgtctcttgagattttactgtcaacagaacgagcccaacatgacgacccaaaaggggcctgaaaacctgcactacgatcagggctgtcagactagtcgaacaaaaatgacagggtctgctcccccccccagccccacaccaaacaaagagatgaagaataaggccgtgttatgtaagcctctcacaatgactaaggcaacatactgcaaacctcatatgcagactaaaagctgccaaactgatataacatggaggatacagcacttgattctgaatcattacgaccagagcctgataaaggcctag

SEQ ID NO: 329650 - DNA, 1134 bp, Artificial Sequence
  derived and/or modified sequence
atgcaggatagtttcctaatgcagccagaaaaatacggaaaattgacaacatgcaccggttgcaggactcaatgccgttttttcgatatgacacaatgcattgggcctaacggctatatggaaccctactgttctactgcctgcatgaacagccataaaaccaaatacgccaagtcccagtctctgggtattatctgccacttctgtaagcggaattctcttcctcagtaccaggccacgatgcccgacggtaagctctacaatttttgtaatagttcctgcgttgccaaattccaggccctgtcaatgcagtcttccccaaacggccaattcgtcgctccctcggatatccagttaaagtgcaattattgtaagaactccttctgctccaagccagagatccttgaatgggagaacaaggtccaccaattttgctcaaagacatgtagtgatgactataaaaaactgcactgtatagtaacatactgtgaatactgtcaggaagaaaaaactctgcacgaaactgtgaatttctccggtgttaagcgcccattctgtagcgagggctgcaaactcctgtacaaacaggatttcgccaggaggcttgggttgagatgcgtgacctgtaactactgctcccagctctgcaaaaaaggagcaaccaaggagctcgatggtgtggtccgtgatttttgttccgaggattgctgtaagaaattccaggattggtattacaaggccgcacgatgtgactgctgtaaatcccagggtactctcaaagagagggtacagtggcgtggcgaaatgaagcacttctgtgatcaacactgtctgctccgattctactgtcagcagaatgagccgaatatgacaacccaaaagggcccagaaaatctgcattatgaccaggggtgtcagacaagcagaactaaaatgaccggaagcgcaccacctccatccccaacccctaacaaggaaatgaagaacaaggccgtgctgtgtaaaccccttacaatgacgaaggctacctactgtaagcctcatatgcaaacgaagtcttgccagacagatataacatggagaatccagcatctgatcttgaaccattacgaccagagcctgatcaaagcgtag

SEQ ID NO: 329651 - DNA, 1517 bp, Artificial Sequence
  derived and/or modified sequence
tctatgaagacaaacagaatcctactaaaggagctctaaataaatcaagatgtacaatctgtggtaaactaactgaggtaggtagccatccaagcttcctgaaggaggttcgagatcacatgcaggactctttcttaatgcagcctgagaaatatggaaaactgacaacttgtactggttgccgaacacagtgcaggttttttgatatgactcagtgtataggtcctaatggatatatggagccatattgttcaactgcttgtatgaacagtcacaagacaaaatatgcaaaatcacaaagtttgggaattatttgccatttttgtaagcgaaactctttacctcaataccaagccacaatgcctgatggaaaactgtacaacttttgcaattccagttgtgtggctaaatttcaggctctaagtatgcagtcatctccaaatggccagtttgtagcgccaagtgatattcagttgaaatgcaactactgcaaaaattccttttgttcaaaaccagaaatcctggaatgggagaacaaagtgcatcagttctgcagcaaaacttgttcagatgactataagaagttgcattgcatagttacatattgcgaatactgtcaagaggagaagactcttcatgaaacagtaaatttctctggcgttaagagacctttctgtagtgaaggctgcaaattattatacaaacaggattttgccagacgtttaggattgagatgtgttacttgcaactattgttctcagctatgtaagaagggagcaactaaagaactcgatggtgttgtgagagatttctgcagtgaagattgctgtaaaaaatttcaggattggtactacaaggctgcaaggtgtgactgttgtaaatctcaaggaactcttaaagagcgagttcagtggcgtggggaaatgaaacatttctgtgatcaacattgcttactgcgtttctactgtcaacaaaatgagcccaacatgacaactcagaaaggacctgaaaacttacattatgatcagggttgtcagacatctcgaaccaaaatgacaggttcagcaccacccccttctccaacacctaacaaagagatgaagaacaaagcagttctttgcaaacctttaacaatgacaaaagctacttactgtaaacctcacatgcagaccaaatcttgtcagacagatattacctggagaatacagcatctcattttaaatcattatgatcaatctctgataaaggcctagaatacaaattatgtcaaaagtgaaaaaatactatctcgaaaatttccttggggataagactactaaaattataatgcttcctctgagaaaatcatctctttgcatgtgatgatacttggaggacagaatatgttccagtgcctatccctgtgcctgtgtatatcccagttcctatgcacatgtacagtcagaatattcctgttcctactacagttcctgttcctgtgccagttcctgtttttctgcctgctccattggacagca

SEQ ID NO: 329652 - protein, 530 aa, Artificial Sequence
  derived and/or modified sequence
MPNVLLPPKESNLFKRILKCYEQKQYKNGLKFCKMILSNPKFAEHGETLAMKGLTLNCLGKKEEAYEFVRKGLRNDVKSHVCWHVYGLLQRSDKKYDEAIKCYRNALKLDKDNLQILRDLSLLQIQMRDLEGYRETRYQLLQLRPTQRASWIGYAIAYHLLKDYDMALKLLEEFRQTQQVPPNKIDYEYSELILYQNQVMREADLLQESLEHIEMYEKQICDKLLVEEIKGEILLKLGRLKEASEVFKNLIDRNAENWCYYEGLEKALQISTLEERLQIYEEISKQHPKAITPRRLPLTLVPGERFRELMDKFLRVNFSKGCPPLFTTLKSLYYNTEKVSIIQELVTNYEASLKTCDFFSPYENGEKEPPTTLLWVQYFLAQHFDKLGQYSLALDYINAAIASTPTLIELFYMKAKIYKHIGNLKEAAKWMDEAQSLDTADRFINSKCAKYMLRANMIKEAEEMCSKFTREGTSAMENLNEMQCMWFQTECISAYQRLGRYGDALKKCHEVERHSPSTWTTGGKEPQMHP

SEQ ID NO: 329653 - DNA, 1593 bp, Artificial Sequence
  derived and/or modified sequence
atgcccaacgtgctgctgccccccaaggagagcaacctgttcaagagaatcctgaagtgctacgagcagaagcagtacaagaacggcctgaagttctgcaagatgatcctgagcaaccccaagttcgccgagcacggcgagaccctggccatgaagggcctgaccctgaactgcctgggcaagaaggaggaggcctacgagttcgtgagaaagggcctgagaaacgacgtgaagagccacgtgtgctggcacgtgtacggcctgctgcagagaagcgacaagaagtacgacgaggccatcaagtgctacagaaacgccctgaagctggacaaggacaacctgcagatcctgagagacctgagcctgctgcagatccagatgagagacctggagggctacagagagaccagataccagctgctgcagctgagacccacccagagagccagctggatcggctacgccatcgcctaccacctgctgaaggactacgacatggccctgaagctgctggaggagttcagacagacccagcaggtgccccccaacaagatcgactacgagtacagcgagctgatcctgtaccagaaccaggtgatgagagaggccgacctgctgcaggagagcctggagcacatcgagatgtacgagaagcagatctgcgacaagctgctggtggaggagatcaagggcgagatcctgctgaagctgggcagactgaaggaggccagcgaggtgttcaagaacctgatcgacagaaacgccgagaactggtgctactacgagggcctggagaaggccctgcagatcagcaccctggaggagagactgcagatctacgaggagatcagcaagcagcaccccaaggccatcacccccagaagactgcccctgaccctggtgcccggcgagagattcagagagctgatggacaagttcctgagagtgaacttcagcaagggctgcccccccctgttcaccaccctgaagagcctgtactacaacaccgagaaggtgagcatcatccaggagctggtgaccaactacgaggccagcctgaagacctgcgacttcttcagcccctacgagaacggcgagaaggagccccccaccaccctgctgtgggtgcagtacttcctggcccagcacttcgacaagctgggccagtacagcctggccctggactacatcaacgccgccatcgccagcacccccaccctgatcgagctgttctacatgaaggccaagatctacaagcacatcggcaacctgaaggaggccgccaagtggatggacgaggcccagagcctggacaccgccgacagattcatcaacagcaagtgcgccaagtacatgctgagagccaacatgatcaaggaggccgaggagatgtgcagcaagttcaccagagagggcaccagcgccatggagaacctgaacgagatgcagtgcatgtggttccagaccgagtgcatcagcgcctaccagagactgggcagatacggcgacgccctgaagaagtgccacgaggtggagagacacagccccagcacctggaccaccggcggcaaggagccccagatgcacccctag

SEQ ID NO: 329654 - DNA, 1593 bp, Artificial Sequence
  derived and/or modified sequence
atgcctaacgttctattgcccccgaaggagtccaacctgtttaagaggattctcaaatgctatgagcagaaacagtataaaaatggccttaagttctgcaagatgatcctttcaaatccaaagttcgccgagcacggagaaacgctcgcaatgaaaggactaacattaaactgcctcggcaaaaaagaagaagcgtacgagtttgtaagaaagggcctcagaaatgatgttaagtcccatgtctgttggcatgtctatggtctacttcagcggtccgataaaaagtacgatgaggcaataaagtgttaccggaatgcgcttaagttggacaaggataatcttcagatcttacgggatttaagtctcctgcaaatacagatgagagatcttgagggttaccgggagacaagataccaactactgcaactccgcccaacacagagggcgtcatggatcgggtacgccatcgcctaccacctgttgaaggattacgacatggccttgaagctactagaggagttccgccagacacaacaagtcccccctaataaaatagactacgagtatagcgaattgattctctatcagaaccaagtgatgcgtgaagccgacctcctacaggaaagtctggagcacatcgagatgtatgaaaagcagatttgcgacaagctgctggtcgaagagatcaagggcgaaatactcctgaagctggggcggttaaaggaagcttcagaggtctttaaaaatttaattgatcgaaatgccgagaactggtgctattacgagggactggagaaagccttacagatttcaactttagaggaacgcctacagatctacgaagagatctccaagcagcaccccaaggccattacaccacgaaggctgcctctaactttggtgccaggagaaagattccgagaattgatggacaagtttctgcgcgtgaattttagtaagggctgtccacctctgttcactactctgaaaagcttgtactataacacagaaaaggtcagtatcatccaagagctagtgacaaactatgaggcaagcctgaagacgtgtgacttcttcagtccctacgaaaatggtgaaaaagaaccaccaactaccttgctgtgggtgcagtattttcttgcacaacactttgacaagctcggacaatattcattagcactcgactacataaacgcggcaatcgcatctacgccgactctgatcgaacttttctacatgaaggctaaaatttataagcatatcggaaacctcaaagaggctgcaaagtggatggacgaggctcagagtctcgatactgcggaccggttcataaactcaaagtgtgctaaatacatgctgcgcgctaacatgattaaagaagccgaggagatgtgctcaaagtttacacgcgaagggacgtccgccatggagaatctcaacgagatgcagtgtatgtggtttcagaccgagtgtatctcagcttaccaaaggcttggtaggtacggcgacgctttgaagaaatgccatgaggtggaacgccactcaccatccacctggacaaccggcggaaaagagccgcagatgcacccatag

SEQ ID NO: 329655 - DNA, 1593 bp, Artificial Sequence
  derived and/or modified sequence
atgcccaacgtgctgctgccccccaaggagagcaacctcttcaagaggatcctgaagtgctatgagcagaagcagtacaagaatggcctgaagttctgcaagatgatcctgagcaaccccaagtttgctgagcacggggagaccctggccatgaagggcctgaccctgaactgcctgggcaagaaggaggaggcctatgaatttgtgaggaagggcctgagaaatgatgtgaagagccacgtgtgctggcacgtgtatggcctgctgcagaggagtgacaagaagtatgatgaggccatcaagtgctacagaaatgccctgaagctggacaaggacaacctgcagatcctgcgggacctgagcctgctgcagatccagatgagggacctggagggctaccgggagacccgctaccagctgctgcagctgcggcccacccagagggcctcctggattggctacgccatcgcctaccacctgctgaaggactatgacatggccctgaagctgctggaggagttccggcagacccagcaggtgccccccaacaagattgattatgagtacagcgagctgatcctgtaccagaaccaggtgatgagggaggccgacctgctgcaggagagcctggagcacatcgagatgtatgagaagcagatctgtgacaagctgctggtggaggagatcaagggggagatcctgctgaagctgggccgcctgaaggaggccagcgaggtgttcaagaacctgattgacagaaatgctgagaactggtgctactatgagggcctggagaaggccctgcagatcagcaccctggaggagcggctgcagatctatgaggagatcagcaagcagcaccccaaggccatcaccccccggcggctgcccctgaccctggtgcctggagagcgcttccgggagctgatggacaagttcctgcgggtgaacttcagcaagggctgccccccactcttcaccaccctgaagagcctgtactacaacacagagaaggtgtccatcatccaggagctggtgaccaactatgaggccagcctgaagacctgtgacttcttcagcccctatgaaaatggagagaaggagccccccaccaccctgctgtgggtgcagtacttcctggcccagcactttgacaagctgggccagtacagcctggccctggactacatcaatgctgccatcgccagcacccccaccctcatcgagctgttctacatgaaggccaagatctacaagcacatcggcaacctgaaggaggccgccaagtggatggatgaggcccagagcctggacacagctgaccgcttcatcaacagcaaatgtgccaagtacatgctgcgggccaacatgatcaaggaggccgaggagatgtgcagcaagttcacccgggagggcaccagcgccatggagaacctgaatgagatgcagtgcatgtggttccagacagagtgcatcagcgcctaccagaggctgggccgctatggagatgccctgaagaagtgccacgaggtggagcggcacagccccagcacctggaccactggaggcaaggagccccagatgcacccctag

SEQ ID NO: 329656 - DNA, 1917 bp, Artificial Sequence
  derived and/or modified sequence
aaagggcgctccgcgcatgcgcacaggatccggctcgggaggcggaccctggctgccatcttgcagtgcgcgggaaccgccgccgccgccgctggccaaaaagcggagcccaggggaagcgtgtcctgctcagaccgccttccttctccattgccacccgtgccgaacagccaggctgcccaattgcaactgtagaccaatgaactaatccatcgcccgcagcccgactctcagcagcggttcgtcccggtgcccacccccgcgaagcggagcgcccgggcacctagcctccctgccggccacctagcctccctgccggccacgatgccgaacgtgctgctgccgcccaaggagagcaacctcttcaaacgcatcttgaaatgttatgaacagaagcagtacaaaaatggcctcaagttttgcaagatgattctgtcgaacccaaaatttgctgaacatggagagactttggctatgaaaggattaacactgaactgtttaggaaaaaaagaagaagcttatgagtttgttcgtaaaggacttcgtaatgatgtcaagagtcatgtctgttggcatgtatatggactcttgcagcgttctgataaaaaatatgatgaagctataaaatgttaccgaaatgccctcaaattagataaagataacctgcaaattttgagggatctctcactgttgcagatccaaatgagagaccttgaaggttaccgagagacaagataccagcttcttcagttgcgccccacacagcgtgcctcctggattggatatgctattgcataccatttgctgaaagattatgatatggccctaaaactgttggaagaatttagacaaactcagcaagttcctccaaacaaaatagattatgaatatagtgaattgatattataccagaatcaagtgatgagagaggcagatctgttgcaggaatctttggaacatatagaaatgtatgagaaacaaatatgtgataaacttttggtggaagaaattaaaggggaaatactgttgaaattgggaagattaaaagaagccagtgaagtgttcaaaaacttgattgatcgaaatgcagaaaattggtgttattatgaaggcttggaaaaagctctacaaattagcactttagaagagaggcttcaaatttatgaagaaattagtaagcagcaccccaaagcaattacacccagaagattacctttgactcttgtcccaggtgaaagatttagagaactaatggataagttcctgagggttaacttcagtaaaggctgcccacccttgtttactactttgaaatctttatattacaatacagaaaaggtttctataatccaggaacttgttactaattatgaagcctctcttaaaacgtgtgacttttttagcccatatgagaatggggagaaggaacccccgacaacactactctgggttcagtatttcctggcacagcactttgataaacttggacagtattctttggctttggattatattaatgctgcaattgctagtactccaactctaatagaattattctatatgaaagcaaaaatttacaagcatataggtaatctcaaagaagctgcaaagtggatggatgaagcacagtctttggacacagctgatagattcatcaattccaaatgtgcaaaatacatgcttcgagcaaatatgataaaagaagcagaggaaatgtgctccaagttcacaagggaaggaacatctgccatggaaaatctaaatgaaatgcagtgtatgtggtttcagacagaatgcatttcagcttatcagcgtctggggagatacggggatgccttgaaaaaatgtcatgaagtagaaaggcactctccttccacatggaccacaggaggaaaagagccgcaaatgcacccctga

SEQ ID NO: 329657 - DNA, 1593 bp, Artificial Sequence
  derived and/or modified sequence
atgcccaacgtgctgctgccccccaaggagagcaacctgttcaagcgcatattgaaatgctacgaacagaaacaatacaagaacggactgaagttttgcaaaatgatcctgagtaatccgaagtttgcggagcatggagaaacccttgctatgaaaggcctaaccctcaactgccttggaaagaaagaagaggcatacgagttcgttcgaaagggcctgaggaatgacgtgaaatcccacgtctgctggcatgtgtacggattactgcaaaggagcgataagaagtatgatgaggctatcaaatgttatcggaatgcacttaagcttgataaggacaatctccaaatactaagagatctttctctattgcaaatccaaatgcgagacctggagggatatcgtgagacccgttaccagctgctgcagcttaggcctacccaacgcgccagttggattgggtatgctatcgcttatcatctcctgaaagactacgacatggctctcaagctccttgaggaattccgtcagacccagcaagtaccccccaataaaatcgactatgagtacagcgaattaattttataccagaatcaggtgatgcgggaagccgatcttctccaggagtcactggagcacatcgaaatgtatgagaagcagatctgtgacaagcttctggtagaagagattaaaggggaaattttgctaaaactcggccgcctaaaggaagcgtccgaagtgtttaagaatctcattgaccggaatgctgagaactggtgctactatgagggactcgagaaagcgctgcaaatcagtacccttgaggagcggctccaaatttacgaagagatttccaaacagcatcctaaagcgatcacgcccagaaggctgcctcttaccctggtgccgggagagaggttccgggagctgatggacaaatttctgcgggtgaacttttctaagggctgtccacctctgtttactactctcaaatcgttgtactacaataccgaaaaagtatccatcatccaggagttagttactaactacgaggcctctttgaagacttgtgattttttctctccatacgaaaacggagaaaaagagccacccaccactcttttgtgggttcagtacttcctcgcccagcacttcgataagctaggccaatattcacttgccctggattacatcaacgccgccatcgcctccactcctacactgattgaacttttctacatgaaggctaagatctacaagcacattggcaatctgaaggaggcagcaaagtggatggatgaagctcagtctctcgacacggcggatcgcttcataaactccaagtgcgccaagtacatgctacgcgcgaacatgataaaggaggcagaagagatgtgctctaagtttacacgagagggaacttccgccatggaaaatctcaatgagatgcagtgtatgtggtttcagaccgagtgtatctctgcctatcaaaggctaggtcgctatggtgatgcacttaaaaagtgccatgaagtcgaaaggcactccccttctacatggacaactggcggaaaagagccgcagatgcacccctag

SEQ ID NO: 329658 - DNA, 1593 bp, Artificial Sequence
  derived and/or modified sequence
atgcctaatgtgctgctccctccaaaagagtcgaacctgtttaaaagaatcttgaagtgctacgaacagaaacaatataagaatggccttaaattctgcaaaatgattttaagtaaccccaaatttgcagagcacggtgaaacgttagccatgaagggacttactctgaattgcttgggaaaaaaggaggaggcctacgaattcgtgagaaagggcctgcgtaatgacgtcaagagtcatgtctgctggcatgtgtatggattactgcagcgttcagataagaagtatgacgaggccattaagtgttatcgcaacgctttaaaactcgacaaggacaatctgcagatccttcgagatttaagtctcctacagatccaaatgcgggacctggagggctaccgcgagacccgctaccagcttttgcagctgcggccaacccagagggccagctggattggatatgccatcgcttatcacttgttgaaagactacgatatggcactgaaactgctggaggaattccggcaaactcagcaggttccccctaacaaaatagactatgaatacagtgagttgatcctgtatcaaaatcaggtcatgcgagaagctgatttgctacaagagtctttggagcacattgaaatgtacgagaagcagatttgcgacaagctgctcgtggaggaaatcaagggagagattctgctgaaactaggcaggttgaaggaagcctcagaggtgttcaaaaatttgattgataggaacgcggaaaactggtgttattatgagggacttgagaaggcattgcaaatttcaactctagaagagcgtctgcagatctacgaggagatttccaagcagcatcccaaggccattaccccacgtcgtttgcctctgacactagtgcccggtgaaagatttcgtgaactcatggacaagttcctgagagtgaacttctccaaggggtgtccacccctctttacaacgctgaagtcactgtactataacaccgagaaggtatcaatcattcaagagctggtgaccaactatgaggcctctttgaagacttgcgacttcttctctccttacgaaaacggggagaaagagccacccactaccctgctgtgggtgcagtactttctggcacagcatttcgacaagcttggccagtattcactggctctcgactacattaacgcagcaatcgccagtacgccaactctgattgaactcttttacatgaaagccaaaatctacaagcacatcggcaatctgaaggaggcagccaagtggatggacgaggcccagtctcttgataccgctgaccgcttcattaactcaaaatgtgctaaatacatgctccgtgctaatatgattaaagaagccgaggagatgtgcagcaagtttacaagagagggcacaagtgctatggagaacctgaacgaaatgcagtgcatgtggtttcagaccgaatgtatcagcgcctaccagaggctggggagatatggagatgctctaaagaagtgccatgaagttgaaaggcacagtccgtccacatggactactgggggtaaggagcctcaaatgcacccttag

SEQ ID NO: 329659 - protein, 50 aa, Artificial Sequence
  derived and/or modified sequence
MMQNVHLAPETDEDDLYSGYNDYNPIYDIEELENDAAFQQAVRTSHGRRP

SEQ ID NO: 329660 - DNA, 153 bp, Artificial Sequence
  derived and/or modified sequence
atgatgcagaacgtgcacctggcccccgagaccgacgaggacgacctgtacagcggctacaacgactacaaccccatctacgacatcgaggagctggagaacgacgccgccttccagcaggccgtgagaaccagccacggcagaagaccctag

SEQ ID NO: 329661 - DNA, 153 bp, Artificial Sequence
  derived and/or modified sequence
atgatgcagaacgtccacctggcaccggagaccgacgaagacgatctttacagcggttacaatgattataatccaatttacgatattgaggaactggagaatgacgccgccttccagcaggccgtccgaacttcacacgggaggcgcccgtag

SEQ ID NO: 329662 - DNA, 153 bp, Artificial Sequence
  derived and/or modified sequence
atgatgcagaatgtccacttggcacctgagaccgatgaggacgatctctactcggggtataatgactataatcctatctacgacattgaggaattagagaacgatgcggctttccagcaggctgtgcgaacatctcacggaaggagaccatag

SEQ ID NO: 329663 - DNA, 153 bp, Artificial Sequence
  derived and/or modified sequence
atgatgcagaatgtgcacctggcccctgagacagatgaagatgacctgtacagcggctacaatgactacaaccccatctatgacatcgaggagctggagaatgatgctgccttccagcaggccgtgaggaccagccacggccggcggccctag

SEQ ID NO: 329664 - DNA, 575 bp, Artificial Sequence
  derived and/or modified sequence
cgcgcttggcaacggctcggcgtcgcgctttggccaaccgctgcgtcgtccctgggcccgaataactgtcgcccgcttccctcagcgtgaggtgaagcacttcaaattgcctgatgaaagttgaatcaggaatgaagataaaagtacacaacaatgcagaaagcggtacttagcctcacaaagatggaaacattccaaaaacgtgaagtactgttgtcccaagattctttctaagcctaaaattacacttttactagtccgattttctggttgtgagttttttttgtttgttttttttttttcgagaaactgcagtaggcttcttggaagtagaccaagggtgtccaatctttggcttccctgggccacatcggaagaagaattgtcttgggccacacatgaaattcacaaacactaaggtacaaatgatgcaaaatgtgcacctggctccagagacagatgaagatgatctttattccggctataatgactacaatccaatctatgatatcgaggaattggagaatgatgcagcttttcagcaagctgtgaggactagtcatggcagaagacct

SEQ ID NO: 329665 - DNA, 153 bp, Artificial Sequence
  derived and/or modified sequence
atgatgcagaacgtgcacctggcccccgagaccgacgaggacgacctctactccggctataacgattacaatccaatttacgacattgaagaactagagaacgatgccgcctttcagcaggcagtgagaacctcacacgggcgaagaccctag

SEQ ID NO: 329666 - DNA, 153 bp, Artificial Sequence
  derived and/or modified sequence
atgatgcagaacgtgcacctggcccccgagaccgacgaggacgacctatactctggatataacgactataatcctatttatgatattgaagaattagaaaacgatgccgccttccagcaggcggtcaggaccagtcatggacgtcgtccatag

SEQ ID NO: 329667 - DNA, 153 bp, Artificial Sequence
  derived and/or modified sequence
atgatgcaaaacgtccaccttgcaccagaaaccgatgaggatgacctgtattccggctataacgattataatccaatttacgacattgaggaactggagaacgatgccgcattccaacaggccgtgcgtacttctcatggaagacggccttag

SEQ ID NO: 329668 - DNA, 153 bp, Artificial Sequence
  derived and/or modified sequence
atgatgcaaaatgtgcatcttgcaccagaaacagacgaggatgacctttactcaggatacaatgattacaatcctatttacgatattgaagaacttgaaaatgacgcagcttttcagcaagccgtgcgtacttcccacggcaggaggccttag

SEQ ID NO: 329669 - protein, 129 aa, Artificial Sequence
  derived and/or modified sequence
MLRLQMTDGHISCTAVEFSYMSKISLNTPPGTKVKLSGIVDIKNGFLLLNDSNTTVLGGEVEHLIEKWELQRSLSKHNRSNIGTEGGPPPFVPFGQKCVSHVQVDSRELDRRKTLQVTMPVKPTNDNDE

SEQ ID NO: 329670 - DNA, 390 bp, Artificial Sequence
  derived and/or modified sequence
atgctgagactgcagatgaccgacggccacatcagctgcaccgccgtggagttcagctacatgagcaagatcagcctgaacaccccccccggcaccaaggtgaagctgagcggcatcgtggacatcaagaacggcttcctgctgctgaacgacagcaacaccaccgtgctgggcggcgaggtggagcacctgatcgagaagtgggagctgcagagaagcctgagcaagcacaacagaagcaacatcggcaccgagggcggccccccccccttcgtgcccttcggccagaagtgcgtgagccacgtgcaggtggacagcagagagctggacagaagaaagaccctgcaggtgaccatgcccgtgaagcccaccaacgacaacgacgagtag

SEQ ID NO: 329671 - DNA, 390 bp, Artificial Sequence
  derived and/or modified sequence
atgcttcgcctgcagatgacggacggccacatttcctgcacagccgttgagttcagctacatgtctaaaatcagcctcaatacaccacccggcacaaaggtgaagctttctggaatcgtagacatcaaaaacgggtttctcttgctaaacgacagcaacaccacagtactgggtggggaggtggagcatctaatagagaagtgggagctgcaacgaagcttaagcaaacacaaccgctccaacataggaactgagggtgggccaccaccattcgtgcctttcggccagaaatgtgtgagtcacgtgcaagtcgattccagagaactggatcggcgaaaaacgttacaggtgacgatgccggtaaaaccaactaacgacaatgatgaatag

SEQ ID NO: 329672 - DNA, 390 bp, Artificial Sequence
  derived and/or modified sequence
atgctgcggctgcagatgacagatggccacatcagctgcacagctgtggagttctcctacatgagcaagatcagcctgaacaccccacctggcaccaaggtgaagctgtctggaattgtggacatcaagaatggcttcctgctgctgaatgacagcaacaccaccgtgctgggcggggaggtggagcacctgattgagaagtgggagctgcagaggagcctgagcaagcacaacagaagcaacatcggcacagagggcggccccccaccatttgtgcccttcggccagaagtgtgtgagccacgtgcaggtggacagccgggagctggacaggaggaagaccctgcaggtgaccatgcctgtgaagcccaccaatgacaatgatgaatag

SEQ ID NO: 329673 - DNA, 390 bp, Artificial Sequence
  derived and/or modified sequence
atgctgcggctgcagatgaccgacggccacatcagctgcaccgccgttgaatttagttatatgtctaaaatctccctgaacaccccgccgggaaccaaagtgaagctctctggtatcgtggacatcaaaaacggatttctactgctaaacgactcaaatactactgtattgggaggggaggttgagcatctgattgaaaaatgggagctgcaacgatctctctctaagcataatagaagcaacatcggcaccgaggggggcccacctcctttcgtcccctttggccagaaatgtgtctcccacgtgcaggtcgacagcagagagctggatcgtcgcaagaccctccaggtgacgatgcccgtgaaacctacaaacgataatgacgagtag

SEQ ID NO: 329674 - DNA, 390 bp, Artificial Sequence
  derived and/or modified sequence
atgttgcggttacaaatgaccgatggtcacattagctgcacagccgtcgagttctcctacatgagcaagatcagcctaaacacacctcctggcactaaagtgaagctgtctgggatcgtggacatcaaaaatggattccttcttctgaatgacagcaacactaccgtattaggaggtgaagttgagcacttgattgaaaagtgggaactgcagaggtctttgtctaaacacaatcgatctaatattgggacagaaggcggtcctccccctttcgtaccatttgggcagaagtgtgtctcgcacgtgcaggtggacagcagagagctggatagacgcaaaacccttcaggtgactatgccagtgaagccaaccaacgacaacgacgagtag

SEQ ID NO: 329675 - protein, 1016 aa, Artificial Sequence
  derived and/or modified sequence
MERHQPRLHHPAQGSAAGTPYPSSASLRGCRESKMPRRKGPQHPPPPSGPEEPGEKRPKFHLNIRTLTDDMLDKFASIRIPGSKKERPPLPNLKTAFASSDCSAAPLEMMENFPKPLSENELLELFEKMMEDMNLNEDKKAPLREKDFSIKKEMVMQYINTASKTGSLKRSRQISPQEFIHELKMGSADERLVTCLESLRVSLTSNPVSWVESFGHEGLGLLLDILEKLISGKIQEKVVKKNQHKVIQCLKALMNTQYGLERIMSEERSLSLLAKAVDPRHPNMMTDVVKLLSAVCIVGEESILEEVLEALTSAGEEKKIDRFFCIVEGLRHNSVQLQVACMQLINALVTSPDDLDFRLHIRNEFMRCGLKEILPNLKCIKNDGLDIQLKVFDEHKEEDLFELSHRLEDIRAELDEAYDVYNMVWSTVKETRAEGYFISILQHLLLIRNDYFIRQQYFKLIDECVSQIVLHRDGMDPDFTYRKRLDLDLTQFVDICIDQAKLEEFEEKASELYKKFEKEFTDHQETQAELQKKEAKINELQAELQAFKSQFGALPADCNIPLPPSKEGGTGHSALPPPPPLPSGGGVPPPPPPPPPPPLPGMRMPFSGPVPPPPPLGFLGGQNSPPLPILPFGLKPKKEFKPEISMRRLNWLKIRPHEMTENCFWIKVNENKYENVDLLCKLENTFCCQQKERREEEDIEEKKSIKKKIKELKFLDSKIAQNLSIFLSSFRVPYEEIRMMILEVDETRLAESMIQNLIKHLPDQEQLNSLSQFKSEYSNLCEPEQFVVVMSNVKRLRPRLSAILFKLQFEEQVNNIKPDIMAVSTACEEIKKSKSFSKLLELVLLMGNYMNAGSRNAQTFGFNLSSLCKLKDTKSADQKTTLLHFLVEICEEKYPDILNFVDDLEPLDKASKVSVETLEKNLRQMGRQLQQLEKELETFPPPEDLHDKFVTKMSIFVISAKEQYETLSKLHENMEKLYQSIIGYYAIDVKKVSVEDFLTDLNNFRTTFMKAIKFQI

SEQ ID NO: 329676 - protein, 1097 aa, Artificial Sequence
  derived and/or modified sequence
MEQPGAAASGAGGGSEEPGGGRSNKRSAGNRAANEEETKNKPKLRDRITSFRKSTVKKEKPLIQHPIDSQVAMSEFPAAQPLYDERSLNLSEKEVLDLFEKMMEDMNLNEEKKAPLRNKDFTTKREMVVQYISATAKSVISSHIKGGLKNSKHECTLSSQEYVHELRSGISDEKLLNCLESLRVSLTSNPVSWVNNFGHEGLGLLLDELEKLLDKKQQENIDKKNQYKLIQCLKAFMNNKFGLQRILGDERSLLLLARAIDPKQPNMMTEIVKILSAICIVGEENILDKLLGAITTAAERNNRERFSPIVEGLENQEALQLQVACMQFINALVTSPYELDFRIHLRNEFLRSGLKTMLPDLKEKENDELDIQLKVFDENKEDDLTELSHRLNDIRAEMDDMNEVYHLLYNMLKDTAAENYFLSILQHFLLIRNDYYIRPQYYKIIEECVSQIVLHCSGMDPDFKYRQRLDIDLTHLIDSCVNKAKVEESEQKAAEFSKKFDEEFTARQEAQAELQKRDEKIKELEAEIQQLRTQAQVLSSSSGIPGPPAAPPLPGVGPPPPPPAPPLPGGAPLPPPPPPLPGMMGIPPPPPPPLLFGGPPPPPPLGGVPPPPGISLNLPYGMKQKKMYKPEVSMKRINWSKIEPTELSENCFWLRVKEDKFENPDLFAKLALNFATQIKVQKNAEALEEKKTGPTKKKVKELRILDPKTAQNLSIFLGSYRMPYEDIRNVILEVNEDMLSEALIQNLVKHLPEQKILNELAELKNEYDDLCEPEQFGVVMSSVKMLQPRLSSILFKLTFEEHINNIKPSIIAVTLACEELKKSESFNRLLELVLLVGNYMNSGSRNAQSLGFKINFLCKIRDTKSADQKTTLLHFIADICEEKYRDILKFPEELEHVESASKVSAQILKSNLASMEQQIVHLERDIKKFPQAENQHDKFVEKMTIFTKTAREQYEKLSTMHNNMMKLYENLGEYFIFDSKTVSIEEFFGDLNNFRTLFLEAVRENNKRREMEEKTRRAKLAKEKAEQEKLERQKKKKQLIDINKEGDETGVMDNLLEALQSGAAFRDRRKRIPRNPDNRRVPLERSRSRHNGAISSK

SEQ ID NO: 329677 - protein, 1103 aa, Artificial Sequence [sequence omitted]

SEQ ID NO: 329678 - DNA, 897 bp, Artificial Sequence
  derived and/or modified sequence
agcggcagaggccaccccagcgagccccccgccagcgacggccccgccggctgctgcagcggcagcaaggacgtggtgatcaaggcccaggtgctggccggcggcagaggcaagggcaccttcgagagcggcctgaagggcggcgtgaagatcgtgttcagccccgaggaggccaaggccgtgagcagccagatgatcggcaagaagctgttcaccaagcagaccggcgagaagggcagaatctgcaaccaggtgctggtgtgcgagagaaagtaccccagaagagagtactacttcgccatcaccatggagagaagcttccagggccccgtgctgatcggcagcagccacggcggcgtgaacatcgaggacgtggccgccgagagccccgaggccatcatcaaggagcccatcgacatcgaggagggcatcaagaaggagcaggccctgcagctggcccagaagatgggcttcccccccaacatcgtggagagcgccgccgagaacatggtgaagctgtacagcctgttcctgaagtacgacgccaccatgatcgagatcaaccccatggtggaggacagcgacggcgccgtgctgtgcatggacgccaagatcaacttcgacagcaacagcgcctacagacagaagaagatcttcgacctgcaggactggacccaggaggacgagagagacaaggacgccgccaaggccaacctgaactacatcggcctggacggcaacatcggctgcctggtgaacggcgccggcctggccatggccaccatggacatcatcaagctgcacggcggcacccccgccaacttcctggacgtgggcggcggcgccaccgtgcaccaggtgaccgaggccttcaagctgatcaccagcgacaagtag

SEQ ID NO: 329679 - DNA, 897 bp, Artificial Sequence
  derived and/or modified sequence
agcggccgaggacaccctagcgaaccgcctgcaagcgatggcccagcgggctgttgtagcggttcaaaagatgtggtgataaaggctcaagtcctcgctgggggacggggcaagggtacattcgaaagtggacttaagggcggtgtaaaaattgttttctcgcccgaagaggcaaaagccgtgagctcacagatgatcggaaagaagttattcaccaagcagacaggggagaagggccggatctgtaaccaggttctggtctgcgagcggaagtaccctagaagagagtactactttgccattaccatggaacggagcttccaagggcccgtcctgattggaagttctcacggcggcgtgaatatcgaggacgtagctgcggagtcaccagaggcgataatcaaggaaccaattgacatcgaggagggaattaagaaagagcaggctctccagctcgcacagaaaatgggctttccccccaatatagtggagtcagcggctgaaaacatggttaaattgtactctctgtttctgaagtatgacgccaccatgatcgagattaatccaatggttgaagattcagacggcgccgtgctttgtatggatgcgaaaatcaatttcgactccaactccgcttaccggcagaagaaaatatttgacttgcaggattggacccaggaggatgagcgagacaaggatgcagcgaaggccaatctgaactacataggcttggacggcaacattggatgtctggtcaatggtgctggacttgctatggccactatggatatcatcaagctacacgggggcactccagctaattttctggatgtgggagggggggcaacagtgcatcaggttaccgaggcttttaagctgattacgtctgacaaatag

SEQ ID NO: 329680 - DNA, 897 bp, Artificial Sequence
  derived and/or modified sequence
tctggccggggccaccccagcgagcccccagccagtgatggccctgctggctgctgcagcggcagcaaggatgtggtgatcaaggcccaggtgctggccggcggccggggcaagggcacctttgaaagtggcctgaagggcggcgtgaagatcgtgttcagccctgaggaggccaaggctgtgagcagccagatgattggcaagaagctgttcaccaagcagacaggagagaagggccgcatctgcaaccaggtgctggtgtgtgagaggaagtacccccggcgggagtactactttgccatcaccatggagaggagcttccagggccctgtgctgattggcagcagccatggaggagtgaacattgaagatgtggccgctgagagccctgaggccatcatcaaggagcccatcgacatcgaggagggcatcaagaaggagcaggccctgcagctggcccagaagatgggcttcccccccaacatcgtggagagcgctgctgagaacatggtgaagctgtacagcctcttcctgaagtatgatgccaccatgattgagatcaaccccatggtggaggacagtgatggagctgtgctgtgcatggatgccaagatcaactttgacagcaacagcgcctaccggcagaagaagatctttgacctgcaggactggacccaggaggatgagcgggacaaggatgctgccaaggccaacctgaactacatcggcctggatggcaacatcggctgcctggtgaatggagctggcctggccatggccaccatggacatcatcaagctgcacggcggcaccccagccaacttcctggatgtgggcggcggggccaccgtgcaccaggtgacagaggccttcaagctgatcaccagtgacaagtag

SEQ ID NO: 329681 - DNA, 897 bp, Artificial Sequence
  derived and/or modified sequence
agcggccggggccaccccagcgagccccccgccagcgacggccccgccgggtgctgttccgggtctaaggatgtggttataaaagcgcaggtacttgcaggaggaagggggaaggggacctttgagtctggccttaaaggaggcgtgaaaatagtgttcagtcctgaggaggccaaagctgtctcttcacagatgatcggcaagaagctgttcactaagcagaccggagagaaaggtaggatttgtaaccaagtcttggtgtgcgagcggaagtaccctcgacgcgagtactactttgcaatcacgatggagcgcagttttcaaggacctgtgctcatcggaagcagtcacggtggtgtgaacatcgaagacgtggccgcagaatcgcccgaggcaattatcaaggagccaattgacatcgaggagggtatcaagaaggagcaagcactgcaactggcccagaaaatggggttccctcccaatattgtggagtcagccgccgagaacatggttaaactttattccctcttccttaagtatgatgccacaatgattgagattaacccgatggttgaagactctgatggtgcagtgctatgcatggacgctaagatcaactttgatagtaatagcgcttaccgtcagaaaaagatttttgatctgcaggattggacccaggaggatgagcgggataaggacgctgccaaagctaacctcaattacatcggactggacggcaatatcggatgccttgtgaacggagccggtttagccatggctaccatggacattattaagctacacggagggactccggcaaactttctcgacgtgggcggaggagccaccgttcaccaggtcactgaggcgtttaagcttatcaccagtgataagtag

SEQ ID NO: 329682 - DNA, 897 bp, Artificial Sequence
  derived and/or modified sequence
agcggcaggggacacccctctgaaccccctgccagtgacggtcccgcagggtgttgctctggatcaaaagatgttgttattaaggcgcaggtcctggccggaggaaggggaaagggcacatttgaatctggattgaagggaggagtgaagatagtattctcccctgaagaagctaaggcggtgtcgtcacagatgatcggcaagaagctttttaccaagcaaactggggagaaggggcgtatctgcaaccaggttctcgtctgtgaacgaaagtatccacgcagagagtattacttcgcgataacgatggagagatcattccagggacccgtcctcatcggctcaagccacggaggcgtgaacatcgaggatgtggctgctgagtcgccagaggccataatcaaggaacccatcgatatagaggaaggcatcaaaaaagagcaagccctgcagctcgctcagaaaatgggctttccgcctaatatagtggagtccgccgctgagaacatggtaaagctttactccctctttctgaaatacgatgctaccatgatagaaatcaaccccatggtggaggacagcgacggcgcagtgctctgcatggacgccaagatcaacttcgactccaactctgcgtatcggcagaaaaagatctttgacctccaggattggacccaggaagacgaacgcgacaaagatgctgccaaggccaatctcaactacatcggcttggacggaaacattggctgcctggtcaatggagccggactggccatggccacgatggacatcatcaagttgcacggcggaacccccgctaacttcctagatgttggcggaggggctacggttcaccaggtcaccgaggcctttaagctgattacctccgacaagtag

SEQ ID NO: 329683 - DNA, 1952 bp, Artificial Sequence
  derived and/or modified sequence
gccgaggggacggggtccgactcagaaatggcggcctccatgttctacggcaggctagtggccgtggccacccttcggaaccaccggcctcggacggcccagcgggctgctgctcaggttcaaaagatgtcgtgataaaggcacaggttttagctggtggtagaggaaaaggaacatttgaaagtggcctcaaaggaggagtgaagatagttttctctccagaagaagcaaaagctgtttcttcacaaatgattgggaaaaaattgtttaccaagcaaacgggagaaaagggcagaatatgcaatcaagtattggtctgtgagcgaaaatatcccaggagagaatactactttgcaataacaatggaaaggtcatttcaaggtcctgtattaataggaagttcacatggtggtgtcaacattgaagatgttgctgctgagtctcctgaagcaataattaaagaacctattgatattgaagaaggcatcaaaaaggaacaagctctccagcttgcacagaagatgggatttccacctaatattgtggaatcagcagcagaaaacatggtcaagctttacagcctttttctgaaatacgatgcaaccatgatagaaataaatccaatggtggaagattcagatggagctgtattgtgtatggatgcaaagatcaattttgactctaattcagcctatcgccaaaagaaaatctttgatctacaggactggacccaggaagatgaaagggacaaagatgctgctaaggcaaatctcaactacattggcctcgatggaaatataggctgcctagtaaatggtgctggtttggctatggccacaatggatataataaaacttcatggagggactccagccaacttccttgatgttggtggtggtgctacagtccatcaagtaacagaagcatttaagcttatcacttcagataaaaaggtactggctattctggtcaacatttttggaggaatcatgcgctgtgatgttattgcacagggtatagtcatggcagtaaaagacttggaaattaaaatacctgttgtggtacggttacaaggtacacgagtcgatgatgctaaggcactgatagcggacagtggacttaaaatacttgcttgtgatgacttggatgaagctgctagaatggttgtaaagctctctgaaatagtgaccttagcgaagcaagcacatgtggatgtgaaatttcagttgccaatatgatctgaaaacccagtggatggctgaaggtgttaaatgtgctataatcattaagaatactgtgttctgtgttattgttctttttctttttagtgtgtggagattgtaattgccatctaggcacacaaacatttaaaaggatttggactgcatttaattgtaccattcagaatggactgtttgtacgaagcatgtataatgcagttatcttctttcttttgtcgcagccagtcttttttgcttctcctacaaaacgtaacttgcaatttgccagtttattattgttggatacaaagttcttcattgataagagtcctataaataagataaatacgaagataaagctttattctttagtgttaaaatacagtatatctaataactagcctcattagtagagcagtatattaaaacaatgttttatgtaaaaagtgtttatcttcagcaccaaatacatgataaatgtatcaatcactatttataaacagagctttcaaacactcctcagaatattcttctaagtattttgatgaagtaactttgtaattatttgaacattgttttaatcattaggaaacactgattaactgcaagtcttcatgattctgtcatattaagaaacacctgtaggtttgcttcaaataaaggcatatataccaaggacttacagacaaaattaagaatgtcaatttaagttaataaaaatctcccaatatg

SEQ ID NO: 329684 - DNA, 1890 bp, Artificial Sequence
  derived and/or modified sequence
gacggggtccgactcagaaatggcggcctccatgttctacggcaggctagtggccgtggccacccttcggaaccaccggcctcggacggcccagcgggctgctgctcaggttctgggaagttctggattgtttaataaccatggactccaagtacagcagcaacagcaaaggaatctctcactacatgaatacatgagtatggaattattgcaagaagctggtgtctccgttcccaaaggatatgtggcaaagtcaccagatgaagcttatgcaattgccaaaaaattaggtacagaagaaagaaataatatgtgcaggataaactgtaactatgagtatttctggcaagttctctgggaccagaactcacaagtaataagaagcaggttcaaaagatgtcgtgataaaggcacaggttttagctggtggtagaggaaaaggaacatttgaaagtggcctcaaaggaggagtgaagatagttttctctccagaagaagcaaaagctgtttcttcacaaatgattgggaaaaaattgtttaccaagcaaacgggagaaaagggcagaatatgcaatcaagtattggtctgtgagcgaaaatatcccaggagagaatactactttgcaataacaatggaaaggtcatttcaaggtcctgtattaataggaagttcacatggtggtgtcaacattgaagatgttgctgctgagtctcctgaagcaataattaaagaacctattgatattgaagaaggcatcaaaaaggaacaagctctccagcttgcacagaagatgggatttccacctaatattgtggaatcagcagcagaaaacatggtcaagctttacagcctttttctgaaatacgatgcaaccatgatagaaataaatccaatggtggaagattcagatggagctgtattgtgtatggatgcaaagatcaattttgactctaattcagcctatcgccaaaagaaaatctttgatctacaggactggacccaggaagatgaaagggacaaagatgctgctaaggcaaatctcaactacattggcctcgatggaaatataggctgcctagtaaatggtgctggtttggctatggccacaatggatataataaaacttcatggagggactccagccaacttccttgatgttggtggtggtgctacagtccatcaagtaacagaagcatttaagcttatcacttcagataaaaaggtactggctattctggtcaacatttttggaggaatcatgcgctgtgatgttattgcacagggtatagtcatggcagtaaaagacttggaaattaaaatacctgttgtggtacggttacaaggtacacgagtcgatgatgctaaggcactgatagcggacagtggacttaaaatacttgcttgtgatgacttggatgaagctgctagaatggttgtaaagctctctgaaatagtgaccttagcgaagcaagcacatgtggatgtgaaatttcagttgccaatatgatctgaaaacccagtggatggctgaaggtgttaaatgtgctataatcattaagaatactgtgttctgtgttattgttctttttctttttagtgtgtggagattgtaattgccatctaggcacacaaacatttaaaaggatttggactgcatttaattgtaccattcagaatggactgtttgtacgaagcatgtataatgcagttatcttctttcttttgtcgcagccagtcttttttgcttctcctacaaaacgtaacttgcaatttgccagtttattattgttggatacaaagttcttcattgataagagtcctataaataagataaatacgaagataaagctttattctttagtgttaaaatacagtatatctaataacta

SEQ ID NO: 329685 - DNA, 465 bp, Artificial Sequence
  derived and/or modified sequence
atggccgccagcatgttctacggcagactggtggccgtggccaccctgagaaaccacagacccagaaccgcccagagagccgccgcccagggccccgtgctgatcggcagcagccacggcggcgtgaacatcgaggacgtggccgccgagagccccgaggccatcatcaaggagcccatcgacatcgaggagggcatcaagaaggagcaggccctgcagctggcccagaagatgggcttcccccccaacatcgtggagagcgccgccgagaacatggtgaagctgtacagcctgttcctgaagtacgacgccaccatgatcgagatcaaccccatggtggaggacagcgacggcgccgtgctgtgcatggacgccaagatcaacttcgacagcaacagcgcctacagacagaagaagatcttcgacctgcaggactggacccaggaggacgagagagacaagtag

SEQ ID NO: 329686 - DNA, 876 bp, Artificial Sequence
  derived and/or modified sequence
atggagagaagcttccagggccccgtgctgatcggcagcagccacggcggcgtgaacatcgaggacgtggccgccgagagccccgaggccatcatcaaggagcccatcgacatcgaggagggcatcaagaaggagcaggccctgcagctggcccagaagatgggcttcccccccaacatcgtggagagcgccgccgagaacatggtgaagctgtacagcctgttcctgaagtacgacgccaccatgatcgagatcaaccccatggtggaggacagcgacggcgccgtgctgtgcatggacgccaagatcaacttcgacagcaacagcgcctacagacagaagaagatcttcgacctgcaggactggacccaggaggacgagagagacaaggacgccgccaaggccaacctgaactacatcggcctggacggcaacatcggctgcctggtgaacggcgccggcctggccatggccaccatggacatcatcaagctgcacggcggcacccccgccaacttcctggacgtgggcggcggcgccaccgtgcaccaggtgaccgaggccttcaagctgatcaccagcgacaagaaggtgctggccatcctggtgaacatcttcggcggcatcatgagatgcgacgtgatcgcccagggcatcgtgatggccgtgaaggacctggagatcaagatccccgtggtggtgagactgcagggcaccagagtggacgacgccaaggccctgatcgccgacagcggcctgaagatcctggcctgcgacgacctggacgaggccgccagaatggtggtgaagctgagcgagatcgtgaccctggccaagcaggcccacgtggacgtgaagttccagctgcccatctag

SEQ ID NO: 329687 - DNA, 990 bp, Artificial Sequence
  derived and/or modified sequence
atgatcggcaagaagctgttcaccaagcagaccggcgagaagggcagaatctgcaaccaggtgctggtgtgcgagagaaagtaccccagaagagagtactacttcgccatcaccatggagagaagcttccagggccccgtgctgatcggcagcagccacggcggcgtgaacatcgaggacgtggccgccgagagccccgaggccatcatcaaggagcccatcgacatcgaggagggcatcaagaaggagcaggccctgcagctggcccagaagatgggcttcccccccaacatcgtggagagcgccgccgagaacatggtgaagctgtacagcctgttcctgaagtacgacgccaccatgatcgagatcaaccccatggtggaggacagcgacggcgccgtgctgtgcatggacgccaagatcaacttcgacagcaacagcgcctacagacagaagaagatcttcgacctgcaggactggacccaggaggacgagagagacaaggacgccgccaaggccaacctgaactacatcggcctggacggcaacatcggctgcctggtgaacggcgccggcctggccatggccaccatggacatcatcaagctgcacggcggcacccccgccaacttcctggacgtgggcggcggcgccaccgtgcaccaggtgaccgaggccttcaagctgatcaccagcgacaagaaggtgctggccatcctggtgaacatcttcggcggcatcatgagatgcgacgtgatcgcccagggcatcgtgatggccgtgaaggacctggagatcaagatccccgtggtggtgagactgcagggcaccagagtggacgacgccaaggccctgatcgccgacagcggcctgaagatcctggcctgcgacgacctggacgaggccgccagaatggtggtgaagctgagcgagatcgtgaccctggccaagcaggcccacgtggacgtgaagttccagctgcccatctag

SEQ ID NO: 329688 - DNA, 465 bp, Artificial Sequence
  derived and/or modified sequence
atggcggctagtatgttttacgggcgacttgtggccgtagccactttgcgaaaccatcggccgcggactgcgcaacgagccgccgcacaggggccggtcttgatcggcagcagtcacggcggtgtgaacatcgaggatgttgctgcggagtcccctgaggctataatcaaggagcccatcgatattgaggaagggattaaaaaagaacaggcattgcagctcgcccaaaagatgggcttcccaccaaacattgtcgagtccgcggcagagaacatggtgaagctgtatagcttatttctgaagtacgatgctactatgatcgagattaacccaatggtggaagatagcgacggagcagttctgtgcatggatgcaaagataaacttcgactccaactctgcctataggcagaagaagatcttcgatctgcaggactggacacaggaggatgagcgggataagtag

SEQ ID NO: 329689 - DNA, 876 bp, Artificial Sequence
  derived and/or modified sequence
atggaacgctcattccagggtccggttcttatcggctcctcccacggtggagtgaacatcgaagatgtggcagctgaatctccggaggcaatcattaaagaacccatcgacatagaggaaggtatcaagaaggaacaagctctccaactggcccagaaaatgggctttcctcccaatattgtggagagcgctgcggagaatatggttaagctgtactcccttttccttaagtatgatgcgacaatgattgagattaatccgatggtcgaggactcagacggggcggtcttatgcatggatgcaaaaatcaattttgactccaacagcgcatataggcagaagaagattttcgacttgcaggactggacccaggaggacgagcgcgataaagatgctgcaaaagcaaacctgaactacataggactggacggcaatattggctgcctcgtaaacggagcaggccttgccatggctaccatggatatcatcaaacttcacggcgggactccagccaattttctcgacgtcggaggtggagcaacagtacaccaggttaccgaggcgtttaagctcatcacgagcgataaaaaagttctcgccatactggtgaacatcttcggtggcattatgagatgcgacgtcatcgctcagggcatagtgatggctgtcaaggatctcgaaattaagatccctgttgtggtaaggctccagggcacaagagtggatgacgccaaggccttgatcgcagactcgggccttaagattcttgcctgcgacgacctggacgaagcagcccggatggtggtcaagctgagtgagatcgtgaccctggcaaagcaggcccacgtggatgttaagttccagctgcccatctag

SEQ ID NO: 329690 - DNA, 990 bp, Artificial Sequence
  derived and/or modified sequence
atgatcggcaagaagcttttcacaaagcagaccggtgagaagggtagaatctgcaatcaggttctggtatgcgagcggaaatacccgcggcgcgaatattacttcgcaataaccatggagcggtcatttcaagggcccgttctaatcgggtcaagccatggtggcgttaatattgaggatgtagccgctgaatcccccgaggccatcattaaggagcccattgatatcgaagaaggcatcaaaaaggaacaggcgctgcaactggcccaaaaaatgggcttccccccaaatatcgtcgaaagtgccgccgagaatatggtgaagctctattccctctttctcaaatacgacgccacaatgattgagattaatcctatggtcgaggacagcgacggtgccgtgctgtgcatggacgctaaaatcaacttcgacagcaactccgcctatcgacaaaagaagatcttcgacctgcaagattggactcaggaagatgagagagacaaggatgctgccaaagctaatctgaattacattggcctggacggtaacattggctgtctcgtcaacggtgccggattggcgatggccacgatggatatcataaagctgcacgggggcaccccagcgaactttttggatgtgggcggaggcgctacagtgcatcaagtgaccgaagctttcaagttgatcacaagtgataagaaagtgttagctattctcgtgaatatatttggtgggataatgaggtgcgacgtgatcgcccagggcatcgtgatggccgttaaggacttagaaatcaagatcccagtggtggtgcgtctgcagggaacacgggtcgatgacgctaaggccctgatcgccgattcaggactgaagattctggcatgtgatgatctggatgaagccgccagaatggtggtgaaactatccgaaatagtgacattggccaaacaggctcacgtcgatgttaagttccagctacctatttag

SEQ ID NO: 329691 - DNA, 465 bp, Artificial Sequence
  derived and/or modified sequence
atggccgcctccatgttttatggccgcctggtggccgtggccaccctgaggaaccaccggcccaggacagcccagagagctgctgcccagggccctgtgctgattggcagcagccatggaggagtgaacattgaagatgtggccgctgagagccctgaggccatcatcaaggagcccatcgacatcgaggagggcatcaagaaggagcaggccctgcagctggcccagaagatgggcttcccccccaacatcgtggagagcgctgctgagaacatggtgaagctgtacagcctcttcctgaagtatgatgccaccatgattgagatcaaccccatggtggaggacagtgatggagctgtgctgtgcatggatgccaagatcaactttgacagcaacagcgcctaccggcagaagaagatctttgacctgcaggactggacccaggaggatgagcgggacaagtag

SEQ ID NO: 329692 - DNA, 876 bp, Artificial Sequence
  derived and/or modified sequence
atggagaggagcttccagggccctgtgctgattggcagcagccatggaggagtgaacattgaagatgtggccgctgagagccctgaggccatcatcaaggagcccatcgacatcgaggagggcatcaagaaggagcaggccctgcagctggcccagaagatgggcttcccccccaacatcgtggagagcgctgctgagaacatggtgaagctgtacagcctcttcctgaagtatgatgccaccatgattgagatcaaccccatggtggaggacagtgatggagctgtgctgtgcatggatgccaagatcaactttgacagcaacagcgcctaccggcagaagaagatctttgacctgcaggactggacccaggaggatgagcgggacaaggatgctgccaaggccaacctgaactacatcggcctggatggcaacatcggctgcctggtgaatggagctggcctggccatggccaccatggacatcatcaagctgcacggcggcaccccagccaacttcctggatgtgggcggcggggccaccgtgcaccaggtgacagaggccttcaagctgatcaccagtgacaagaaggtgctggccatcctggtgaacatctttggaggcatcatgagatgtgatgtgattgcccagggcatcgtgatggctgtgaaggacctggagatcaagatccctgtggtggtgcggctgcagggcaccagggtggatgatgccaaggccctgattgctgacagcggcctgaagatcctggcctgtgatgacctggatgaggccgccaggatggtggtgaagctgtctgagatcgtgaccctggccaagcaggcccacgtggatgtgaagttccagctgcccatctag

SEQ ID NO: 329693 - DNA, 990 bp, Artificial Sequence
  derived and/or modified sequence
atgattggcaagaagctgttcaccaagcagacaggagagaagggccgcatctgcaaccaggtgctggtgtgtgagaggaagtacccccggcgggagtactactttgccatcaccatggagaggagcttccagggccctgtgctgattggcagcagccatggaggagtgaacattgaagatgtggccgctgagagccctgaggccatcatcaaggagcccatcgacatcgaggagggcatcaagaaggagcaggccctgcagctggcccagaagatgggcttcccccccaacatcgtggagagcgctgctgagaacatggtgaagctgtacagcctcttcctgaagtatgatgccaccatgattgagatcaaccccatggtggaggacagtgatggagctgtgctgtgcatggatgccaagatcaactttgacagcaacagcgcctaccggcagaagaagatctttgacctgcaggactggacccaggaggatgagcgggacaaggatgctgccaaggccaacctgaactacatcggcctggatggcaacatcggctgcctggtgaatggagctggcctggccatggccaccatggacatcatcaagctgcacggcggcaccccagccaacttcctggatgtgggcggcggggccaccgtgcaccaggtgacagaggccttcaagctgatcaccagtgacaagaaggtgctggccatcctggtgaacatctttggaggcatcatgagatgtgatgtgattgcccagggcatcgtgatggctgtgaaggacctggagatcaagatccctgtggtggtgcggctgcagggcaccagggtggatgatgccaaggccctgattgctgacagcggcctgaagatcctggcctgtgatgacctggatgaggccgccaggatggtggtgaagctgtctgagatcgtgaccctggccaagcaggcccacgtggatgtgaagttccagctgcccatctag

SEQ ID NO: 329694 - DNA, 465 bp, Artificial Sequence
  derived and/or modified sequence
atggccgccagcatgttctacggccggctggtggccgtggccacccttcggaatcaccgcccaagaacagcccaacgtgctgctgctcaggggccagtgctgatcgggtctagtcacggcggggtgaacatcgaggatgtggctgcagagtctcccgaagcaatcatcaaagaacccattgacatagaagaagggataaaaaaagagcaggccctgcagctggcccaaaagatggggtttcccccaaacattgtagagtctgctgcggaaaacatggtgaagctatacagcctgttcctgaagtacgacgctacaatgatagagattaatccaatggtagaggattcagacggagcagtgctgtgcatggacgcaaaaatcaacttcgattccaatagcgcttacaggcagaagaaaatctttgacttgcaggactggacccaggaagacgagcgggacaaatag

SEQ ID NO: 329695 - DNA, 876 bp, Artificial Sequence
  derived and/or modified sequence
atggagcggagcttccagggccccgtgctgatcggcagcagccacggcggagtcaacatagaagatgtcgcagccgaaagccctgaagcaattatcaaggagcctatcgatattgaggaaggcataaagaaagaacaggcactacagctggcgcaaaagatgggatttccccccaacatcgttgagtccgcagccgagaatatggtgaagttgtacagtctgttcctgaagtatgatgccactatgatagaaattaacccgatggtcgaggattctgatggtgccgtactgtgcatggatgcaaagattaacttcgattctaatagcgcctatcgacagaaaaagatcttcgacctccaggattggacccaggaggacgagagagataaagatgcagccaaagccaatctcaactatattggtcttgacggcaacattggctgccttgtcaatggcgccgggctggccatggctactatggatattatcaagctgcacggaggcacgccagcaaattttctggacgtcggcggaggcgccacagtgcaccaggttaccgaagcgtttaaattgatcacttctgataagaaggtgctggccatactggtaaacatattcgggggcattatgcggtgcgacgtgatcgcccaaggtatcgtaatggcggtaaaagacctcgagatcaagatccccgtggtggttcggttacaggggactcgagtggacgatgccaaggcgctcatagctgactcgggtctcaagatcttggcatgtgatgatctcgacgaggccgctcggatggtggtaaaactgtccgaaattgtgactctggctaaacaggcccacgtggatgttaagtttcaactgcccatatag

SEQ ID NO: 329696 - DNA, 990 bp, Artificial Sequence
  derived and/or modified sequence
atgatcggcaagaagctgttcaccaagcagaccggcgagaagggccgtatctgtaaccaggtcctggtctgtgaaaggaaatatccgagacgggagtattacttcgctattactatggaaagaagcttccagggacccgttcttatagggtcttctcacggaggagtgaacatcgaggacgtagcagccgagtccccagaggcaattataaaggagcctattgatatagaggagggaatcaaaaaagagcaggccctgcagttagcccagaaaatggggttccctcccaacatcgtggaatcagccgcagaaaatatggtgaagctgtactcactatttctgaagtatgacgccacaatgattgagattaatcccatggtagaggatagcgacggcgccgtcctatgtatggatgctaaaataaatttcgactctaactctgcatataggcaaaagaaaatttttgacttgcaggattggacccaggaagacgaacgagacaaggatgccgctaaagccaacctgaactacataggccttgatgggaacataggctgtctcgtaaacggggccggccttgccatggctacaatggatatcattaaacttcacggtggcacacccgccaattttctcgatgtggggggtggtgcgactgtccaccaggtcaccgaggctttcaaactcatcaccagcgataagaaagtgctcgcgatcttggtcaatattttcgggggaatcatgcggtgcgacgtaatcgcccagggcattgttatggctgttaaagatctcgaaatcaagatccccgtcgttgttagactccaaggtactcgagtcgacgatgccaaagctctgatcgccgacagcggtctgaagatattggcctgtgacgatcttgatgaggccgcacgcatggtagttaagttatccgagattgtgactcttgccaagcaagcccatgttgatgtgaaattccagcttcccatctag

SEQ ID NO: 329697 - DNA, 465 bp, Artificial Sequence
  derived and/or modified sequence
atggctgccagcatgttctacggaagattggtcgccgttgccacacttcgcaaccacaggcccagaaccgctcaacgagcggctgcccaggggcctgttttgataggcagcagtcacgggggagtgaacatcgaagacgtcgccgctgaaagtcccgaggccatcattaaggagccaatagatattgaggagggcattaagaaggagcaggccctccagttggctcagaaaatgggcttccccccaaacattgtcgaatctgccgcagagaatatggtcaagttatacagcctgtttttaaagtatgacgctacaatgatagagattaaccccatggtggaggactccgacggagctgtgctctgcatggacgctaagattaattttgattctaatagtgcatacagacagaagaaaatatttgatctacaggactggacacaggaggatgaacgcgacaagtag

SEQ ID NO: 329698 - DNA, 876 bp, Artificial Sequence
  derived and/or modified sequence
atggaacgcagcttccaagggccagtgttgattggaagctcacatggtggggtgaacatagaggacgttgccgctgaaagtccggaggcaatcataaaagagcctattgacatcgaggagggaataaagaaggagcaggcactgcaactagcccagaagatggggtttccacctaacattgtagaaagcgccgctgagaacatggtaaagctttactctctttttctaaaatatgatgccaccatgatcgaaatcaatcctatggtagaagacagtgatggagctgtcctgtgtatggatgcaaagattaactttgattcaaatagcgcataccgacaaaagaagatctttgacctacaggattggactcaggaggacgagagagacaaggacgctgctaaagccaatctgaactatatcgggctcgacggaaacatcggatgtcttgtgaacggcgcaggccttgcgatggctactatggacatcatcaagctgcacgggggaacccctgctaattttttggacgtggggggaggcgctacagtacatcaagtaacagaagcattcaaactcattacatccgacaagaaggttttagccatactcgttaatatctttggcggaattatgagatgcgatgtaatagcccaaggaatcgtcatggcagtcaaagatcttgaaattaaaatccccgtcgtggtgcgcttacaggggacccgagtagatgacgcaaaggcccttattgcggattcaggtttgaagattcttgcatgtgatgatcttgatgaagccgcacggatggtcgtgaaactgtccgagattgttactttggcaaaacaagcccatgttgatgtaaagttccaacttccaatttag

SEQ ID NO: 329699 - DNA, 990 bp, Artificial Sequence
  derived and/or modified sequence
atgatcggaaaaaaactcttcactaaacagacaggcgagaagggaagaatttgcaatcaggtgctcgtgtgcgagagaaaataccctaggcgggaatactacttcgctataacgatggaacgctcgttccagggtcctgtgctgatcggcagcagccacgggggagtgaatattgaagatgtcgcagccgaaagccccgaagctatcattaaggagccaattgatatcgaggagggaataaaaaaagagcaggctctgcagttggcacagaagatgggcttcccacccaacatagttgagagtgccgcagagaatatggtcaagctgtatagcctgtttctaaagtatgatgctactatgattgaaatcaatccgatggtcgaggattccgacggagcagtgttgtgtatggatgccaaaattaactttgattccaattcagcatacagacagaagaaaatcttcgaccttcaggactggactcaggaggatgagagggacaaagatgcagccaaagccaatctgaactatatcggcttggacggtaatatcggttgcctggtcaacggagccggattggccatggccaccatggacattataaaactccacggaggcacccccgcaaactttttagacgtgggtggaggggcaacagtgcaccaggttactgaagcttttaaactcatcacctcagacaaaaaggtgttggccattctggtgaacattttcgggggaatcatgagatgtgacgtgatagcacaggggatcgtgatggccgtcaaagatctcgaaattaagatcccagtcgtggtgcgtttgcagggtaccagagtagacgacgctaaggccctcattgccgacagtggcctgaagattctggcttgcgacgatttagatgaagccgctcgtatggttgtgaagctgtcagagattgtgacactcgccaaacaggcccacgttgacgtaaagttccagttaccaatctag

SEQ ID NO: 329700 - DNA, 1689 bp, Artificial Sequence
  derived and/or modified sequence
gccgaggggacggggtccgactcagaaatggcggcctccatgttctacggcaggctagtggccgtggccacccttcggaaccaccggcctcggacggcccagcgggctgctgctcagggtcctgtattaataggaagttcacatggtggtgtcaacattgaagatgttgctgctgagtctcctgaagcaataattaaagaacctattgatattgaagaaggcatcaaaaaggaacaagctctccagcttgcacagaagatgggatttccacctaatattgtggaatcagcagcagaaaacatggtcaagctttacagcctttttctgaaatacgatgcaaccatgatagaaataaatccaatggtggaagattcagatggagctgtattgtgtatggatgcaaagatcaattttgactctaattcagcctatcgccaaaagaaaatctttgatctacaggactggacccaggaagatgaaagggacaaagatgctgctaaggcaaatctcaactacattggcctcgatggaaatataggctgcctagtaaatggtgctggtttggctatggccacaatggatataataaaacttcatggagggactccagccaacttccttgatgttggtggtggtgctacagtccatcaagtaacagaagcatttaagcttatcacttcagataaaaaggtactggctattctggtcaacatttttggaggaatcatgcgctgtgatgttattgcacagggtatagtcatggcagtaaaagacttggaaattaaaatacctgttgtggtacggttacaaggtacacgagtcgatgatgctaaggcactgatagcggacagtggacttaaaatacttgcttgtgatgacttggatgaagctgctagaatggttgtaaagctctctgaaatagtgaccttagcgaagcaagcacatgtggatgtgaaatttcagttgccaatatgatctgaaaacccagtggatggctgaaggtgttaaatgtgctataatcattaagaatactgtgttctgtgttattgttctttttctttttagtgtgtggagattgtaattgccatctaggcacacaaacatttaaaaggatttggactgcatttaattgtaccattcagaatggactgtttgtacgaagcatgtataatgcagttatcttctttcttttgtcgcagccagtcttttttgcttctcctacaaaacgtaacttgcaatttgccagtttattattgttggatacaaagttcttcattgataagagtcctataaataagataaatacgaagataaagctttattctttagtgttaaaatacagtatatctaataactagcctcattagtagagcagtatattaaaacaatgttttatgtaaaaagtgtttatcttcagcaccaaatacatgataaatgtatcaatcactatttataaacagagctttcaaacactcctcagaatattcttctaagtattttgatgaagtaactttgtaattatttgaacattgttttaatcattaggaaacactgattaactgcaagtcttcatgattctgtcatattaagaaacacctgtaggtttgcttcaaataaaggcatatataccaaggacttacagacaaaattaagaatgtcaatttaagttaataaaaatctcccaatatg

SEQ ID NO: 329701 - DNA, 1381 bp, Artificial Sequence
  derived and/or modified sequence
gaggggacggggtccgactcagaaatggcggcctccatgttctacggcaggctagtggccgtggccacccttcggaaccaccggcctcggacggcccagcgggctgctgctcaggttctgggaagttctggattgtttaataaccatggactccaagtacagcagcaacagcaaaggaatctctcactacatgaatacatgagtatggaattattgcaagaagctggtgtctccgttcccaaaggatatgtggcaaagtcaccagatgaagcttatgcaattgccaaaaaattaggttcaaaagatgtcgtgataaaggcacaggttttagctggtggtagaggaaaaggaacatttgaaagtggcctcaaaggaggagtgaagatagttttctctccagaagaagcaaaagctgtttcttcacaaatgattgggaaaaaattgtttaccaagcaaacgggagaaaagggcagaatatgcaataacaatggaaaggtcatttcaaggtcctgtattaataggaagttcacatggtggtgtcaacattgaagatgttgctgctgagtctcctgaagcaataattaaagaacctattgatattgaagaaggcatcaaaaaggaacaagctctccagcttgcacagaagatgggatttccacctaatattgtggaatcagcagcagaaaacatggtcaagctttacagcctttttctgaaatacgatgcaaccatgatagaaataaatccaatggtggaagattcagatggagctgtattgtgtatggatgcaaagatcaattttgactctaattcagcctatcgccaaaagaaaatctttgatctacaggactggacccaggaagatgaaagggacaaagatgctgctaaggcaaatctcaactacattggcctcgatggaaatataggctgcctagtaaatggtgctggtttggctatggccacaatggatataataaaacttcatggagggactccagccaacttccttgatgttggtggtggtgctacagtccatcaagtaacagaagcatttaagcttatcacttcagataaaaaggtactggctattctggtcaacatttttggaggaatcatgcgctgtgatgttattgcacagggtatagtcatggcagtaaaagacttggaaattaaaatacctgttgtggtacggttacaaggtacacgagtcgatgatgctaaggcactgatagcggacagtggacttaaaatacttgcttgtgatgacttggatgaagctgctagaatggttgtaaagctctctgaaatagtgaccttagcgaagcaagcacatgtggatgtgaaatttcagttgccaatatgatctgaaaacccagtggat

SEQ ID NO: 329702 - protein, 421 aa, Artificial Sequence
  derived and/or modified sequence
MHCSNPKSGVVLATVARGPDACQILTRAPLGQDPPQRTVLGLLTANGQYRRTCGQGITRIRCYSGSENAFPPAGKKALPDCGVQEPPKQGFDIYMDELEQGDRDSCSVREGMAFEDVYEVDTGTLKSDLHFLLDFNTVSPMLVDSSLLSQSEDISSLGTDVINVTEYAEEIYQYLREAEIRHRPKAHYMKKQPDITEGMRTILVDWLVEVGEEYKLRAETLYLAVNFLDRFLSCMSVLRGKLQLVGTAAMLLASKYEEIYPPEVDEFVYITDDTYTKRQLLKMEHLLLKVLAFDLTVPTTNQFLLQYLRRQGVCVRTENLAKYVAELSLLEADPFLKYLPSLIAAAAFCLANYTVNKHFWPETLAAFTGYSLSEIVPCLSELHKAYLDIPHRPQQAIREKYKASKYLCVSLMEPPAVLLLQ

SEQ ID NO: 329703 - DNA, 1266 bp, Artificial Sequence
  derived and/or modified sequence
atgcactgcagcaaccccaagagcggcgtggtgctggccaccgtggccagaggccccgacgcctgccagatcctgaccagagcccccctgggccaggaccccccccagagaaccgtgctgggcctgctgaccgccaacggccagtacagaagaacctgcggccagggcatcaccagaatcagatgctacagcggcagcgagaacgccttcccccccgccggcaagaaggccctgcccgactgcggcgtgcaggagccccccaagcagggcttcgacatctacatggacgagctggagcagggcgacagagacagctgcagcgtgagagagggcatggccttcgaggacgtgtacgaggtggacaccggcaccctgaagagcgacctgcacttcctgctggacttcaacaccgtgagccccatgctggtggacagcagcctgctgagccagagcgaggacatcagcagcctgggcaccgacgtgatcaacgtgaccgagtacgccgaggagatctaccagtacctgagagaggccgagatcagacacagacccaaggcccactacatgaagaagcagcccgacatcaccgagggcatgagaaccatcctggtggactggctggtggaggtgggcgaggagtacaagctgagagccgagaccctgtacctggccgtgaacttcctggacagattcctgagctgcatgagcgtgctgagaggcaagctgcagctggtgggcaccgccgccatgctgctggccagcaagtacgaggagatctacccccccgaggtggacgagttcgtgtacatcaccgacgacacctacaccaagagacagctgctgaagatggagcacctgctgctgaaggtgctggccttcgacctgaccgtgcccaccaccaaccagttcctgctgcagtacctgagaagacagggcgtgtgcgtgagaaccgagaacctggccaagtacgtggccgagctgagcctgctggaggccgaccccttcctgaagtacctgcccagcctgatcgccgccgccgccttctgcctggccaactacaccgtgaacaagcacttctggcccgagaccctggccgccttcaccggctacagcctgagcgagatcgtgccctgcctgagcgagctgcacaaggcctacctggacatcccccacagaccccagcaggccatcagagagaagtacaaggccagcaagtacctgtgcgtgagcctgatggagccccccgccgtgctgctgctgcagtag

SEQ ID NO: 329704 - DNA, 1266 bp, Artificial Sequence
  derived and/or modified sequence
atgcattgttcaaatccaaaatctggggtggtccttgccaccgtggcccgaggcccagacgcctgccaaatcctcactcgggcaccgctcggccaggatccgccccaacgaaccgtgctaggtttgctgacggccaacggccagtaccggagaacatgcggacaaggtattactcgcatcaggtgctacagtggttcggaaaatgcatttccccccgcaggcaaaaaagctctacccgactgcggcgttcaggaacctccgaagcagggttttgacatctatatggatgagctcgagcagggagatcgcgattcttgctcagttcgggaaggtatggcattcgaagacgtttatgaagtggatacgggtacattgaagtcagaccttcacttcctgctcgactttaatactgtcagtcccatgctcgtggacagctctcttctgtcccagagcgaagacatttcctcccttgggacggatgtgattaatgtgacagaatatgctgaggaaatctatcagtacctgcgggaagctgagatcaggcataggccaaaggcccattacatgaaaaaacagcccgatattaccgaaggcatgcggaccatcttggtagactggttggttgaagtgggggaggagtacaagctccgtgccgagaccctttacctggccgttaacttcctggaccggtttctgagctgcatgagcgtgctgcgaggcaaactgcagctcgttgggaccgctgctatgcttctagcaagcaagtatgaagaaatttatccccccgaggtggatgagtttgtttatattactgatgatacctacacaaaaagacaattgctcaaaatggagcatctgctgctcaaagtcctagctttcgacctcaccgtgccgacgacgaatcaatttctgctgcagtacctcagaagacagggcgtgtgtgtccgcacggaaaacctcgctaagtacgttgctgaactgtcactgctcgaggccgatcctttcttaaaatacttgccatcactaattgcagccgctgctttttgccttgctaattacactgtgaacaaacatttttggccagagactctggctgcatttaccgggtacagtctcagtgaaatcgtaccttgtctgagtgagctgcataaggcctatctggacatacctcacaggcctcagcaggcgatcagagagaaatacaaggcaagtaaatatctgtgtgtttccctaatggaacctccggctgttctcctgctacaatag

SEQ ID NO: 329705 - DNA, 1266 bp, Artificial Sequence
  derived and/or modified sequence
atgcattgcagcaaccccaagtctggcgtggtgctcgccaccgtggctaggggcccagatgcatgccaaattcttacgagggccccactcgggcaagatccccctcagcgcaccgtgctcgggctcctgaccgccaatggccagtacaggaggacttgtggtcaaggtatcaccaggatacgctgctattctggatctgagaacgccttccctccggccggcaaaaaggctctccccgattgcggagtccaggagccacctaaacagggctttgacatatatatggacgagctggagcagggcgatagagactcctgcagtgtgagggagggcatggccttcgaggacgtgtacgaagtggatacaggtacccttaagtctgacttgcattttctgttggactttaataccgtgagtccaatgttagtcgactcttcactcctgagtcagagcgaggacatctcctccctgggaacagacgtgatcaacgtgactgaatacgccgaagagatttatcagtacttgagggaagcggaaattcggcaccggcctaaagcacattatatgaagaagcagcccgatattaccgaggggatgcgcacaattctggtggactggctcgtggaggttggcgaggagtacaaacttcgggcagagaccctatacctggcagtaaactttttggataggtttcttagctgtatgtccgtgcttagaggaaaactacaattggtcggcacagcagccatgctccttgcctctaagtatgaagagatctacccacccgaagtggatgaatttgtctatattacggacgatacctacaccaagcgccagctcttaaagatggaacatttacttctgaaagtcctcgcttttgatctcactgtcccaaccacaaatcaatttctgctgcagtatctgcggagacaaggagtctgcgtgagaactgaaaatttagctaagtacgtcgcagagcttagtctccttgaggcagacccatttctgaagtatctgccttcacttattgcagcggccgccttctgtctcgctaactacacggtcaataagcacttttggccagagactctcgccgcattcacgggatactccctgagcgagattgtgccatgcttaagcgaattgcataaggcataccttgacattcctcatcggcctcagcaggccatccgcgaaaaatataaagcgtctaaatacttgtgtgtctccctaatggaaccacccgccgttttgttgctccaatag

SEQ ID NO: 329706 - DNA, 1266 bp, Artificial Sequence
  derived and/or modified sequence
atgcactgcagcaaccccaagagcggcgtggtgctggccaccgtggcccggggcccagatgcctgccagatcctgacccgggcccccctgggccaggaccccccccagaggacagtgctgggcctgctgacagccaacggccagtacagaaggacctgtggccagggcatcacccgcatccgctgctacagcggctctgaaaatgccttccccccagctgggaagaaggccctgcctgactgtggggtgcaggagccccccaagcagggctttgacatctacatggatgagctggagcagggcgaccgggacagctgcagcgtgcgggagggcatggcctttgaagatgtgtatgaggtggacaccggcaccctgaagagtgacctgcacttcctgctggacttcaacacagtgagccccatgctggtggacagcagcctgctgagccagagcgaggacatcagcagcctgggcacagatgtgatcaacgtgacagaatatgcagaggagatctaccagtacctgcgggaggccgagatccgccaccggcccaaggcccactacatgaagaagcagcctgacatcacagagggcatgaggaccatcctggtggactggctggtggaggtgggggaggagtacaagctgcgggcagagaccctgtacctggccgtgaacttcctggaccgcttcctgagctgcatgtctgtgctgcggggcaagctgcagctggtgggcacagctgccatgctgctggccagcaaatatgaggagatctacccacctgaggtggatgaatttgtgtacatcacagatgacacctacaccaagaggcagctgctgaagatggagcacctgctgctgaaggtgctggcctttgacctgactgtgcccaccaccaaccagttcctgctgcagtacctgcggcggcagggcgtgtgtgtgaggacagagaacctggccaagtatgtggccgagctgagcctgctggaggccgaccccttcctgaagtacctgcccagcctgattgctgctgctgccttctgcctggccaactacacagtgaacaagcacttctggccagagaccctggccgccttcaccggctacagcctgtctgaaattgtgccctgcctgtctgagctgcacaaggcctacctggacatcccccaccggccccagcaggccatccgggagaagtacaaggccagcaagtacctgtgtgtgtccctgatggagcccccagctgtgctgctgctgcagtag

SEQ ID NO: 329707 - DNA, 1266 bp, Artificial Sequence
  derived and/or modified sequence
atgcactgcagcaaccccaagagcggcgtggtgctggccaccgtggctagagggcccgatgcgtgtcagatcctcaccagggccccacttggccaggatccccctcagcgcactgtcctcggcctccttaccgccaacgggcagtataggcggacctgcggccaggggattactcggataaggtgctacagcgggagtgagaacgcattcccacctgccgggaaaaaagccttacctgactgtggcgtccaagaaccgccaaagcagggatttgacatctatatggatgaactggaacagggagatcgggacagctgcagtgtgcgcgaggggatggcttttgaggacgtctacgaagtggatactgggacactgaagagcgacctgcactttctgctggacttcaataccgtgtctccgatgctcgtggattcctctttactcagccagagcgaggatatcagctctctgggaactgatgtgattaacgtgaccgaatatgccgaggagatttaccaatatcttcgggaagcagagattagacatcgtccaaaagcccactacatgaagaagcagcctgatattactgagggcatgcgaaccatcctcgttgattggctggtagaggtgggagaagagtacaaactacgcgctgaaaccctctatctggccgtgaattttctggacaggtttttaagttgcatgtctgtgctgcggggaaagctgcaactggtaggcaccgctgcgatgcttctcgccagtaaatatgaggaaatatatccccctgaagtcgacgagttcgtttatatcaccgacgacacttatacaaaacggcaactactgaagatggagcatctacttttgaaagtcctggcctttgacttgaccgtccccaccaccaatcagttcctgttacaatatttgcggcggcagggagtgtgtgtaaggacagaaaacctcgccaaatatgtggcagaattatctctcttggaggccgatccgtttctgaagtatctgccatctctgattgccgctgctgccttttgccttgccaattacactgttaacaagcatttctggccggaaaccctggctgcattcaccggctactcattatccgagatagtgccttgcctatccgaactccacaaggcctacctggacattcctcataggccacagcaagccatccgggagaagtataaagcctccaagtacctttgtgtgagtttaatggagccgcctgctgtgctgctactacagtag

SEQ ID NO: 329708 - DNA, 1266 bp, Artificial Sequence
  derived and/or modified sequence
atgcactgcagcaaccccaagagcggcgtggtgctggccaccgtggccagaggccctgatgcctgtcaaattttgactcgggcccctttgggtcaggatcctcctcagcggacagtgcttggactcctcacagccaacggacaataccggagaacatgtggccagggcatcaccagaatccgctgttacagcggctccgagaacgccttccctccagccggcaagaaggcactgcccgattgtggagttcaggagccccccaagcaggggttcgacatttacatggatgagcttgagcaaggcgacagggacagttgttcggtgagggagggcatggcctttgaggatgtttatgaggttgacaccggcaccctcaagagcgatctgcattttctgctcgactttaatacagttagtcctatgctggtcgatagctccctgttgtcacaaagcgaagacatctcttcactcggcacggacgtcataaatgtgacggaatatgccgaggaaatttaccagtatctgagggaggctgagatccggcaccgacccaaggcacactacatgaagaagcaaccagatatcacggagggtatgcgcaccattctcgtggactggctggtcgaagttggagaggagtacaaacttcgtgctgagaccttgtacttagcagttaactttctggaccgtttcctgtcttgcatgtccgtactgagagggaagctgcagctggtgggtaccgctgccatgcttttagcaagcaagtacgaggaaatttatcccccggaggtagatgagttcgtttatatcacggatgacacttatacaaagagacaactgttgaagatggaacacctccttctgaaagtcctagcctttgacctgactgtgccaacaaccaaccagttcctgctgcagtaccttcgcagacagggtgtctgtgtcaggactgaaaacctcgccaagtacgtagcagagctcagtcttttggaggccgacccgtttctcaaatatctcccctcactgatcgccgccgcggccttctgcctggcaaactacactgtaaataagcatttttggcccgagactttggccgctttcactggatactcccttagtgagatcgtgccttgtttaagtgaactgcacaaggcgtatctcgatattcctcacaggccacagcaggccataagggaaaaatacaaggcaagtaagtatctgtgtgtgtctcttatggagcccccagcggtgctgttactccagtag

SEQ ID NO: 329709 - DNA, 1266 bp, Artificial Sequence
  derived and/or modified sequence
atgcattgttccaacccaaaatccggggtggtcctcgcaacagttgctcgcggtccagatgcctgccagattctcacgcgagcacctctgggccaggacccacctcagcggactgtcctcggtctgctcactgcgaatggacaatataggaggacttgcggtcaagggatcacccgcattagatgttacagcgggagcgaaaacgcctttcccccagcaggcaaaaaggcactgccagattgcggtgtgcaggaacccccaaaacaggggtttgatatatatatggacgagctggaacagggagaccgggactcatgctctgttcgcgagggaatggcattcgaagacgtgtacgaggtagacacaggaactctgaaatcagatcttcattttttactggactttaatacagtctcgcctatgctggtcgactccagcctgcttagccagtcagaagacatctcgagtctggggaccgacgttatcaacgtcacagagtatgctgaggagatttaccagtacctgagggaagccgaaatccgacaccggccaaaggcccactacatgaagaaacagccagacattacagaggggatgcgtacaatcctggtggactggctggtggaagtgggtgaggagtacaagctccgggctgagacactgtatttggccgtcaattttctggataggtttctgtcttgtatgtctgttttaagaggcaaattgcagctggttggaaccgcggctatgctgctggcatctaagtacgaagaaatatatccaccggaggtcgacgaatttgtttatatcacggacgacacctatactaagcgacagctgttaaaaatggagcacctcttgctcaaggtcctggcttttgatctgactgtccctacaactaatcaatttttgctgcagtacctgcgtcggcagggggtttgcgtgcgcaccgagaacctggccaagtacgtagctgagctgtctctgctggaagccgatccatttctcaagtatcttccgtccctgatcgccgctgctgcattctgcctggcaaactatacggtgaataagcatttctggcctgaaactttggcagccttcacaggatactccctaagtgagatcgtgccttgcctgtccgagctgcacaaggcctacctcgacatccctcaccggcctcagcaagccatacgagaaaaatataaagcctccaaatacttgtgcgttagcctgatggaacccccagctgttctgctgctgcagtag

SEQ ID NO: 329710 - DNA, 1266 bp, Artificial Sequence
  derived and/or modified sequence
atgcactgctcaaaccctaagagcggcgtggtcctggccacagttgctcggggtcctgacgcctgccagattttgacgcgagcccctctgggccaggacccccctcagagaaccgttcttggcctgctcactgccaacggacagtataggaggacatgtgggcagggtattacgcgaatcagatgctactcagggtctgagaatgcattccccccagccggaaaaaaggccctccccgactgtggggtgcaggagccaccaaagcaagggtttgacatctacatggacgagctcgagcagggcgacagagatagttgcagcgttcgggagggaatggccttcgaagacgtctatgaagtggacactggcaccctgaagtcagacctccactttctgcttgattttaacactgtctcgccgatgttagtagacagctctttattgtcacaaagcgaggacatctcttctcttgggacagatgtcattaatgtgactgaatacgcggaggaaatttatcagtaccttagggaagcggaaattaggcatagacccaaagcacactatatgaaaaagcagcccgacattaccgaagggatgaggacgatcctcgtggactggcttgtggaggtgggggaggaatacaagctgcgagccgaaaccctgtatctggcagtcaatttcttggaccgattcctgtcttgcatgtcggtcctgaggggtaagcttcagctagtcggtactgccgctatgttgctcgcctcaaaatacgaggaaatttacccccctgaagtggatgagttcgtttacatcactgatgacacctataccaaacgccaattgctcaaaatggaacatctgctgctgaaggtcttggcttttgacttgaccgtgcctacaaccaaccagtttctgttgcaatatcttcgaaggcagggagtttgcgtgagaactgaaaaccttgccaagtatgtcgcggagctctctctgctcgaagccgacccattcctcaaatatctgccatcacttattgccgctgccgcattctgtttggcaaattataccgtgaacaagcatttctggcctgaaaccctggccgctttcaccggctatagcttgagtgaaattgtgccctgtctgtcagagcttcataaagcatatctggatatcccccatcgccctcaacaggccattcgtgaaaagtacaaagcgagcaagtatctgtgcgtgtctctgatggagcctcctgctgtgctgctcctgcaatag

SEQ ID NO: 329711 - protein, 995 aa, Artificial Sequence
  derived and/or modified sequence
MKLDVNFQRKKGDDSDEEDLCISNKWTFQRTSRRWSRVDDLYTLLPRGDRNGSPGGTGMRNTTSSESVLTDLSEPEVCSIHSESSGGSDSRSQPGQCCTDNPVMLDAPLVSSSLPQPPRDVLNHPFHPKNEKPTRARAKSFLKRMETLRGKGAHGRHKGSGRTGGLVISGPMLQQEPESFKAMQCIQIPNGDLQNSPPPACRKGLPCSGKSSGESSPSEHSSSGVSTPCLKERKCHEANKRGGMYLEDLDVLAGTALPDAGDQSRMHEFHSQENLVVHIPKDHKPGTFPKALSIESLSPTDSSNGVNWRTGSISLGREQVPGAREPRLMASCHRASRVSIYDNVPGSHLYASTGDLLDLEKDDLFPHLDDILQHVNGLQEVVDDWSKDVLPELQTHDTLVGEPGLSTFPSPNQITLDFEGNSVSEGRTTPSDVERDVTSLNESEPPGVRDRRDSGVGASLTRPNRRLRWNSFQLSHQPRPAPASPHISSQTASQLSLLQRFSLLRLTAIMEKHSMSNKHGWTWSVPKFMKRMKVPDYKDKAVFGVPLIVHVQRTGQPLPQSIQQALRYLRSNCLDQVGLFRKSGVKSRIHALRQMNENFPENVNYEDQSAYDVADMVKQFFRDLPEPLFTNKLSETFLHIYQYVSKEQRLQAVQAAILLLADENREVLQTLLCFLNDVVNLVEENQMTPMNLAVCLAPSLFHLNLLKKESSPRVIQKKYATGKPDQKDLNENLAAAQGLAHMIMECDRLFEVPHELVAQSRNSYVEAEIHVPTLEELGTQLEESGATFHTYLNHLIQGLQKEAKEKFKGWVTCSSTDNTDLAFKKVGDGNPLKLWKASVEVEAPPSVVLNRVLRERHLWDEDFVQWKVVETLDRQTEIYQYVLNSMAPHPSRDFVVLRTWKTDLPKGMCTLVSLSVEHEEAQLLGGVRAVVMDSQYLIEPCGSGKSRLTHICRIDLKGHSPEWYSKGFGHLCAAEVARIRNSFQPLIAEGPETKI

SEQ ID NO: 329712 - protein, 137 aa, Artificial Sequence
  derived and/or modified sequence
MRNGISPIIIDNTNLHAWEMKPYAVMALENNYEVIFREPDTRWKFNVQELARRNIHGVSREKIHRMKERYEHDVTFHSVLHAEKPSRMNRNQDRNNALPSNNARYWNSYTEFPNRRAHGGFTNESSYHRRGGCHHGY

SEQ ID NO: 329713 - DNA, 1897 bp, Artificial Sequence
  derived and/or modified sequence
ccctaatgcatgaggctcctgaccaccataaagatagaactggggcttaaccctcatcacttctgaagctgatggaatgacaattgcagcatgactttcccagggccctgattttcagcacggatgattttttcttcagggaagatggtgcctatgagttcaatcctgacttcctggaggaagctcatgaatggaaccaaaaaagagcaagaaaagcaatgaggaatggcatatcccccattattattgataataccaacctccacgcctgggaaatgaagccctatgcagtcatggcacttgaaaataactatgaagttatattccgagaacctgacactcgctggaaattcaacgttcaagagttagcaagaagaaacattcatggtgtctcaagagaaaaaatccaccgaatgaaagaacggtatgaacacgatgttacttttcacagtgtgcttcatgcagaaaagccaagcagaatgaacagaaaccaggacaggaataatgcattgccttccaacaatgccagatactggaattcctacacagagtttccaaaccggagggcccacggtggatttacaaatgagagctcctatcacagaaggggcggttgtcaccatggatattagaggcctatcttacagccaggcagaattttcctaagtcagtttctacttcagtttttgttattttttgttgcattttagtcagagctccaattccagtgtaaatagctgaactcaaaagtttctgagcaaagtcattatattcactttcttcaccaaaatttgttaaagtgcttctatatgcatggtctgatgctgggaattctgcagatttgagtaaacagtctctttctctagggtaagaatttgaaaccaaaacttgagaacacacccaagaatatatttacataggttcatagatgaaataaagtgtttatattatatataagcttcagtaccatttgctctgaagtgatctatttattttttcaggaaattcatctccatcggtaaagttgggaaggtggagagaagtggtgggggggcattgctacttatcaaagtgccattgctactttgataatctatgtatctaaaaatgtgagatgtgcgactcttatgatactgattttcctttaatgttaatatgccagaaagcatacatctaagggaacattgtccttcaaagtagacactttgggaagttatttctttattttaatgatgtatcattgttaaaaatgctgtcaaatccttaatagctacaggagctactgagggaaatcagtgtcattatttaaagtcacgccttgtgtttttactactttattcagcaggattaaacctgaataacttttggctgttgtgctaatagtgtaaataaaataagcctgccttcataaaacactaacttttaaaaggaataaacgacttctaaaattatgcctattaacatgtgtaattagtcggcagctcaaatgtttgggagtgcaagaaattaggcaccccaggatataggtcatacagggatatataaaagccatgctcattacaaaatgagcagttgatgttttatgtggcattaagacaatcaagtcctcacaactctggaatgtcttcttatactgatgctgaatttatgaatccaaattaatttccaacaggttggaatcagatttaatgtgagatcatgatagacaagaccacagaggacgtatgctctatttcttgttggccaacagcttctttctaatgttctgtgaaaaattattttaagtgtcttatataatggtgcttttatggttattaaaaattgtaaatggtatcacatttatatggatttgtcattggatctttttttggttcaacaataaaaaaatttaattacc

SEQ ID NO: 329714 - DNA, 414 bp, Artificial Sequence
  derived and/or modified sequence
atgagaaacggcatcagccccatcatcatcgacaacaccaacctgcacgcctgggagatgaagccctacgccgtgatggccctggagaacaactacgaggtgatcttcagagagcccgacaccagatggaagttcaacgtgcaggagctggccagaagaaacatccacggcgtgagcagagagaagatccacagaatgaaggagagatacgagcacgacgtgaccttccacagcgtgctgcacgccgagaagcccagcagaatgaacagaaaccaggacagaaacaacgccctgcccagcaacaacgccagatactggaacagctacaccgagttccccaacagaagagcccacggcggcttcaccaacgagagcagctaccacagaagaggcggctgccaccacggctactag

SEQ ID NO: 329715 - DNA, 414 bp, Artificial Sequence
  derived and/or modified sequence
atgcggaacggtatctctccaattatcattgataataccaatctgcatgcatgggagatgaaaccatatgctgtgatggccctcgaaaacaattacgaagtaatattccgtgaaccagatacacgatggaagtttaatgtgcaggaactagcccgccgcaacatccatggagttagccgtgagaaaattcaccgtatgaaagaacgctatgagcacgatgttacattccactctgtgcttcacgctgagaagccaagtaggatgaaccgtaaccaggatcgaaataatgcccttcccagcaacaacgcacggtattggaactcatacaccgaatttcccaatcgacgggcacatggggggttcaccaacgaatccagctaccatcgccgtggcggctgccaccacggttactag

SEQ ID NO: 329716 - DNA, 414 bp, Artificial Sequence
  derived and/or modified sequence
atgagaaatggcatcagccccatcatcatcgacaacaccaacctgcacgcctgggagatgaagccctatgctgtgatggccctggagaacaactatgaggtgatcttccgggagccagacacccgctggaagttcaacgtgcaggagctggcccggaggaacatccacggcgtgtcccgggagaagatccacaggatgaaggagagatatgaacatgatgtgaccttccacagcgtgctgcacgccgagaagcccagcaggatgaacagaaaccaggacaggaacaatgccctgcccagcaacaatgcccgctactggaacagctacacagagttccccaacagaagagcccacggcggcttcaccaatgaaagcagctaccacagaagaggaggctgccaccacggctactag

SEQ ID NO: 329717 - DNA, 414 bp, Artificial Sequence
  derived and/or modified sequence
atgcggaacggcatcagccccatcatcatcgacaacaccaacctgcacgcatgggagatgaagccctacgcagttatggcactggagaataactatgaagtgatttttcgcgaacctgacacgaggtggaagtttaacgtgcaggagctggcccgacgaaacatacatggtgtgtctagagagaagatccaccggatgaaagagcgctacgagcacgacgtcacgttccacagtgttctccacgccgagaagccgagcagaatgaatcgcaaccaggaccgcaataacgccctcccatcaaacaacgccagatattggaactcctatacagagtttccaaataggagggcgcatggcgggtttaccaatgagtcttcctaccatagacgggggggttgccatcacggctattag

SEQ ID NO: 329718 - DNA, 414 bp, Artificial Sequence
  derived and/or modified sequence
atgcgcaacggtatcagtccaatcataattgacaataccaacctacacgcctgggaaatgaaaccctacgcagtgatggccttggaaaacaattacgaggttatttttcgcgagcctgatactcgttggaagtttaatgtgcaagaactggcaagaaggaacatccacggagtgtctagggaaaagatccataggatgaaggaaagatacgaacacgacgtgacttttcacagcgtgctgcatgctgaaaagccatcccgtatgaatcggaatcaggataggaacaacgccctgccaagtaacaatgctagatattggaacagttatacagagtttcccaatcggagggcacatggtggcttcacaaacgagtctagttaccatcgcaggggcggatgtcaccatgggtactag

SEQ ID NO: 329719 - protein, 189 aa, Artificial Sequence
  derived and/or modified sequence
MPVWKLPWKLSEGKRRAQVEGEDLFPVAISFGRPKEVLPLYSSESHRFTVLEPNTVSFNFKFWRNMYHQFDRTLHPRQSVFNIIMNMNEQNKQLEKDIKDLESKIKQRKNKQTDGILTKELLHSVHPESPNLKTSLCFKEQTLLPVNDALRTIEGSSPADNRYSEYAEEFSKSEPAVVSLEYGVARMTC

SEQ ID NO: 329720 - DNA, 4102 bp, Artificial Sequence
  derived and/or modified sequence
cacacacgctctgtctgcctgccccgagtcccccgggaggccgcggggtttggggaagtgtttctaggagacggcgctcaccggctgcacctgcgccgttgacgccaccggggccggcagacagacccgcggcgctggctggtggagggagttcccgcttgctctctgtcgctgtcaccgccctgtttctgtagccgtatggtacgcctgtgagaccggctgccggctgacgtctccttgcgatggagcatatccggacgaccaaggtcgaacaagtaaaattacttgaccgattcagtaccagcaacaagtcattaacaggaacactgtatcttacggctacacatctattatttatcgactctcatcaaaaagaaacctggatattacaccaccatattgcctcagtagagaaacttgctttgactacttctggatgcccccttgtgatacagtgcaagaacttcagaactgtgcatttcattgttcccagagaaagagattgccatgatatttacaactctttgctacaactgtcaaaacaagcaaaatatgaagatctctatgcattttcttataatcccaaacaaaatgattcagaacgactacaaggctggcagctcattgatctcgctgaggaatataagaggatgggagtgccaaactcacactggcagttgtctgatgccaaccgggactacaagatttgtgaaacttaccccagagaactttatgttccccggatagcaagcaaaccaataattgttggtagttccaagttccggagcaagggaagattcccagttctttcctactatcatcaagataaggaggctgccatttgtcgatgtagtcagccactctctggattcagtgccaggtgcctggaggatgaacatttgcttcaagccattagtaaagccaatccagtcaatcgctatatgtacgtcatggataccaggccaaaactgaatgcaatggccaacagagcagctggaaaaggttatgaaaatgaagacaactattccaatattagatttcagtttgttggaattgaaaatattcatgtcatgaggtccagccttcagaaattattggaagtcaatggcactaaagggctttctgtcaatgatttctactccggtttggagagctcgggatggcttcgccatatcaaagctgttatggatgctgcaatcttcttggccaaagcaataacagttgaaaatgcaagtgtgttggtgcattgttccgatggttgggataggacttcccaggtttgttccctgggttctcttttattggattcctactacaggacaatcaaaggattcatggttttaatagaaaaggattggatctcttttggacataaattttcagagaggtgtggccagttggatggtgacccaaaggaagtctcaccagtgtttactcagttcttggaatgtgtgtggcatttgaccgaacagtttccacaagcctttgaattcagtgaagcatttcttcttcagatccatgagcatattcattcatgccagtttggaaacttccttggaaattgtcagaaggaaagagaagagctcaagttgaaggagaagacttattccctgtggccatttcttttggaagaccaaaagaagtacttcctctctacagttccgaatctcacagatttacagttttggagccaaatacagtatctttcaattttaagttttggaggaacatgtaccatcaatttgatcgaacactgcatcctaggcagtctgtatttaatataattatgaatatgaatgagcaaaataaacaattagagaaagatattaaagacctagaatctaaaattaaacaacgcaaaaataagcaaacagatggcatcctcaccaaggaattgttacattcagttcatcctgaatcacctaacctcaaaacttccctgtgttttaaagagcagactctgctacccgtaaatgatgctcttcgaactatagagggcagcagcccggcagataatcgttatagtgaatatgcagaagagttttctaaatcagaacctgctgtggtcagcttagagtatggtgtggcaagaatgacttgttagactcatagagttttttctgcaatgattgcagtacaagaaaaggattattgtgaggatggtctgtaagcataaccaaaaggaatttgtctaataacaattttagggtttaacagtaggctaatagttgaaggaaggataataactacccttgtgagagaaataagtcattttaattgcatttccagcaaggaatgacattcagttctgtaagaaatgagtggtatttgatgtatttactcaaaacacaatttgcactgtacactagtgaattgacgtttatgatttatgttaattcagccaaacataaataaccttccttaagtacaatttaacttcaagaaaacaaaatttgacaacatagtttcttaataaatgatatggcatgtactttcaattatgtagctttgtaactatgaatatttacatattttgccttttagtgatatttaatgttaaagtgccatgaaaaatatttctaagaaagccttaaattcccagtggattctttacccttaagttttacagcctacaacaagattttttgttttgtttttcttctggtcagccttgttttgtttgtaaagaattgtgctctcattactgctgggggtgcatgctacaatacttctatataaacacttgtagaagtacactgttcacgtttagcctgccccacttttgtattcaaaattaatgaaactgaaggtttattctgatcataatttgtttagtgctacatttgataatttattatttacagcttagaatattgatttcttgaatacgtataagcacatttgactgtcttttatatatggattactgcattccattgattcttattttgtggttggctttatttctttcacaactgtgtaagtttaaagagctaaagctctaaaactgttctgagaaacaatgaatagtacatgtatatgtatatttttaaactgccttattgctcaatgagttgctgttcctggagtatctaactttcagtttactcaaaaacttttgggtaaataaaaaagggaagtacagatagtttaggttgtgcatggttgcatgaattttgaagtcatttctatgtggagcattatttttcttcttgttaaatatagaaaaaaaaagagattctagtacaaagttactgtttaacaaaagcaacataaactctgggaaagatttcattttgccatgttatatttactgtttattctgtgtactagtacatatctttaaattaccaaaaaacaagaaacaaaacataaaaaccccaaaactatcacttggaattagcaatatcacccaactggctttaaaattgaaaatttaaataacatggtggcatgaagtacaattcgagtattaggcaatttgcatagtgttcctcatgctactttctgttacacctctattatattagttttgaatataaacatctttttcagaccaaaaaaaactttattgtatgagagcttatcttatcctgtttatttttccaatgcttttctgtaatacattatgtaatttaaaaaatattcctttttaaacagcaacagaaatgcactataaaatatagtatgtgattaaccaatcctgcttccatatttaagcactgggaatggaaacttaatctctgtgactacaaagggaagtttttgtgccttggtgttccagtcactgattgtggttttagaatcttctgtggctgacttcttgtattcaactctggtttattatcttaatcttcaacttcagacatatatttgtgtgtttatatgctcacaggtggactgagaaatcagttacatcttaagtgacctacagggtatatgttggcaaaagcagactgtgtatatgtcttataaagttgaatttatgttcagtgtgtttggaagtgtatagcatgtaaattacttcatatatgatttaaaggtaattaaatgttcacattttactttgaatgtttttcttctggataaaacaaatggaatc

SEQ ID NO: 329721 - protein, 669 aa, Artificial Sequence
  derived and/or modified sequence
MEKCSVGGLELTEQTPALLGNMAMATSLMDIGDSFGHPACPLVSRSRNSPVEDDDDDDDVVFIESIQPPSISAPAIADQRNFIFASSKNEKPQGNYSVIPPSSRDLASQKGNISETIVIDDEEDIETNGGAEKKSSCFIEWGLPGTKNKTNDLDFSTSSLSRSKTKTGVRPFNPGRMNVAGDLFQNGEFATHHSPDSWISQSASFPSNQKQPGVDSLSPVALLRKQNFQPTAQQQLTKPAKITCANCKKPLQKGQTAYQRKGSAHLFCSTTCLSSFSHKRTQNTRSIICKKDASTKKANVILPVESSKSFQEFYSTSCLSPCENNWNLKKGVFNKSRCTICSKLAEIRHEVSVNNVTHKLCSNHCFNKYRLANGLIMNCCEHCGEYMPSKSTGNNILVIGGQQKRFCCQSCINEYKQMMETKSKKLTASENRKRNAFREENEKQLYGSSNTLLKKIEGIPEKKEKTSQLQLSVECGTDTLLIQENVNLPPSSTSTIADTFQEQLEEKNFEDSIVPVVLSADPGTWPRILNIKQRDTLVENVPPQVRNFNFPKDNTGRKFSETYYTRILPNGEKTTRSWLLYSTSKDSVFCLYCKLFGEGKNQLKNENGCKDWQHLSHILSKHEESEMHVNNSVKYSKLKSDLKKNKAIDAAEHRLYENEKNDGVLLLYT

SEQ ID NO: 329722 - DNA, 3268 bp, Artificial Sequence
  derived and/or modified sequence
cgcgaaaagccgggactggacctcgcggagttgtgcttgtcgccgaagcggggtgggcttgttcgttccgcgcagccgcagccagaaccgggtgacgcttatccccgctgtctttccagtccagggccgctgagagtgggggtggctgggagcagcgcagcctccggaggaggaggcggaggccgaggaccaggaatcaccttcaagcctatgtcgtgaggctttggcagaaattaagaaggaaatatctccattgttcattggcatggaaaaatgttcagtgggaggattagagttgactgaacagactcctgctttattagggaatatggccatggcaactagtctcatggacataggggattcatttggtcatccagcttgtcctttagtcagtagatctaggaactcaccagtggaagatgatgatgatgatgatgatgttgtgtttattgaatctatacaacctccttcaatttctgctccagcaatagctgatcaaagaaacttcatatttgcatcatcaaaaaatgaaaagcctcaaggaaattattctgtaattcctccttcttcaagagatttggcatctcagaaaggaaatataagtgagacaattgttattgatgatgaagaggacatagaaacaaatggaggagcagagaaaaagtcttcctgttttatcgaatggggacttcctggaactaaaaacaaaaccaacgatttggatttctccacttccagtctttcaagaagtaagaccaagactggagtaagaccttttaaccctggtagaatgaatgtggcaggagacttatttcagaatggagaatttgcaactcatcatagtcctgattcttggatctcccagtcagcttcatttcccagtaatcagaaacagccaggggtggattctttatcaccagtggccttacttcgtaagcagaatttccagcctacagcccaacaacaacttactaaaccagctaaaatcacttgtgcaaattgcaaaaagcctttacagaagggacagacagcttatcaacgaaaaggatcagctcacctcttttgctctaccacctgcctttcttccttctctcataaacgtactcaaaacacacgaagcataatatgtaaaaaagatgcatctacaaagaaggctaatgtcattcttccagtagaatcaagcaaatccttccaagaattttatagtacatcttgtttgtctccctgtgaaaacaactggaatcttaaaaaaggagtttttaataagtcaagatgtacaatttgtagtaaattagcagagattcgccatgaagtcagcgtaaataatgtaacacataaactgtgcagtaaccattgctttaataagtacagattggccaatggtctaataatgaactgctgtgaacactgtggagagtacatgcctagtaagagtactggaaacaacatcctggtgattggaggtcagcagaagagattttgctgccaaagttgtattaacgaatataaacagatgatggaaacaaaatcaaaaaaattaacagcatcagaaaatagaaaaaggaatgcttttagagaagaaaatgagaaacaattatatggatcgtcaaatacacttttgaaaaaaatagagggaatcccagaaaaaaaggaaaagacttcacagctacagctttcagtagaatgtggcacggatacattactgatccaagagaatgtgaatttacctccttcttccacgtcaaccatagctgatacatttcaagagcaactggaagagaaaaattttgaagactccattgtaccagttgtgctttccgcagatccaggtacgtggccccgaattttgaatattaaacaacgggacactcttgttgaaaatgttccgcctcaagtaagaaattttaactttccaaaagataatacagggaggaagttttcagaaacttattatacacggattcttccaaatggtgaaaaaaccactagatcctggttactttattcaacctcaaaagattctgtgttttgtctatattgcaaactctttggggaaggaaaaaatcaactgaaaaatgaaaatgggtgcaaagattggcaacatttatcacatattcttagtaaacatgaagaaagtgaaatgcacgtcaacaatagtgttaagtactcaaaattaaaatctgatctgaaaaaaaataaagctattgatgctgcagaacacagattatatgaaaatgagaaaaatgatggtgtgctgttgttgtacacgtaatatacctgagttgttttttggcatgatgatcagaatcttacattactcagaaaacatctgtcctgcaatagtcagtactattgtgttgtaagtctcctctacagagtaacttgcagcagttccttagcaataagtatgatagcaaataaatagcaaagaatgtttccattctaaatctaaaactaattagattcaatcatcattaggcaatgacttcattaggcaatgaagattaacaataggtaattgttaatcttcaaaatctatcaatttacacctatttaaaaattggcatttaatgactgccatttgatgggtttggttaatattctgttcttggccgggcgcaatggctcacgcctgtaatccaagaactttgggaggctcaggcgggtagatcaattgaggtcagaagttcaagaccagcctggccaacgtggcaaaacctcgtctttactaaaaatacaaaaattagccaggtgtggtggcacacacctgtagtcccagctactcaggaggctgaggcaggagaatcgcttgaacccaggaggcagaggttgcagtgagctgagattgcaccactgcagtccagcctgagcaacagagcgagagtcagtctcaaaagaaagaaaaatattatgttctaattaccttgaaagaggaaagaaaggcttgaattgatcaataccagtttgaataagatacttatgtgaacaagcattctcaacattattattaaagtaaaactactcagtttacagaatgggatctgaaactacagctttttgctattaaaccaaatacttgtgatctactttgtttgagcaaaacagcattatttgttatgttaatgatggttaatttccattttattggttttatgtttattttaatttgtaaatgttttagcatttattattgtatgtgaactatatttacctattttatgttgataaaaatataaaaaatattaaaataagtatatattaagtt

SEQ ID NO: 329723 - protein, 445 aa, Artificial Sequence
  derived and/or modified sequence
MNRHLCVWLFRHPSLNGYLQCHIQLHSHQFRQIHLDTRLQVFRQNRNCILHLLSKNWSRRYCHQDTKMLWKHKALQKYMENLSKEYQTLEQCLQHIPVNEENRRSLNRRHAELAPLAAIYQEIQETEQAIEELESMCKSLNKQDEKQLQELALEERQTIDQKINMLYNELFQSLVPKEKYDKNDVILEVTAGRTTGGDICQQFTREIFDMYQNYSCYKHWQFELLNYTPADYGGLHHAAARISGDGVYKHLKYEGGIHRVQRIPEVGLSSRMQRIHTGTMSVIVLPQPDEVDVKLDPKDLRIDTFRAKGAGGQHVNKTDSAVRLVHIPTGLVVECQQERSQIKNKEIAFRVLRARLYQQIIEKDKRQQQSARKLQVGTRAQSERIRTYNFTQDRVSDHRIAYEVRDIKEFLCGGKGLDQLIQRLLQSADEEAIAELLDEHLKSAK

SEQ ID NO: 329724 - DNA, 1948 bp, Artificial Sequence
  derived and/or modified sequence
gtactcacagttctttcctgatcttccccgccgcctcctgtattgcctctttatggaatcactccatatactgagttacacagcatggtttgcccgtgctgctgccccgcgggctgtcgcttctgacctgcctacactcagaactttccccaaagcatcagagtaatactgttactgtgatgggtaatggagaagtcgtgctgttctcagcgtgttgctttgtcgcccacgctggttgcagtggtgcgatctcagttcactgcaaccttcgcctcccaggttcaagcgattatcctgcctcagcttcccgagcagctaggactacaggatctcagctaaacgggaagcatttttgaaaagtgattgcacaattgagagtgaaaattactgagtcctgaacaggcaacttacattctaataccagctctgtctccatccagccgactgaatagtcgtgattaaatgctgagatgaatcgtcacctgtgtgtttggctttttagacatccatctcttaatggttacctccagtgtcacatccagctccattctcatcaatttagacagatacatcttgatacaaggctgcaagtttttagacaaaacaggaattgcattcttcatctgttaagtaagaattggtccaggagatattgccatcaagacaccaagatgctctggaagcataaagcactacagaaatatatggagaacctgagtaaggagtaccaaacacttgagcaatgtctgcagcatatccctgtgaatgaggaaaaccgaaggtccttgaacagaaggcatgctgagttggcacctcttgcagccatttaccaagaaattcaggagactgaacaagcaattgaagaattagaatcaatgtgtaaaagcctaaataaacaagatgaaaagcagttacaagaacttgcactggaagaaaggcaaaccattgatcaaaaaatcaacatgttgtacaatgagcttttccagagccttgtgccaaaggagaaatatgacaaaaatgatgttattttagaggtgacagctggaaggactactggaggtgacatctgccaacaatttacccgagaaatatttgacatgtaccagaattattcgtgctataaacactggcaatttgaacttctgaattatacaccagcagattatggtggactacatcatgcagccgcccgaatttccggtgacggtgtctataagcatttgaagtatgagggtgggattcaccgagttcagcgcatccccgaggtgggcctgtcctcaaggatgcagcgcattcacacaggaacgatgtcggttattgtccttcctcagccagatgaggtggatgtgaaattggaccccaaggatttgcgaatagatacatttcgagccaaaggagcaggagggcagcatgttaataaaactgatagtgccgtcagacttgtccacatccccacagggctagtagtagaatgccaacaagaaagatcacagataaaaaataaagaaatagcctttcgtgtgttgagagctagactctaccagcagattattgagaaagacaagcgtcagcaacaaagtgctagaaaactgcaggtgggaacaagagcccagtcagagcgaattcggacatataatttcacccaggatagagtcagtgaccacaggatagcatatgaagttcgtgatattaaggaatttttatgtggtgggaagggcctggatcagctaattcagagactgcttcaatcagcagatgaagaagccattgctgaacttttggatgaacaccttaaatcagcaaaataaatactaacttattattatttatgattatataaatgaaatggacctatatcaagaggcagactgaagcttggaaatcattatgaatatttgtaaattacagctttaagaacacattacacataaatatatgttttgtaatt

SEQ ID NO: 329725 - protein, 151 aa, Artificial Sequence
  derived and/or modified sequence
MNRHLCVWLFRHPSLNGYLQCHIQLHSHQFRQIHLDTRLQVFRQNRNCILHLLSKNWSRRYCHQDTKMLWKHKALQKYMENLSKEYQTLEQCLQHIPVNEENRRSLNRRHAELAPLAAIYQEIQETEQAIEELESMCKKTESCSVAQAGMQ

SEQ ID NO: 329726 - protein, 468 aa, Artificial Sequence
  derived and/or modified sequence
MGNGEVVLFSDAEMNRHLCVWLFRHPSLNGYLQCHIQLHSHQFRQIHLDTRLQVFRQNRNCILHLLSKNWSRRYCHQDTKMLWKHKALQKYMENLSKEYQTLEQCLQHIPVNEENRRSLNRRHAELAPLAAIYQEIQETEQAIEELESMCKSLNKQDEKQLQELALEERQTIDQKINMLYNELFQSLVPKEKYDKNDVILEVTAGRTTGGDICQQFTREIFDMYQNYSCYKHWQFELLNYTPADYGGLHHAAARISGDGVYKHLKYEGGIHRVQRIPEVGLSSRMQRIHTGTMSVIVLPQPDEVDVKLDPKDLRIDTFRAKGAGGQHVNKTDSAVRLVHIPTGLVVECQQERSQIKNKEIAFRVLRARLYQQIIEKDKRQQQSARKLQVGTRAQSERIRTYNFTQDRVSDHRIAYEVRDIKAQSHSTGGSRDPAHSTFLSLDSVRSPGILIMTSSVRNFYVVGRAWIS

SEQ ID NO: 329727 - DNA, 1407 bp, Artificial Sequence
  derived and/or modified sequence
atgggcaacggtgaggttgtgcttttctcagatgccgagatgaatcgacacttatgcgtttggctcttcaggcacccatcccttaacggatacctgcagtgtcacattcagctacactcgcatcagtttcggcagatacacttagacacaagattacaggtgtttcgccagaaccggaattgtattttgcacctgctgtcgaagaactggtcaagaaggtactgccatcaggacaccaaaatgctctggaagcacaaagcactgcagaagtacatggaaaatctttccaaagaatatcagaccctggagcagtgcctacagcatatccccgtgaatgaggagaatcggcgaagccttaatagacggcacgcagagctggcccccctcgccgcaatatatcaggaaatccaagaaactgaacaggcaatagaggaattggaaagcatgtgtaagtcactgaacaaacaggatgagaagcaattgcaagagctggctctggaggagcgacagacaatcgaccagaagattaatatgctgtataacgaacttttccagagtctggtgcctaaagaaaagtacgataagaatgacgtaattctggaggtgactgccgggcgaactacgggcggcgacatatgtcaacagttcacaagggaaatctttgatatgtatcagaattattcttgctataaacactggcagttcgagctcttaaactataccccagccgattacggagggttgcatcacgcggccgctaggatatcaggggatggggtgtataagcacctcaagtatgagggtggcatacatcgggtgcagagaattcccgaagtgggtctgagtagcaggatgcagagaatccataccggcacaatgtcggtgatagtgctgccgcaacccgacgaggtcgacgtaaagctagatcctaaggatcttaggatcgacacttttcgcgctaagggggcgggaggccagcacgtcaacaaaaccgatagtgctgtccgtctcgtccacattcctactggccttgtggtcgaatgccagcaggagagatcacagatcaagaataaggagatcgccttcagggtgttacgggcgagactctaccaacagatcatcgaaaaagataagcgccagcagcagtccgccaggaagctccaagttggcaccagagctcagtccgaaagaattagaacctacaatttcactcaagacagggtgtctgaccataggatcgcatatgaggtccgggacatcaaggctcaatcacacagcactggaggctctcgagacccggcccattcgacattcctaagcctagattcagtcaggagcccaggtattctgattatgacctcctctgttcgcaacttctacgtcgtgggccgtgcttggatctcatag

SEQ ID NO: 329728 - DNA, 1407 bp, Artificial Sequence
  derived and/or modified sequence
atgggaaatggagaggtggtgctcttcagtgatgctgagatgaacagacacctgtgtgtgtggctgttccgccaccccagcctgaatggctacctgcagtgccacatccagctgcacagccaccagttccggcagatccacctggacacccggctgcaggtgttccggcagaacagaaactgcatcctgcacctgctgagcaagaactggagccgccgctactgccaccaggacaccaagatgctgtggaagcacaaggccctgcagaagtacatggagaacctgagcaaggagtaccagaccctggagcagtgcctgcagcacatccctgtgaatgaggagaacagaagaagcctgaacagaagacatgctgagctggcccccctggccgccatctaccaggagatccaggagacagagcaggccatcgaggagctggagagcatgtgcaagagcctgaacaagcaggatgagaagcagctgcaggagctggccctggaggagcggcagaccatcgaccagaagatcaacatgctgtacaatgaactcttccagagcctggtgcccaaggagaagtatgacaagaatgatgtgatcctggaggtgacagctggccgcaccaccggcggggacatctgccagcagttcacccgggagatctttgacatgtaccagaactacagctgctacaagcactggcagtttgagctgctgaactacaccccagctgactatggaggcctgcaccacgccgccgcccgcatctctggagatggagtgtacaagcacctgaagtatgagggcggcatccaccgggtgcagagaattcctgaggtgggcctgagcagcaggatgcagaggatccacacaggcaccatgtctgtcatcgtgctgccccagccagatgaggtggatgtgaagctggaccccaaggacctgagaattgacaccttccgggccaagggagctgggggccagcacgtgaacaagacagattctgctgtgcggctggtgcacatccccaccggcctggtggtggagtgccagcaggagaggagccagatcaagaacaaggagatcgccttccgggtgctgcgggcccggctgtaccagcagatcatcgagaaggacaagaggcagcagcagagcgccaggaagctgcaggtgggcacccgggcccagagcgagcgcatccgcacctacaacttcacccaggacagagtgtctgaccacagaattgcctatgaggtgcgggacatcaaggcccagagccacagcactggaggcagccgggaccctgcccacagcaccttcctgagcctggacagcgtgcgcagccctggcatcctgatcatgaccagctctgtgaggaacttctacgtggtgggccgggcctggatctcctag

SEQ ID NO: 329729 - DNA, 1740 bp, Artificial Sequence
  derived and/or modified sequence
aacccggaagaagtgaaccaggaagtgaacgtgatctcgggtactcacagttctttcctgatcttccccgccgcctcctgtattgcctctttatggaatcactccatatactgagttacacagcatggtttgcccgtgctgctgccccgcgggctgtcgcttctgacctgcctacactcagaactttccccaaagcatcagagtaatactgttactgtgatgggtaatggagaagtcgtgctgttctcagatgctgagatgaatcgtcacctgtgtgtttggctttttagacatccatctcttaatggttacctccagtgtcacatccagctccattctcatcaatttagacagatacatcttgatacaaggctgcaagtttttagacaaaacaggaattgcattcttcatctgttaagtaagaattggtccaggagatattgccatcaagacaccaagatgctctggaagcataaagcactacagaaatatatggagaacctgagtaaggagtaccaaacacttgagcaatgtctgcagcatatccctgtgaatgaggaaaaccgaaggtccttgaacagaaggcatgctgagttggcacctcttgcagccatttaccaagaaattcaggagactgaacaagcaattgaagaattagaatcaatgtgtaaaagcctaaataaacaagatgaaaagcagttacaagaacttgcactggaagaaaggcaaaccattgatcaaaaaatcaacatgttgtacaatgagcttttccagagccttgtgccaaaggagaaatatgacaaaaatgatgttattttagaggtgacagctggaaggactactggaggtgacatctgccaacaatttacccgagaaatatttgacatgtaccagaattattcgtgctataaacactggcaatttgaacttctgaattatacaccagcagattatggtggactacatcatgcagccgcccgaatttccggtgacggtgtctataagcatttgaagtatgagggtgggattcaccgagttcagcgcatccccgaggtgggcctgtcctcaaggatgcagcgcattcacacaggaacgatgtcggttattgtccttcctcagccagatgaggtggatgtgaaattggaccccaaggatttgcgaatagatacatttcgagccaaaggagcaggagggcagcatgttaataaaactgatagtgccgtcagacttgtccacatccccacagggctagtagtagaatgccaacaagaaagatcacagataaaaaataaagaaatagcctttcgtgtgttgagagctagactctaccagcagattattgagaaagacaagcgtcagcaacaaagtgctagaaaactgcaggtgggaacaagagcccagtcagagcgaattcggacatataatttcacccaggatagagtcagtgaccacaggatagcatatgaagttcgtgatattaaggctcagtctcattccacgggtggtagtcgtgaccctgcacattccacattcctatccttggattctgtgagatcacctggtattctcattatgacttcttctgttaggaatttttatgtggtgggaagggcctggatcagctaattcagagactgcttcaatcagcagatgaagaagccattgctgaacttttggatgaacaccttaaatcagcaaaataaatactaacttattattatttatgattatataaatgaa

SEQ ID NO: 329730 - DNA, 1407 bp, Artificial Sequence
  derived and/or modified sequence
atgggcaacggcgaggtggtgctgttcagcgacgccgagatgaaccgacatctttgcgtgtggctttttcggcatccatcgctaaacggttatctgcaatgccacattcagctgcactctcaccaatttagacagatccacttagacaccagacttcaggtgttccgtcagaacaggaattgcattctccacctcttatcaaagaactggagcaggcggtactgccatcaggatacaaaaatgctttggaagcataaggcactacaaaaatacatggaaaatctctccaaagagtatcagacactggaacagtgtcttcagcatatccccgtcaacgaagaaaataggcgaagcctgaaccggaggcacgcagagctggcacctttggcagctatctaccaagagatccaggaaactgagcaggctatcgaagaactggagtctatgtgcaaaagcctcaacaagcaagatgaaaaacagttgcaggagctggctctggaggaacggcagacaatcgaccagaaaattaatatgctctacaacgagctgttccaaagcctggtccctaaggaaaagtacgataagaacgatgtgattctggaagtcacagcaggccggactactggaggggatatttgccaacagtttactcgggagatcttcgacatgtaccagaactattcctgttacaaacactggcagttcgaattgctgaactacactcccgctgactatggaggactccaccatgccgcagcccgcatcagcggggacggagtctataagcatttgaagtacgagggaggaatccacagagtgcagaggatccctgaagtgggcctttcatctagaatgcagcgaattcataccgggactatgtcggtgatcgtcctgccccaacctgacgaggtggatgtgaaacttgatccaaaggacctgagaattgatacattcagggcaaaaggggccgggggccagcatgttaacaagacagactcggccgtgagactggttcacattccaaccggactggtggtggaatgccagcaagaaaggagccaaatcaagaacaaggagatagcctttcgagtcctgagggcacgtctgtaccaacagattattgagaaggacaagaggcagcagcaatccgccagaaagttgcaggtgggcaccagggctcaaagcgagagaattagaacatacaacttcacacaggaccgcgtgtcagaccacaggattgcctatgaagtgcgggatattaaggctcagtcccattccacgggcggttctagggacccggcgcacagtacatttttgtccctggatagcgtgcgaagcccaggtattctgatcatgacaagttctgtccggaacttttatgtggtgggcagggcttggatttcttag

SEQ ID NO: 329731 - DNA, 1407 bp, Artificial Sequence
  derived and/or modified sequence
atgggcaacggagaggtggtccttttttcagacgccgagatgaaccgacacctgtgcgtgtggctctttaggcacccgagcctaaacggatacctgcagtgccatatccagctgcattcccatcagttccgccagatccacctggatactcggctgcaggttttcaggcagaaccgaaattgtatcttgcacttgctgagtaagaactggagcagacgctactgtcatcaggatactaaaatgctatggaaacataaggccctgcagaaatacatggaaaacctgtcgaaggaataccagacactcgaacagtgccttcaacacatcccagtcaacgaagaaaaccgcaggagcctcaaccggaggcacgccgagctggccccactggcagctatctatcaggagatccaggagaccgagcaggctatagaggagctggagagcatgtgtaagtctctaaacaagcaggacgagaagcaacttcaagagctggccctcgaggagcggcaaaccattgaccagaagattaatatgctgtacaacgagctatttcagtccttagtgcctaaggagaagtacgacaaaaacgatgttatcctcgaagtaaccgctggcagaaccaccggcggtgacatatgccagcagttcacgagggagatcttcgacatgtaccagaactactcttgttacaagcattggcagtttgaactactgaactacacgccggcagattacgggggactgcaccacgccgcagctcgaatctcaggagacggcgtgtacaagcatctgaagtacgagggaggcatccacagagtacagcgaattcccgaagtaggactgagttctcggatgcaaaggattcacacaggcaccatgtctgtgattgtattgccccagccggacgaagtggatgttaagctggaccctaaagacctgcggattgacacctttcgcgcaaaaggcgcaggagggcagcacgttaataaaacggacagcgcagttagactggtccacataccgaccgggttggtggtggaatgtcaacaggaacggtctcagattaaaaacaaggagatagccttccgggtcctgagggccagattgtaccaacagatcatcgaaaaagacaagagacaacagcagtccgccaggaaactgcaggtgggcactagagcacaatccgaaaggatccgcacctataactttacccaagatcgcgtctctgatcaccgaatagcttacgaggttcgcgatatcaaggctcagagccatagtaccggcggtagcagggatccagcccattctacgttcctctctctagatagcgtgcggtcccccggaattctgatcatgacctcttcggtgcggaatttttatgtggtcggcagagcgtggatatcctag

SEQ ID NO: 329732 - DNA, 1407 bp, Artificial Sequence
  derived and/or modified sequence
atgggcaacggcgaggtggtgctgttcagcgacgccgagatgaacagacacctgtgcgtgtggctgttcagacaccccagcctgaacggctacctgcagtgccacatccagctgcacagccaccagttcagacagatccacctggacaccagactgcaggtgttcagacagaacagaaactgcatcctgcacctgctgagcaagaactggagcagaagatactgccaccaggacaccaagatgctgtggaagcacaaggccctgcagaagtacatggagaacctgagcaaggagtaccagaccctggagcagtgcctgcagcacatccccgtgaacgaggagaacagaagaagcctgaacagaagacacgccgagctggcccccctggccgccatctaccaggagatccaggagaccgagcaggccatcgaggagctggagagcatgtgcaagagcctgaacaagcaggacgagaagcagctgcaggagctggccctggaggagagacagaccatcgaccagaagatcaacatgctgtacaacgagctgttccagagcctggtgcccaaggagaagtacgacaagaacgacgtgatcctggaggtgaccgccggcagaaccaccggcggcgacatctgccagcagttcaccagagagatcttcgacatgtaccagaactacagctgctacaagcactggcagttcgagctgctgaactacacccccgccgactacggcggcctgcaccacgccgccgccagaatcagcggcgacggcgtgtacaagcacctgaagtacgagggcggcatccacagagtgcagagaatccccgaggtgggcctgagcagcagaatgcagagaatccacaccggcaccatgagcgtgatcgtgctgccccagcccgacgaggtggacgtgaagctggaccccaaggacctgagaatcgacaccttcagagccaagggcgccggcggccagcacgtgaacaagaccgacagcgccgtgagactggtgcacatccccaccggcctggtggtggagtgccagcaggagagaagccagatcaagaacaaggagatcgccttcagagtgctgagagccagactgtaccagcagatcatcgagaaggacaagagacagcagcagagcgccagaaagctgcaggtgggcaccagagcccagagcgagagaatcagaacctacaacttcacccaggacagagtgagcgaccacagaatcgcctacgaggtgagagacatcaaggcccagagccacagcaccggcggcagcagagaccccgcccacagcaccttcctgagcctggacagcgtgagaagccccggcatcctgatcatgaccagcagcgtgagaaacttctacgtggtgggcagagcctggatcagctag

SEQ ID NO: 329733 - DNA, 1865 bp, Artificial Sequence
  derived and/or modified sequence
cgtgatctcgggtttgtcgggctgaaatgtggcgggtctcggaaggttccgacctcagtaaagagagctaacgtgtattcttctttttcttagatgctgagatgaatcgtcacctgtgtgtttggctttttagacatccatctcttaatggttacctccagtgtcacatccagctccattctcatcaatttagacagatacatcttgatacaaggctgcaagtttttagacaaaacaggaattgcattcttcatctgttaagtaagaattggtccaggagatattgccatcaagacaccaagatgctctggaagcataaagcactacagaaatatatggagaacctgagtaaggagtaccaaacacttgagcaatgtctgcagcatatccctgtgaatgaggaaaaccgaaggtccttgaacagaaggcatgctgagttggcacctcttgcagccatttaccaagaaattcaggagactgaacaagcaattgaagaattagaatcaatgtgtaaaagcctaaataaacaagatgaaaagcagttacaagaacttgcactggaagaaaggcaaaccattgatcaaaaaatcaacatgttgtacaatgagcttttccagagccttgtgccaaaggagaaatatgacaaaaatgatgttattttagaggtgacagctggaaggactactggaggtgacatctgccaacaatttacccgagaaatatttgacatgtaccagaattattcgtgctataaacactggcaatttgaacttctgaattatacaccagcagattatggtggactacatcatgcagccgcccgaatttccggtgacggtgtctataagcatttgaagtatgagggtgggattcaccgagttcagcgcatccccgaggtgggcctgtcctcaaggatgcagcgcattcacacaggaacgatgtcggttattgtccttcctcagccagatgaggtggatgtgaaattggaccccaaggatttgcgaatagatacatttcgagccaaaggagcaggagggcagcatgttaataaaactgatagtgccgtcagacttgtccacatccccacagggctagtagtagaatgccaacaagaaagatcacagataaaaaataaagaaatagcctttcgtgtgttgagagctagactctaccagcagattattgagaaagacaagcgtcagcaacaaagtgctagaaaactgcaggtgggaacaagagcccagtcagagcgaattcggacatataatttcacccaggatagagtcagtgaccacaggatagcatatgaagttcgtgatattaaggaatttttatgtggtgggaagggcctggatcagctaattcagagactgcttcaatcagcagatgaagaagccattgctgaacttttggatgaacaccttaaatcagcaaaataaatactaacttattattatttatgattatataaatgaaatggacctatatcaagaggcagactgaagcttggaaatcattatgaatatttgtaaattacagctttaagaacacattacacataaatatatgttttgtaattaatcgaagtcacatttcctgacctaagaatttattttaggtttcctgtaaagtacaatccaactcatcaagtagaaaataagcatgcatcattgaaaagagaaagtattgagaattgattgtgtcatttaggacaagtcacttgttctctttatatgccttttttccccagccatctatgaattaatttaaatatatttttaatctactacttcaggaaaatatggtaaaatttagtaaaatatgaattttagacttccttataaaccttttatttaaatacaaag

SEQ ID NO: 329734 - DNA, 456 bp, Artificial Sequence
  derived and/or modified sequence
atgaaccgtcatttatgtgtgtggctgttcaggcacccatctctgaatggatatctgcaatgccacattcagctgcatagccaccaatttaggcagatccatcttgacacccgcttgcaggtttttcggcagaatcggaactgtatcctgcatctcctgtctaaaaactggagtaggagatactgccatcaggatacaaaaatgctctggaagcacaaagctctgcaaaaatatatggaaaatttgtcaaaggagtatcagaccctggagcagtgtcttcaacatatccccgtgaatgaggaaaatcgcagatcactgaatcggcgccacgcagagcttgctccactcgccgctatttatcaagaaatacaagaaaccgaacaggctatcgaagagctggagtcaatgtgcaaaaaaactgagtcttgctctgtcgcccaggccgggatgcagtag

SEQ ID NO: 329735 - DNA, 456 bp, Artificial Sequence
  derived and/or modified sequence
atgaacagacacctgtgtgtgtggctgttccgccaccccagcctgaatggctacctgcagtgccacatccagctgcacagccaccagttccggcagatccacctggacacccggctgcaggtgttccggcagaacagaaactgcatcctgcacctgctgagcaagaactggagccgccgctactgccaccaggacaccaagatgctgtggaagcacaaggccctgcagaagtacatggagaacctgagcaaggagtaccagaccctggagcagtgcctgcagcacatccctgtgaatgaagaaaatagaagaagcctgaacagaagacatgctgagctggcccccctggccgccatctaccaggagatccaggagacagagcaggccatcgaggagctggagagcatgtgcaagaagacagagagctgcagcgtggcccaggccggcatgcagtag

SEQ ID NO: 329736 - DNA, 1558 bp, Artificial Sequence
  derived and/or modified sequence
cgggtttgtcgggctgaaatgtggcgggtctcggaaggttccgacctcagtaaagagagctaacgtgtattcttctttttcttagcgtgttgctttgtcgcccacgctggttgcagtggtgcgatctcagttcactgcaaccttcgcctcccaggttcaagcgattatcctgcctcagcttcccgagcagctaggactacaggtgtgtgccatcacgctcagctaatttttttggtatttttagtagagatggggttttcccatgttggccaggctggtctcgaactcctgacctcagatgatctgcccgcctcggcctcccaaagtggtaggattacaggcgtgagccactgtgctcggcacattttgatgctgagatgaatcgtcacctgtgtgtttggctttttagacatccatctcttaatggttacctccagtgtcacatccagctccattctcatcaatttagacagatacatcttgatacaaggctgcaagtttttagacaaaacaggaattgcattcttcatctgttaagtaagaattggtccaggagatattgccatcaagacaccaagatgctctggaagcataaagcactacagaaatatatggagaacctgagtaaggagtaccaaacacttgagcaatgtctgcagcatatccctgtgaatgaggaaaaccgaaggtccttgaacagaaggcatgctgagttggcacctcttgcagccatttaccaagaaattcaggagactgaacaagcaattgaagaattagaatcaatgtgtaaaaagacagagtcttgctctgtggcccaggctggaatgcagtagtgtaatcatagctcactttaaccttgaactcctggactcaagcaatcctccaacctcagcctcccaagtagctgggactacaggcctaaataaacaagatgaaaagcagttacaagaacttgcactggaagaaaggcaaaccattgatcaaaaaatcaacatgttgtacaatgagcttttccagagccttgtgccaaaggagaaatatgacaaaaatgatgttattttagaggtgacagctggaaggactactggaggtgacatctgccaacaatttacccgagaaatatttgacatgtaccagaattattcgtgctataaacactggcaatttgaacttctgaattatacaccagcagattatggtaggcatattgaggaatttgcctgtaggagatactgaaaattattttacctctgatcttgattagaaccatattgtcccatttttttttgaaacttttggtgtatatctactaaacactgtggcataggctcatcaatcacagtggcttactattatagcagagttgttagctaggagaagacagtagaaaggagggaagcatttgcttagggagaaatatgtgaattagagaaaattcccctgaggaacttagatacgtatcttgcctcaaaatcatttttctctattattgaaagcaaaggtatattaaggtttttactttaaataactttataaaataatataagtattactaatt

SEQ ID NO: 329737 - DNA, 456 bp, Artificial Sequence
  derived and/or modified sequence
atgaaccggcacctgtgcgtgtggctgttccggcaccccagcctgaacggctatcttcagtgtcacatccagttgcactcccatcaatttcggcagattcacttggatacaaggctgcaagtgtttaggcaaaaccggaattgcatcttgcacttattgtccaagaattggtcccgacgttattgtcatcaagacactaagatgctatggaaacacaaggctcttcagaaatacatggaaaatctcagtaaggagtaccagacactggagcagtgtctgcaacacatccccgtgaacgaggaaaatcgccggagtctgaatagaagacacgctgagctcgctccgctcgctgctatctaccaggagatacaagaaactgagcaggccatcgaagagctcgaatcaatgtgtaagaagacggagagctgttcagttgcccaggcaggaatgcaatag

SEQ ID NO: 329738 - DNA, 456 bp, Artificial Sequence
  derived and/or modified sequence
atgaaccgtcatctctgcgtatggttatttcgccatccatcgttaaacggttatctgcagtgtcatatacagctgcacagtcaccagtttcgacagattcacctggatactagacttcaagtgtttcgccagaatcggaattgcatactgcacctcctgagcaagaactggtcgcggaggtattgccatcaggacaccaaaatgttgtggaagcataaggctctgcagaagtacatggagaacctatccaaggaataccagacgctcgagcagtgtctccagcacatcccagtgaatgaggaaaacagacgctctctgaatagaaggcatgctgaactggcccctctcgctgcaatctaccaggagatccaggaaacagaacaagccatcgaggagcttgaatcgatgtgcaagaaaactgagagctgcagtgttgctcaggccggtatgcagtag

SEQ ID NO: 329739 - DNA, 456 bp, Artificial Sequence
  derived and/or modified sequence
atgaacagacacctgtgcgtgtggctgttcagacaccccagcctgaacggctacctgcagtgccacatccagctgcacagccaccagttcagacagatccacctggacaccagactgcaggtgttcagacagaacagaaactgcatcctgcacctgctgagcaagaactggagcagaagatactgccaccaggacaccaagatgctgtggaagcacaaggccctgcagaagtacatggagaacctgagcaaggagtaccagaccctggagcagtgcctgcagcacatccccgtgaacgaggagaacagaagaagcctgaacagaagacacgccgagctggcccccctggccgccatctaccaggagatccaggagaccgagcaggccatcgaggagctggagagcatgtgcaagaagaccgagagctgcagcgtggcccaggccggcatgcagtag

SEQ ID NO: 329740 - DNA, 462 bp, Artificial Sequence
  derived and/or modified sequence
gtgcggggtgcatccgctaggcccccattactgggatctgaggaacccctgtgtccagctagccggccagtgcgggagggtggcggtggcgtcagccccccacctggacaacctcccaggccgggaggacggtggggaggccaaccccctgccaggccagctgcaccatccgggagggaagtgggcggagggcagcctccttgccccgcatctcgacctgtcagagaagtccggggtgcctctgcgaggcctccactgctcgggtctgaagaaccactctgtccagctagccggccagtgagagaaggagggggtggggtgtcacctccacccggacagccaccccgacctggacggggtgcctcagccaggcccccactgctcgggtcagaggagccactatgccccgctactaccccctccgggaggtgcgcccagcagctcatagagaacgggccttag

SEQ ID NO: 329741 - protein, 167 aa, Artificial Sequence
  derived and/or modified sequence
MTEITAEGNASTTTTVIDSKNGSVPKSPGKVLKRTVTEDIVTTFSSPAAWLLVIALIITWSAVAIVMFDLVDYKNFSASSIAKIGSDPLKLVRDAMEETTDWIYGFFSLLSDIISSEDEEDDDGDEDTDKGEIDEPPLRKKEIHKDKTEKQEKPERKIQTKEVGHSS

SEQ ID NO: 329742 - protein, 359 aa, Artificial Sequence
  derived and/or modified sequence
MTSTSKGILRPFLIVCIILGCFMACLLIYIKPTNSWIFSPMESASSVLKMKNFFSTKTDYFNETTILVWVWPFGQTFDLTSCQAMFNIQGCHLTTDRSLYNKSHAVLIHHRDISWDLTNLPQQARPPFQKWIWMNLESPTHTPQKSGIEHLFNLTLTYRRDSDIQVPYGFLTVSTNPFVFEVPSKEKLVCWVVSNWNPEHARVKYYNELSKSIEIHTYGQAFGEYVNDKNLIPTISTCKFYLSFENSIHKDYITEKLYNAFLAGSVPVVLGPSRENYENYIPADSFIHVEDYNSPSELAKYLKEVDKNNKLYLSYFNWRKDFTVNLPRFWESHACLACDHVKRHQEYKSVGNLEKWFWN

SEQ ID NO: 329743 - DNA, 2715 bp, Artificial Sequence
  derived and/or modified sequence
gcagcttcagcgaagccggagatgggcagagagcgcgcgcggcgcagcagctccagattcactgctctcccctgcagctccccgcgcccccgccgctgtcgctgcctcggtgtcccccagccccagtcgcgctcttaggacagcgccgccaccgccgcctggccctgcctgcctcctgcgccgcgcagccctcgcgagcgccccggatggcgctttacccctaggaccgatttagaatgtaataactcaaggatttgataatacagtgaagtagtataacaactgtctacgtgcttcccatgatatgttctctatattgaaaaattatgacatcaacatccaaaggaattcttcgcccatttttaattgtctgcattatcctgggctgtttcatggcatgtcttctcatttacatcaaacctaccaacagctggatcttcagtccaatggaatcagccagctctgtgctgaaaatgaaaaacttcttttccaccaaaactgattattttaatgaaactactattctggtgtgggtgtggccatttgggcagacctttgaccttacatcctgccaagcaatgttcaacatccaaggatgccatctcacaacggaccgttcactgtacaacaaatcccatgcagttctgatccatcaccgagacatcagttgggatctgacaaatttacctcagcaagctaggccacccttccagaaatggatttggatgaatttggaatcaccaactcacactccccaaaagagtggcattgagcacttgtttaacctgactctgacttaccgccgtgattcagatatccaagtgccttatggcttcttgacggtaagcacaaatcccttcgtgtttgaagtgccaagcaaagagaaattggtgtgctgggttgtgagtaactggaaccctgagcatgccagagtcaagtattacaatgagctaagcaaaagcattgaaatccatacctacgggcaagcatttggagaatatgtcaatgataaaaatttgattcctaccatatctacttgtaaattttatctttcctttgaaaattcaatccacaaggattacatcacggaaaagctatacaatgcttttctggctggctctgtacctgttgttctgggaccatctagggaaaactatgagaattatattccagcagattcattcattcatgtggaagattataactctcccagtgagctagcaaagtatctgaaggaagtcgacaaaaacaataagttataccttagttactttaactggaggaaggatttcactgtaaatcttccacgattttgggaatcacatgcatgtttggcttgcgatcatgtgaaaaggcatcaagaatataagtctgttggtaatttagagaaatggttttggaattaaaatttttcatcacttgcacacttgataaatattttgatgagatatcatccaagtattgaggataagaagagatgcaacatactacttttgtgtcacaatttatttttatcaccctctctagggtaacgtgtatattttggtggagatttttaaaagctcagcatgagcaatcattccattcggttttaaattatcctgtatatacctaattatgtgcactggagagtaatttattcttcattatcatttgtaaacattgttttttcacatttttgtagttgtccataatgtaagcttgtggtttgattattgtttccacactgatcagctgtttaatctatttgggaaatgaagatgcacatcttaaagtatgaaaaattttcactaagtattacaatgtctagttccaactttgcatactataacagaggaagaacatgttgcgattgaattctaacctctttgactccgaagatgaatgaagtgtataactgtctctatttgatctattttttttacctgtttatcacatttgtgaaggtgaaattattcatggagtgaataagaaagatatgaagcagaactgttctattcgggaagctattagacttctcatttattttcattaagctgatttgcagctacttattctcatggtcttaaattaaattattcaagtatttttaaatatccaatttgttgtgattttcagcacctgggaagtaatcccaataatactttagaaaatctaagacagttctttctgctactgatgacactcattgtcataataaaacaaataatttcctcaaataacaaagaaaaatgatacctataaatatatttataaatggtgtcatttatgaacaatgtttaattatgtatcaatttaagatttttttctgaagccctaatatttaaaatggtcttattttaccatatggatataagatttggctcataatgatgagccctatcatttgatttgagttctatcatttaagagagcctaaataaaattatcatcaaggtattaaatataagacgttaaatataataaagtggggatatatagaaaacacacagtgttagcacacagtaagatctcaatgcacatttgttggatgaataaataaatgcaattgaattcccagaaaaatgattgtttcaaggaagtgacagttctactttagaagtactaattggagatgacttttatatcccattttggtaattattcatacatagcacatatgaccatgatgttcagggctttatagaaccaaataaacctaccattacatgaaaa

SEQ ID NO: 329744 - DNA, 1080 bp, Artificial Sequence
  derived and/or modified sequence
atgacctctacttcaaagggcatcctgcgcccattcctgatcgtttgcatcatactgggatgtttcatggcttgtctgctgatttacataaaacctacaaactcatggatcttcagtccaatggaatccgcaagctcggtcctgaagatgaagaattttttttctaccaagacagattactttaatgagacgaccatcctggtatgggtgtggccatttggccaaactttcgatctgacgtcctgccaagccatgttcaatattcaagggtgtcacctgactacagatcggagcctctataataagtcccatgcagtcctgattcatcaccgggatatatcatgggacctgaccaatcttccacaacaagcaagacccccctttcagaaatggatatggatgaatcttgagtctcccactcatactccacagaagagcggaatcgaacacctctttaatctaaccctgacgtaccggcgcgacagtgacatccaggtcccttatggattcttaaccgtaagtaccaatcccttcgtctttgaggtgcctagtaaggagaagttggtctgctgggtggtgagcaattggaacccagagcacgctagggttaaatattacaacgagctgtcgaagagtattgaaattcatacatatggacaggcttttggagagtacgtgaatgacaagaacctgatccccaccatctctacatgtaaattttatctgtcctttgaaaattctattcataaggattacattaccgagaagttatataacgccttcttggccggctctgtgccagtagtgctcgggccttcgcgcgaaaactacgagaactacataccagccgatagtttcatccacgtggaggactataattctcccagcgagctggccaagtaccttaaggaagttgataagaataataagctctacttgtcatactttaactggagaaaggatttcacggtgaatctcccaaggttttgggagtcacacgcgtgtctcgcatgtgatcacgtgaagagacaccaggagtacaagtccgttgggaatctcgaaaagtggttttggaattag

SEQ ID NO: 329745 - DNA, 1080 bp, Artificial Sequence
  derived and/or modified sequence
atgaccagcaccagcaagggcatcctgcggcccttcctgattgtgtgcatcatcctgggctgcttcatggcctgcctgctgatctacatcaagcccaccaacagctggatcttcagccccatggagagcgccagctctgtgctgaagatgaagaacttcttcagcaccaagacagactacttcaatgagaccaccatcctggtgtgggtgtggcccttcggccagacctttgacctgaccagctgccaggccatgttcaacatccagggctgccacctgaccacagacaggagcctgtacaacaagagccatgctgtgctgatccaccaccgggacatctcctgggacctgaccaacctgccccagcaggcccggccccccttccagaagtggatctggatgaacctggagagccccacccacaccccccagaagagcggcatcgagcacctgttcaacctgaccctgacctacagaagagacagcgacatccaggtgccctacggcttcctgactgtgtccaccaacccctttgtgtttgaggtgcccagcaaggagaagctggtgtgctgggtggtgagcaactggaaccctgagcacgcccgggtgaagtactacaatgagctgagcaagagcattgagatccacacctacggccaggccttcggggagtatgtgaatgacaagaacctgatccccaccatcagcacctgcaagttctacctgagctttgaaaattccatccacaaggactacatcacagagaagctgtacaatgccttcctggccggctctgtgcctgtggtgctgggccccagcagagaaaattatgagaactacatcccagctgacagcttcatccacgtggaggactacaacagccccagcgagctggccaagtacctgaaggaggtggacaagaacaacaagctgtacctgagctacttcaactggaggaaggacttcaccgtgaacctgccccgcttctgggagagccacgcctgcctggcctgtgaccacgtgaagaggcaccaggagtacaagtctgtgggcaacctggagaagtggttctggaactag

SEQ ID NO: 329746 - DNA, 1080 bp, Artificial Sequence
  derived and/or modified sequence
atgaccagcaccagcaagggcatcctgcggcccttcctgatcgtgtgtatcattttgggatgcttcatggcatgtttgctgatctacataaagcccaccaactcatggatcttctcaccgatggagagtgcctcatcagttctaaagatgaagaacttcttctccacgaaaacagattacttcaatgagactacgatcctggtgtgggtttggcccttcggccagacatttgatctgacttcctgccaggcgatgtttaacatccaagggtgccatcttaccacagatcggtctctgtacaataagtcccacgccgtattgatccaccatagggacataagctgggacctaacaaatttgcctcagcaagcgagacctccattccagaagtggatttggatgaatctggagtccccaactcatacccctcagaagagcggaattgagcatttgttcaaccttacattgacatatcgtcgagacagtgatatacaagtgccatatggcttcctgacggtgtccacaaatcccttcgtgtttgaggttccatccaaggagaaactcgtatgttgggtggtctcgaactggaatcccgagcatgcccgggtcaagtactataacgagctgtccaagtctatcgagattcacacctatggtcaggccttcggcgagtacgtgaacgacaaaaatctaatccccactatttcaacctgtaaattctacctttcttttgaaaactcaatccacaaggattacatcactgagaagctgtataacgcgttcctggctgggagcgtcccagtcgtgcttgggccctccagggaaaactacgagaattacatccctgctgactcctttattcacgtggaagattataactctccttccgaactggcaaagtatctcaaagaggtggataagaacaataaattatacctgtcgtatttcaattggaggaaagactttaccgtgaacctgcccaggttttgggaatcacacgcatgtctggcatgcgaccacgtgaaacgacaccaagaatacaaaagcgtgggtaatctcgaaaagtggttttggaattag

SEQ ID NO: 329747 - DNA, 1080 bp, Artificial Sequence
  derived and/or modified sequence
atgacttcaacttcaaaagggattttacgtccctttctgattgtctgtataatccttgggtgcttcatggcctgtttgttaatttatataaaaccgacgaattcgtggatattttcgccaatggagtccgcatcctcagtactgaagatgaaaaactttttttcgactaaaactgactacttcaatgagaccacaattctagtctgggtttggccctttggccagaccttcgacctaacctcttgccaagcaatgtttaatatacagggatgtcatttgaccacagatcgctctctgtataataagtcgcacgcagtcctcattcaccaccgggacatcagctgggatttaacaaacctgccacagcaggctaggccaccttttcagaaatggatctggatgaatttagagtcccctacacacacacctcaaaaaagtgggatcgagcacttgttcaatctcaccctgacatatagacgcgatagtgatatacaggtgccctacggctttctgaccgtctcgaccaatcctttcgtgtttgaagtgccatccaaagagaaactggtttgttgggtggtgtcaaattggaatcccgagcacgccagagtgaaatactacaacgagctaagcaagtccattgaaatccacacttacgggcaggcgtttggcgagtatgtcaacgataaaaaccttattcctacaattagcacttgcaaattctacttgtccttcgagaacagtatccacaaagactatattaccgaaaaactctacaacgcctttttggctggctcggtcccagtggtgcttggaccaagccgggaaaattatgagaactatatccctgccgactccttcattcacgtggaggactataactcaccctctgaacttgccaaatacctgaaggaggtggacaagaacaacaaactgtacctgagctattttaactggcgcaaagattttacagtgaacctccctaggttctgggaaagccacgcttgtctggcatgcgatcacgtcaaacggcaccaggagtataaatccgtgggtaacctggagaaatggttctggaattag

SEQ ID NO: 329748 - DNA, 1080 bp, Artificial Sequence
  derived and/or modified sequence
atgaccagcaccagcaagggcatcctgagacccttcctgatcgtgtgcatcatcctgggctgcttcatggcctgcctgctgatctacatcaagcccaccaacagctggatcttcagccccatggagagcgccagcagcgtgctgaagatgaagaacttcttcagcaccaagaccgactacttcaacgagaccaccatcctggtgtgggtgtggcccttcggccagaccttcgacctgaccagctgccaggccatgttcaacatccagggctgccacctgaccaccgacagaagcctgtacaacaagagccacgccgtgctgatccaccacagagacatcagctgggacctgaccaacctgccccagcaggccagaccccccttccagaagtggatctggatgaacctggagagccccacccacaccccccagaagagcggcatcgagcacctgttcaacctgaccctgacctacagaagagacagcgacatccaggtgccctacggcttcctgaccgtgagcaccaaccccttcgtgttcgaggtgcccagcaaggagaagctggtgtgctgggtggtgagcaactggaaccccgagcacgccagagtgaagtactacaacgagctgagcaagagcatcgagatccacacctacggccaggccttcggcgagtacgtgaacgacaagaacctgatccccaccatcagcacctgcaagttctacctgagcttcgagaacagcatccacaaggactacatcaccgagaagctgtacaacgccttcctggccggcagcgtgcccgtggtgctgggccccagcagagagaactacgagaactacatccccgccgacagcttcatccacgtggaggactacaacagccccagcgagctggccaagtacctgaaggaggtggacaagaacaacaagctgtacctgagctacttcaactggagaaaggacttcaccgtgaacctgcccagattctgggagagccacgcctgcctggcctgcgaccacgtgaagagacaccaggagtacaagagcgtgggcaacctggagaagtggttctggaactag

SEQ ID NO: 329749 - protein, 491 aa, Artificial Sequence
  derived and/or modified sequence
MSLLMISENVKLAREYALLGNYDSAMVYYQGVLDQMNKYLYSVKDTYLQQKWQQVWQEINVEAKHVKDIMKTLESFKLDSTPLKAAQHDLPASEGEVWSMPVPVERRPSPGPRKRQSSQYSDPKSHGNRPSTTVRVHRSSAQNVHNDRGKAVRCREKKEQNKGREEKNKSPAAVTEPETNKFDSTGYDKDLVEALERDIISQNPNVRWDDIADLVEAKKLLKEAVVLPMWMPEFFKGIRRPWKGVLMVGPPGTGKTLLAKAVATECKTTFFNVSSSTLTSKYRGESEKLVRLLFEMARFYSPATIFIDEIDSICSRRGTSEEHEASRRVKAELLVQMDGVGGTSENDDPSKMVMVLAATNFPWDIDEALRRRLEKRIYIPLPSAKGREELLRISLRELELADDVDLASIAENMEGYSGADITNVCRDASLMAMRRRIEGLTPEEIRNLSKEEMHMPTTMEDFEMALKKVSKSVSAADIERYEKWIFEFGSC

SEQ ID NO: 329750 - protein, 211 aa, Artificial Sequence
  derived and/or modified sequence
MSLLMISENVKLAREYALLGNYDSAMVYYQGVLDQMNKYLYSVKDTYLQQKWQQVWQEINVEAKHVKDIMKTLESFKLDSTPLKAAQHDLPASEGEVWSMPVPVERRPSPGPRKRQSSQYSDPKSHGNRPSTTVRVHRSSAQNVHNDRGKAVRCREKKEQNKGREEKNKSPAAVTEPETNKFDSTGYDKDLVEALERDIISQNPNVRWDDI

SEQ ID NO: 329751 - protein, 280 aa, Artificial Sequence
  derived and/or modified sequence
MSLLMISENVKLAREYALLGNYDSAMVYYQGVLDQMNKYLYSVKDTYLQQKWQQVWQEINVEAKHVKDIMKTLESFKLDSTPLKAAQHDLPASEGEVWSMPVPVERRPSPGPRKRQSSQYSDPKSHGNRPSTTVRVHRSSAQNVHNDRGKAVRCREKKEQNKGREEKNKSPAAVTEPETNKFDSTGYDKDLVEALERDIISQNPNVRWDDIADLVEAKKLLKEAVVLPMWMPEFFKGIRRPWKGVLMVGPPGTGKTLLAKAVATECKTTFFNVSSSTLTS

SEQ ID NO: 329752 - DNA, 1476 bp, Artificial Sequence
  derived and/or modified sequence
atgagtctgcttatgattagcgagaatgttaaacttgctagagagtatgctcttttgggcaattatgacagtgctatggtgtactaccagggagtcctggatcagatgaacaagtacctctatagcgtgaaggacacctaccttcagcaaaaatggcagcaagtgtggcaggagatcaacgtggaagccaaacatgttaaagacatcatgaagaccttggagagctttaagctggattctactcctctgaaggcggcccagcacgatctgccagcatcagagggcgaagtgtggagcatgccagtgcccgtcgaacgcaggccctccccgggtccaagaaaacgtcagtccagccagtattctgaccccaaaagccatggcaatagaccatccacaactgtgcgcgtacataggagcagcgcccagaatgtgcacaatgacaggggcaaggccgtgcggtgcagagagaagaaagaacaaaacaaggggagagaggaaaagaacaaaagccccgccgccgtcacagaacccgagaccaacaagtttgactcgacaggctatgataaggatctggttgaggccctcgagcgagacatcatatcacagaaccccaatgttcgatgggacgacattgccgatctcgtggaggcaaagaagctgctgaaagaagcagtggtgttgcccatgtggatgcccgagttctttaaaggtatccgaaggccttggaagggtgtcctcatggtgggcccacccggaactggtaagaccctgctagctaaggccgtggccaccgagtgtaagacaacattcttcaacgtgagcagttctacactcacttccaagtataggggagagtctgagaagctggtccgattgctgtttgagatggcaagattttattccccggccactatctttattgatgagatcgactctatttgctcacggcgaggaactagcgaagagcacgaagctagcaggcgggtcaaggctgagctgctggttcagatggatggggtgggaggcacctcggaaaacgatgatccaagcaagatggtgatggtccttgccgcgaccaattttccttgggacattgatgaagcgttaagaagaagactggagaagcgcatctacatccctctgccctctgcaaagggcagagaggaactgctgcgaatttcccttagggaactggaacttgccgacgatgttgacttggccagcattgccgaaaatatggaggggtattcaggggccgatatcaccaatgtttgcagggacgctagcttaatggcaatgcgccggagaattgaaggtctgacccctgaggagatacgaaatctgagcaaagaggaaatgcacatgccaacgacaatggaggacttcgaaatggccctaaaaaaagtgtccaagagtgtgtctgccgccgacatcgagaggtatgagaaatggatctttgagtttgggagctgctag

SEQ ID NO: 329753 - DNA, 1476 bp, Artificial Sequence
  derived and/or modified sequence
atgtccctgctaatgattagcgaaaacgtcaagctcgccagagaatacgccctgttaggcaactatgattctgccatggtgtattaccaaggggtgctggatcagatgaacaagtacctgtattcagtaaaggacacttacctccagcagaaatggcaacaggtctggcaggagatcaacgtggaggcaaagcacgtgaaggatatcatgaagacacttgaatcgttcaagttggattccactccactgaaggctgctcaacatgatttacccgccagcgagggtgaagtttggagcatgccggtcccggttgaacgccggcccagccctggacctaggaagagacagtcttcacaatatagtgacccgaagtctcatggaaataggccgagcacaactgttagagtgcaccgaagctcagctcagaacgttcataacgaccgcggaaaagccgtccgatgccgcgagaaaaaagaacagaacaagggtcgggaagagaagaataaatccccagccgcagtgactgaacctgaaaccaacaaattcgactcaaccggctatgacaaggacctcgtcgaagctctcgagagggatatcattagtcagaatcccaatgtgcgatgggatgacattgctgacctcgtggaggctaagaagttgctcaaagaagcagtcgttctgcctatgtggatgcccgagtttttcaaagggatacggaggccctggaaaggggtactgatggtgggccctcctggaacggggaagacgctgcttgctaaggctgtagccaccgagtgtaagactacattcttcaatgttagttcatccaccctaacctcaaagtatcgcggcgagagcgaaaaacttgtgagacttttattcgaaatggccagattctacagccctgctaccattttcatagatgagattgacagtatatgctcgaggaggggcacatctgaagaacacgaggcttcacgaagggtgaaagccgagcttctcgtccagatggacggagtgggcgggacaagtgaaaatgacgatccgtccaaaatggtcatggtgctggctgccactaactttccttgggatatagatgaagccctgcggaggcgattggaaaaacgcatttacatcccactgccctccgccaaaggcagggaggaacttttacgtatttccctcagagagctggagctggccgacgatgtcgacttggccagcatcgcggagaatatggaagggtactccggagctgatatcacaaacgtgtgccgcgatgcgtccctgatggctatgaggagacgcatcgaaggcctcacccccgaagaaattagaaacctgtccaaggaagagatgcacatgcctacaactatggaggatttcgagatggcacttaaaaaagtctctaaatctgtgtctgcagctgatatcgaacgttatgagaagtggatatttgaatttggctcctgctag

SEQ ID NO: 329754 - DNA, 843 bp, Artificial Sequence
  derived and/or modified sequence
atgtccttgctgatgatatcagagaacgttaaattggccagagagtatgctttgctggggaactatgacagtgccatggtgtattatcagggcgtgctggatcaaatgaataaatatctgtattccgtgaaagatacctatctgcagcaaaaatggcagcaggtctggcaggagattaatgtcgaggccaagcacgttaaagatatcatgaagactcttgaatctttcaagcttgactcaacaccacttaaagcggcccagcacgacctccccgccagcgaaggtgaagtgtggagcatgcccgtgcccgtagaacgacgcccgtctcccggacctagaaaacgacaaagctcccagtactccgaccccaagtctcacggtaaccgccccagtacgacagtgagggtacaccgctcatccgcccaaaacgtgcacaacgatagagggaaagctgtgcggtgcagggagaagaaagagcagaataaaggcagagaagagaagaataagtcgcctgcagccgtcacggagcctgaaactaacaaatttgacagcaccggttatgacaaggacctcgtggaggccctcgaacgagatatcatcagccagaaccctaatgtcagatgggacgatatcgcagatttggtggaggctaagaagttattaaaagaggcggtggtgctccctatgtggatgcctgaattttttaaagggattaggcgaccctggaagggcgtacttatggttggcccccctggaacgggcaaaactctcctggcgaaagcagtcgcaacagaatgcaagaccaccttcttcaatgtgagctcctccacgcttacatcgtag

SEQ ID NO: 329755 - DNA, 1684 bp, Artificial Sequence
  derived and/or modified sequence
taaagtgtttctttttttcttcttctttttagcttacagttgaacatgagtcttcttatgattagtgagaatgtaaaattggctcgtgaatatgcattgctgggaaactatgactctgcgatggtctattatcagggagttcttgaccaaatgaacaagtatctgtactcagtcaaagatacatacctccagcagaaatggcaacaggtttggcaggaaataaatgtggaagctaaacatgttaaagatatcatgaaaacactagagagctttaaactggacagcactcccttgaaagcggcacagcatgaccttccagcttctgagggagaagtctggtccatgcctgtacctgttgaacgaagaccctcaccaggacctagaaaacgccaatcttctcagtacagtgaccctaaatcacatggtaatcgtccaagtacaactgtcagagttcaccgttcatctgcacagaatgttcacaatgacagagggaaagctgttcgttgtcgtgaaaagaaagaacagaataaaggaagagaggaaaagaacaaatcacctgctgcagtaacagaaccagagacaaataaatttgatagtaccggatatgataaagacttagtagaagctttggaaagagatataatttcccagaatcccaatgttcgatgggatgatatcgctgatttagtagaagctaaaaagttgcttaaggaagccgtagtgttaccaatgtggatgcccgaattctttaagggcattaggagaccatggaaaggagtactgatggtcggcccacctggcacggggaagacgctccttgctaaagcagtagctacagaatgcaagacaacattcttcaatgtctcttcatcaactttgacttccaaatacagaggagaatctgagaagcttgttcgtcttctgtttgaaatggctcgattttattctccagccaccatatttattgatgagatagactccatctgtagtcgccgagggacttctgaagaacatgaagcaagcagaagggtgaaagcggagctgctggttcagatggatggtgttggaggtacttctgaaaatgatgacccttccaaaatggttatggttctggcagctactaattttccctgggatatagatgaggctttaagacgacgccttgagaaacgaatctatattcctttgccgtcagcaaaaggcagggaggagctattacgaataagtctacgtgagttggaattggctgatgatgttgaccttgcaagtatagcagaaaacatggaaggttattcaggtgcggacattaccaacgtgtgcagggatgcgtccttgatggcaatgagaaggcgcattgaaggtttgactccagaggaaatccgaaatctttccaaagaagaaatgcacatgcctacaactatggaggatttcgagatggctttaaaaaaggtttctaagtcagtgtctgctgcagacattgaaagatacgagaaatggatatttgagtttggatcatgctaaattctcacatgtaaactgtgagaaatgtgccttaagtgtttgaatattaaatgcagtaattcattgtactgagtgctatattttttttaactttcataatggtaagatttttttaaaaaaacccttatgattctgaataaaggcaatatttttaagctgaaaa

SEQ ID NO: 329756 - DNA, 1894 bp, Artificial Sequence
  derived and/or modified sequence
agagtcgccgaggtcgtccccggcaccggaagtgaccctggcgggtttgtcttcaaattctcggcgagcaggagccgcgccggcaggtggtgttgacgattgaactgggcagtactggggccgtgagcggagagcaaagtgggctggactgggtcaggccctccttcctcgctgccgggatctccactccgccaatcccctgtgcctggcgttgggcggtttcccgaggagcttgggccgccgcagcttacagttgaacatgagtcttcttatgattagtgagaatgtaaaattggctcgtgaatatgcattgctgggaaactatgactctgcgatggtctattatcagggagttcttgaccaaatgaacaagtatctgtactcagtcaaagatacatacctccagcagaaatggcaacaggtttggcaggaaataaatgtggaagctaaacatgttaaagatatcatgaaaacactagagagctttaaactggacagcactcccttgaaagcggcacagcatgaccttccagcttctgagggagaagtctggtccatgcctgtacctgttgaacgaagaccctcaccaggacctagaaaacgccaatcttctcagtacagtgaccctaaatcacatggtaatcgtccaagtacaactgtcagagttcaccgttcatctgcacagaatgttcacaatgacagagggaaagctgttcgttgtcgtgaaaagaaagaacagaataaaggaagagaggaaaagaacaaatcacctgctgcagtaacagaaccagagacaaataaatttgatagtaccggatatgataaagacttagtagaagctttggaaagagatataatttcccagaatcccaatgttcgatgggatgatatcgctgatttagtagaagctaaaaagttgcttaaggaagccgtagtgttaccaatgtggatgcccgaattctttaagggcattaggagaccatggaaaggagtactgatggtcggcccacctggcacggggaagacgctccttgctaaagcagtagctacagaatgcaagacaacattcttcaatgtctcttcatcaactttgacttccaaatacagaggagaatctgagaagcttgttcgtcttctgtttgaaatggctcgattttattctccagccaccatatttattgatgagatagactccatctgtagtcgccgagggacttctgaagaacatgaagcaagcagaagggtgaaagcggagctgctggttcagatggatggtgttggaggtacttctgaaaatgatgacccttccaaaatggttatggttctggcagctactaattttccctgggatatagatgaggctttaagacgacgccttgagaaacgaatctatattcctttgccgtcagcaaaaggcagggaggagctattacgaataagtctacgtgagttggaattggctgatgatgttgaccttgcaagtatagcagaaaacatggaaggttattcaggtgcggacattaccaacgtgtgcagggatgcgtccttgatggcaatgagaaggcgcattgaaggtttgactccagaggaaatccgaaatctttccaaagaagaaatgcacatgcctacaactatggaggatttcgagatggctttaaaaaaggtttctaagtcagtgtctgctgcagacattgaaagatacgagaaatggatatttgagtttggatcatgctaaattctcacatgtaaactgtgagaaatgtgccttaagtgtttgaatattaaatgcagtaattcattgtactgagtgctatattttttttaactttcataatggtaagatttttttaaaaaaacccttatgattctgaataaaggcaatatttttaagctg

SEQ ID NO: 329757 - DNA, 1138 bp, Artificial Sequence
  derived and/or modified sequence
agcgacctcgctcccggggcgacgccccgcgtgcgccagagtcgccgaggtcgtccccggcaccggaagtgaccctggcgggtttgtcttcaaattctcggcgagcaggagccgcgccggcaggtggtgttgacgattgaactgggcagtactggggccgtgagcggagagcaaagtgggctggactgggtcaggccctccttcctcgctgccgggatctccactccgccaatcccctgtgcctggcgttgggcggtttcccgaggagcttgggccgccgcagcttacagttgaacatgagtcttcttatgattagtgagaatgtaaaattggctcgtgaatatgcattgctgggaaactatgactctgcgatggtctattatcagggagttcttgaccaaatgaacaagtatctgtactcagtcaaagatacatacctccagcagaaatggcaacaggtttggcaggaaataaatgtggaagctaaacatgttaaagatatcatgaaaacactagagagctttaaactggacagcactcccttgaaagcggcacagcatgaccttccagcttctgagggagaagtctggtccatgcctgtacctgttgaacgaagaccctcaccaggacctagaaaacgccaatcttctcagtacagtgaccctaaatcacatggtaatcgtccaagtacaactgtcagagttcaccgttcatctgcacagaatgttcacaatgacagagggaaagctgttcgttgtcgtgaaaagaaagaacagaataaaggaagagaggaaaagaacaaatcacctgctgcagtaacagaaccagagacaaataaatttgatagtaccggatatgataaagacttagtagaagctttggaaagagatataatttcccagaatcccaatgttcgatgggatgatatcgctgatttagtagaagctaaaaagttgcttaaggaagccgtagtgttaccaatgtggatgcccgaattctttaagggcattaggagaccatggaaaggagtactgatggtcggcccacctggcacggggaagacgctccttgctaaagcagtagctacagaatgcaagacaacattcttcaatgtctcttcatcaactttgacttccaa

SEQ ID NO: 329758 - DNA, 1476 bp, Artificial Sequence
  derived and/or modified sequence
atgagcctgctgatgatcagtgaaaatgtgaagctggcccgggagtatgccctgctgggcaactatgacagcgccatggtgtactaccagggcgtgctggaccagatgaacaagtacctgtacagcgtgaaggacacctacctgcagcagaagtggcagcaggtgtggcaggagatcaacgtggaggccaagcacgtgaaggacatcatgaagaccctggagagcttcaagctggacagcacccccctgaaggccgcccagcacgacctgcctgccagcgagggggaggtgtggagcatgcctgtgcctgtggagcggcggcccagccctggccccaggaagaggcagagcagccagtacagcgaccccaagagccacggcaaccggcccagcaccaccgtgcgggtgcacaggagcagcgcccagaatgtgcacaatgaccggggcaaggctgtgcgctgccgggagaagaaggagcagaacaagggccgggaggagaagaacaagagccctgctgctgtgacagagcctgagaccaacaagtttgacagcacaggctatgacaaggacctggtggaggccctggagcgggacatcatcagccagaaccccaacgtgcgctgggatgacattgctgacctggtggaggccaagaagctgctgaaggaggccgtggtgctgcccatgtggatgcctgagttcttcaagggcatcagaagaccctggaagggcgtgctgatggtgggccccccaggcaccgggaagaccctgctggccaaggctgtggccacagagtgcaagaccaccttcttcaacgtgagcagcagcaccctgaccagcaagtacagaggagagagcgagaagctggtgcggctgctgtttgagatggcccgcttctacagccctgccaccatcttcattgatgaaattgacagcatctgcagccggcggggcaccagcgaggagcacgaggccagcagaagagtgaaggccgagctgctggtgcagatggatggagtgggcggcaccagtgaaaatgatgaccccagcaagatggtgatggtgctggccgccaccaacttcccctgggacattgatgaggccctgcggcggcggctggagaagaggatctacatccccctgcccagcgccaagggccgggaggagctgctgcgcatcagcctgcgggagctggagctggctgatgatgtggacctggccagcattgctgagaacatggagggctacagcggggctgacatcaccaacgtgtgcagagatgccagcctgatggccatgagaagaagaattgagggcctgaccccagaggagatccggaacctgagcaaggaggagatgcacatgcccaccaccatggaggactttgagatggccctgaagaaggtgtccaagtctgtgtctgctgctgacatcgagagatatgagaagtggatctttgaatttggcagctgctag

SEQ ID NO: 329759 - DNA, 843 bp, Artificial Sequence
  derived and/or modified sequence
atgagcctgctgatgatcagtgaaaatgtgaagctggcccgggagtatgccctgctgggcaactatgacagcgccatggtgtactaccagggcgtgctggaccagatgaacaagtacctgtacagcgtgaaggacacctacctgcagcagaagtggcagcaggtgtggcaggagatcaacgtggaggccaagcacgtgaaggacatcatgaagaccctggagagcttcaagctggacagcacccccctgaaggccgcccagcacgacctgcctgccagcgagggggaggtgtggagcatgcctgtgcctgtggagcggcggcccagccctggccccaggaagaggcagagcagccagtacagcgaccccaagagccacggcaaccggcccagcaccaccgtgcgggtgcacaggagcagcgcccagaatgtgcacaatgaccggggcaaggctgtgcgctgccgggagaagaaggagcagaacaagggccgggaggagaagaacaagagccctgctgctgtgacagagcctgagaccaacaagtttgacagcacaggctatgacaaggacctggtggaggccctggagcgggacatcatcagccagaaccccaacgtgcgctgggatgacattgctgacctggtggaggccaagaagctgctgaaggaggccgtggtgctgcccatgtggatgcctgagttcttcaagggcatcagaagaccctggaagggcgtgctgatggtgggccccccaggcaccgggaagaccctgctggccaaggctgtggccacagagtgcaagaccaccttcttcaacgtgagcagcagcaccctgaccagctag

SEQ ID NO: 329760 - DNA, 1476 bp, Artificial Sequence
  derived and/or modified sequence
atgagcctgctgatgatcagcgagaacgtgaagctggcccgggagtatgccctgcttggaaattatgactccgctatggtgtattatcagggtgtcttggaccagatgaataagtacctgtatagtgtcaaggacacatacctgcagcagaagtggcaacaggtgtggcaagagataaacgttgaagctaagcatgtcaaggacatcatgaagacactagaatctttcaaattagactctactcctctcaaggctgcacagcatgatttgcccgcttccgagggggaggtgtggtccatgccagtccccgtagagagaagaccatctccgggccctcgcaagcggcagagttcacaatacagcgatcctaaatctcacggcaacagaccttctactacagtgcgggtgcacagatcatcagcccaaaacgttcataatgacagaggcaaagctgtgcggtgtagagaaaagaaagagcaaaataagggtagggaggagaagaataagtctcctgcagcagtgaccgaacctgagaccaataagttcgacagtactgggtacgataaggacctggttgaagcactggaacgcgacatcatatcccaaaatcccaatgtgaggtgggatgatatagccgatttggtagaggcaaagaaattgttgaaggaagccgttgttcttccaatgtggatgcctgagttcttcaagggtatccgcagaccatggaagggcgtgctgatggtggggcccccaggaactgggaagacactgctggctaaggccgtggcaaccgaatgcaagacgacattcttcaatgtctcaagcagtacactgacctcgaagtaccggggcgaatccgagaagctggtgcgccttctattcgagatggcccggttttacagcccggctactatcttcatcgacgagatagattcaatctgcagcaggcgaggaacctctgaggaacacgaagcctcgcgtcgggtgaaggccgagttgctggtgcaaatggatggggtgggcggaaccagtgaaaacgatgacccgtccaagatggtgatggttctggcagcgactaactttccatgggacatagacgaggctcttcgcagacgactggaaaaacgtatttacattcccttgccgagcgctaaaggccgtgaggaactgttgcgcataagcctgcgggaactggagcttgccgacgatgtcgacctggctagcatcgcagagaatatggagggttatagcggggccgatatcactaacgtgtgccgcgatgcttccttgatggccatgagaagacggatcgagggattaacccccgaagaaatccgcaacctcagcaaggaggagatgcatatgcccacaacaatggaagattttgagatggctctgaagaaggtgagcaagagcgtgagtgctgccgatattgagaggtacgagaagtggatctttgagttcggtagctgctag

SEQ ID NO: 329761 - DNA, 1476 bp, Artificial Sequence
  derived and/or modified sequence
atgagcctgctgatgatcagcgagaacgtgaagctggcccgggagtacgcactcctaggaaactatgacagtgcaatggtgtactaccagggcgtccttgatcagatgaacaagtacctgtatagcgtgaaagatacttacttgcagcagaaatggcaacaagtgtggcaggagatcaatgtggaagccaagcacgttaaagatattatgaagactctggaaagcttcaaactggattccactcctctgaaggccgcccaacatgatctgcctgcgtccgaaggcgaagtttggtcaatgcccgtgccagtggaaaggcggccttccccggggccacgtaaaaggcagtcttcacagtactcagatccaaagtctcacggtaaccgtccatccacaactgtgcgggtgcaccgttcaagcgcccagaacgtccataatgatcggggaaaggccgttcgctgtcgcgaaaagaaggagcagaacaagggaagggaggagaaaaacaaatccccggctgccgtgactgagcctgaaacgaacaagtttgatagcactggctacgataaggacctggtcgaagctctcgaacgagacataatttctcaaaaccccaacgttcggtgggacgatattgctgatctcgtcgaagccaaaaagctcctgaaagaagccgtcgtgctccccatgtggatgccagaattttttaaggggatccgccgcccctggaagggagtgctgatggtgggaccccctgggacgggcaaaacgctcttggctaaagcagtggcaactgagtgcaaaaccacatttttcaatgtatcctccagtactctaacctccaagtacaggggcgagtctgagaagctggttcggctcttgttcgaaatggccagattttacagccccgccactattttcattgacgaaatagatagcatctgtagccgcaggggaaccagcgaagaacatgaggcgagccggagagtgaaggccgaactgctggtgcaaatggacggcgttggcggcacatccgagaacgatgaccccagcaagatggtaatggtccttgcggcaaccaatttcccctgggacatagacgaggccctccgccggcgactagagaagaggatctacatccctctcccatcagccaaggggcgcgaggagcttttgaggatcagtcttcgtgagctggagttagccgatgacgtggatcttgcttccattgccgagaacatggaaggatactctggtgccgacatcacgaacgtgtgccgcgacgcctctctcatggctatgcgccgtaggatcgagggcctgacaccagaggagattcgcaacctgagcaaggaggaaatgcacatgcctacgaccatggaggatttcgaaatggcactaaagaaagtgagtaaatcagtcagcgctgcagacatcgaacgatacgagaagtggatattcgagttcggttcctgttag

SEQ ID NO: 329762 - DNA, 843 bp, Artificial Sequence
  derived and/or modified sequence
atgagcctgctgatgatcagcgagaacgtgaagctggcccgggagtatgctcttctaggaaattacgattctgctatggtctactatcagggtgtgttggaccaaatgaataagtatttgtatagtgttaaggatacctatctccagcagaaatggcagcaggtgtggcaggaaattaacgtggaagccaagcacgttaaggacatcatgaagaccctcgagtcctttaaactcgactctacgccactgaaggcggcacagcacgacctcccagctagcgaaggcgaggtttggtctatgcccgtgcccgtagaacgaagaccctctcctgggccaaggaaaaggcagagcagccagtacagtgacccaaaaagccacggaaacaggccttctaccacagtgcgcgttcatcgcagcagtgctcaaaacgttcacaatgatcgcggcaaggccgtccggtgcagggagaaaaaggaacagaacaaaggccgcgaagagaagaataagagccctgcggcagtcaccgagccagaaacaaataagtttgactcgaccggatatgacaaagatcttgtggaagccctagagcgggatatcattagtcagaatcctaatgttaggtgggacgacatagctgacctggttgaagctaagaagttattaaaagaggcagtggtcctgccaatgtggatgcccgagttcttcaaaggtatccgccgaccctggaaaggtgtactgatggtagggcctccgggaaccgggaagacactgctggcgaaggccgttgctaccgagtgtaagacaacatttttcaatgtgtcatctagcaccctaacttcttag

SEQ ID NO: 329763 - DNA, 1476 bp, Artificial Sequence
  derived and/or modified sequence
atgtcactcctcatgatcagtgagaacgtgaagttagcccgtgagtatgcactgctcggcaactacgattcagccatggtatattatcaaggtgtcctggaccagatgaataagtacctgtattcagtcaaggatacatacctgcagcagaaatggcaacaggtctggcaggagataaacgtggaggccaagcacgtaaaagacattatgaaaactcttgagagctttaagcttgactctacacctctgaaggcagcccagcacgatctgcccgcttccgagggggaggtgtggtctatgccggttcccgtcgagagacgccctagccctgggccaagaaagcggcagtcatcacagtattccgatcctaagtcccacggcaacagaccatctacaaccgtgagagttcataggtcctccgcccagaatgtccacaacgatcggggtaaggcggtacgatgcagagaaaagaaggagcagaacaaaggccgtgaagaaaagaacaagtcgcctgcggctgttactgagccagagactaataagttcgattctactgggtacgataaggatctggtggaagccctagaacgcgacatcattagtcagaacccgaacgtgcggtgggacgacatcgctgatctggtggaggccaagaagctcctgaaggaggccgtagtgctgcctatgtggatgcccgagttctttaaaggaataaggcggccttggaagggagtgctcatggtcgggcctccgggaacaggtaagacactgctggcgaaagcagtggccactgagtgtaagacaacatttttcaacgtgtcgagcagcacactcacatccaaataccgcggtgagtctgaaaagcttgtgcgcctgctgtttgagatggctcggttctactcccctgcaacaatatttattgatgagatcgacagcatctgctcccgaaggggcacctccgaggagcatgaagcttctcgcagagtcaaggccgagctgcttgtgcaaatggacggtgtgggaggcacttctgagaatgacgatccttcaaaaatggtgatggtgctggcagcaacaaacttcccatgggacattgacgaggcgttgcggaggaggctcgagaaaaggatttacatcccccttcccagcgctaaggggagagaggaactcctcaggatttcactcagagaactggagctggctgacgacgtggacctggcttccattgctgagaacatggaaggctacagtggcgctgatattaccaacgtgtgtcgggacgcctcgctcatggctatgagaaggaggattgagggcctcacacccgaagagatccggaacttatcaaaagaggaaatgcatatgcccaccacaatggaggattttgaaatggcactgaaaaaggtgagtaaatccgtctcagcggctgacattgagcggtacgaaaaatggatctttgaattcggcagctgctag

SEQ ID NO: 329764 - DNA, 1476 bp, Artificial Sequence
  derived and/or modified sequence
atgagtctgttgatgatctcagaaaacgtgaagctggcgagggagtatgccttattgggaaactacgatagcgctatggtgtattatcagggtgttctggatcagatgaacaagtacctgtactcagtaaaagacacttacctgcagcagaagtggcagcaggtttggcaggagattaatgtagaagctaagcacgtaaaggacataatgaagaccctggagtcattcaaattggattccacacctcttaaggccgcacagcacgacttacccgcaagcgagggagaagtttggtccatgccagttccggtcgagcgaagaccttctcccggaccacgcaaaaggcagtcatcccagtattcagatcccaagagtcatggaaatagacctagtacaacagttagggtgcacaggtcatccgctcaaaacgtacataacgatcgcggtaaagcagtgcgctgcagagagaagaaagaacagaacaagggccgtgaggagaagaacaagtcgcccgcagccgtgaccgagcccgaaacaaataaatttgacagcactggttacgacaaagacttagttgaggccctcgaaagagacattatcagccagaaccctaacgtgcgctgggacgatatcgctgacctggtagaggcaaaaaaactgttaaaagaagccgtggtgcttcctatgtggatgccagagtttttcaaaggcatacggaggccatggaagggggtgttgatggtgggcccaccaggcacagggaagacattactcgctaaggcagtggctacagagtgtaagaccacattcttcaatgtgtctagcagtacactgacttctaaatacagaggtgaaagcgagaaattagtgcgattacttttcgaaatggcgcgattttacagccctgctaccatatttattgatgagatcgacagcatctgcagccgcagaggcaccagcgaagaacacgaggccagccgacgcgtgaaagccgagctgctcgtgcagatggacggagtcggaggaaccagcgagaacgacgaccccagtaagatggtgatggtacttgccgcaaccaatttcccctgggacatcgacgaggctctgagacgaagactcgaaaaacgcatctatatcccactgccaagcgccaaaggacgggaggagctgttgaggatcagtcttcgggagttggaattggctgacgacgtggatctcgcaagtatcgccgaaaatatggaaggctactccggcgctgacatcactaacgtctgccgcgatgcttcactaatggcaatgcggcgtcgcatcgaggggctcacacccgaggagatccgcaatctgagcaaagaggagatgcacatgccaaccaccatggaagatttcgagatggctcttaagaaagtcagcaaaagcgtcagcgcggctgatatcgaaaggtacgaaaagtggatttttgaatttggctcttgttag

SEQ ID NO: 329765 - DNA, 843 bp, Artificial Sequence
  derived and/or modified sequence
atgagtctattaatgattagcgagaacgttaaactcgctcgcgagtacgctctcttgggcaactacgactctgcaatggtctattaccaaggagttcttgaccagatgaacaagtacctctactcagtgaaagacacatatctgcagcagaagtggcagcaggtgtggcaggagatcaacgttgaggcgaagcacgttaaagatataatgaaaacactggaatcatttaagctggatagtacgcctctcaaggcggctcagcatgatctacctgctagcgaaggtgaggtatggagcatgcctgtgccagtggagaggcgtccgagccccggacctaggaaacgccagtcatcgcagtatagcgacccaaaatctcatggtaatagaccatctaccacggtacgagtccaccgcagctctgctcaaaacgttcataatgatagaggaaaagctgtgagatgtcgcgaaaagaaggaacagaacaaaggaagggaggaaaagaataagtcccccgctgctgtcaccgaacccgagaccaacaagttcgattctacagggtatgacaaagacctcgtcgaagctctcgagagggacatcatctcacagaatcctaacgtgcgatgggacgacatagcagatcttgtcgaagcgaagaaactactcaaagaagctgtcgtactcccgatgtggatgcccgaattctttaagggtataaggaggccatggaaaggcgtactaatggtcggccctccaggaacaggcaagacattgcttgctaaggcggtggccaccgaatgcaaaaccactttttttaacgtatcgtcatctaccctaacctcatag

SEQ ID NO: 329766 - DNA, 1476 bp, Artificial Sequence
  derived and/or modified sequence
atgagcctgctgatgatcagcgagaacgtgaagctggccagagagtacgccctgctgggcaactacgacagcgccatggtgtactaccagggcgtgctggaccagatgaacaagtacctgtacagcgtgaaggacacctacctgcagcagaagtggcagcaggtgtggcaggagatcaacgtggaggccaagcacgtgaaggacatcatgaagaccctggagagcttcaagctggacagcacccccctgaaggccgcccagcacgacctgcccgccagcgagggcgaggtgtggagcatgcccgtgcccgtggagagaagacccagccccggccccagaaagagacagagcagccagtacagcgaccccaagagccacggcaacagacccagcaccaccgtgagagtgcacagaagcagcgcccagaacgtgcacaacgacagaggcaaggccgtgagatgcagagagaagaaggagcagaacaagggcagagaggagaagaacaagagccccgccgccgtgaccgagcccgagaccaacaagttcgacagcaccggctacgacaaggacctggtggaggccctggagagagacatcatcagccagaaccccaacgtgagatgggacgacatcgccgacctggtggaggccaagaagctgctgaaggaggccgtggtgctgcccatgtggatgcccgagttcttcaagggcatcagaagaccctggaagggcgtgctgatggtgggcccccccggcaccggcaagaccctgctggccaaggccgtggccaccgagtgcaagaccaccttcttcaacgtgagcagcagcaccctgaccagcaagtacagaggcgagagcgagaagctggtgagactgctgttcgagatggccagattctacagccccgccaccatcttcatcgacgagatcgacagcatctgcagcagaagaggcaccagcgaggagcacgaggccagcagaagagtgaaggccgagctgctggtgcagatggacggcgtgggcggcaccagcgagaacgacgaccccagcaagatggtgatggtgctggccgccaccaacttcccctgggacatcgacgaggccctgagaagaagactggagaagagaatctacatccccctgcccagcgccaagggcagagaggagctgctgagaatcagcctgagagagctggagctggccgacgacgtggacctggccagcatcgccgagaacatggagggctacagcggcgccgacatcaccaacgtgtgcagagacgccagcctgatggccatgagaagaagaatcgagggcctgacccccgaggagatcagaaacctgagcaaggaggagatgcacatgcccaccaccatggaggacttcgagatggccctgaagaaggtgagcaagagcgtgagcgccgccgacatcgagagatacgagaagtggatcttcgagttcggcagctgctag

SEQ ID NO: 329767 - DNA, 843 bp, Artificial Sequence
  derived and/or modified sequence
atgagcctgctgatgatcagcgagaacgtgaagctggccagagagtacgccctgctgggcaactacgacagcgccatggtgtactaccagggcgtgctggaccagatgaacaagtacctgtacagcgtgaaggacacctacctgcagcagaagtggcagcaggtgtggcaggagatcaacgtggaggccaagcacgtgaaggacatcatgaagaccctggagagcttcaagctggacagcacccccctgaaggccgcccagcacgacctgcccgccagcgagggcgaggtgtggagcatgcccgtgcccgtggagagaagacccagccccggccccagaaagagacagagcagccagtacagcgaccccaagagccacggcaacagacccagcaccaccgtgagagtgcacagaagcagcgcccagaacgtgcacaacgacagaggcaaggccgtgagatgcagagagaagaaggagcagaacaagggcagagaggagaagaacaagagccccgccgccgtgaccgagcccgagaccaacaagttcgacagcaccggctacgacaaggacctggtggaggccctggagagagacatcatcagccagaaccccaacgtgagatgggacgacatcgccgacctggtggaggccaagaagctgctgaaggaggccgtggtgctgcccatgtggatgcccgagttcttcaagggcatcagaagaccctggaagggcgtgctgatggtgggcccccccggcaccggcaagaccctgctggccaaggccgtggccaccgagtgcaagaccaccttcttcaacgtgagcagcagcaccctgaccagctag

SEQ ID NO: 329768 - protein, 360 aa, Artificial Sequence
  derived and/or modified sequence
MNYTESSPLRESTAIGFTPELESIIPVPSNKTTCENWREIHHLVFHVANICFAVGLVIPTTLHLHMIFLRGMLTLGCTLYIVWATLYRCALDIMIWNSVFLGVNILHLSYLLYKKRPVKIEKELSGMYRRLFEPLRVPPDLFRRLTGQFCMIQTLKKGQTYAAEDKTSVDDRLSILLKGKMKVSYRGHFLHNIYPCAFIDSPEFRSTQMHKGEKFQVTIIADDNCRFLCWSRERLTYFLESEPFLYEIFRYLIGKDITNKLYSLNDPTLNDKKAKKLEHQLSLCTQISMLEMRNSIASSSDSDDGLHQFLRGTSSMSSLHVSSPHQRASAKMKPIEEGAEDDDDVFEPASPNTLKVHQLP

SEQ ID NO: 329769 - DNA, 153 bp, Artificial Sequence
  derived and/or modified sequence
atggacatattattagacctgggttggcatttttccaattgcgacgaggataccttttatagtccagttcagaatactgaaggagacctgctcttttttgatcacaacctgaaaacagaccgtggtcatgtggaacgcagcgtgatggactag

SEQ ID NO: 329770 - DNA, 1083 bp, Artificial Sequence
  derived and/or modified sequence
atgaattacactgagtcaagccccctaagagagtcgacagccattggtttcacaccggagctcgagtcgattattcccgtgccctctaataagaccacatgcgagaattggcgggaaatccaccacttggtttttcatgtagcaaatatctgcttcgcagttggcttagtgattcctaccaccctgcacctgcatatgatttttctcagagggatgctgaccctggggtgtaccctctacatcgtctgggctacattgtaccgttgcgcactcgatattatgatctggaacagtgtgtttctcggagtcaatatcttacacctgtcctatctgctgtacaaaaaacggcctgtgaaaatagaaaaagaactgtccggaatgtatcgtcgactgttcgagcctttgagagtccctcctgatttgtttcgcaggcttactggccagttctgcatgatccagaccttaaaaaagggccagacttacgctgcggaggataaaaccagcgtcgacgaccggttgtcgattcttttaaaagggaagatgaaggtgagttatcgcggccacttcctccataacatttatccctgtgcattcattgacagtcccgagttccgatccacgcagatgcataaaggggagaaatttcaagtcactataatcgctgacgacaattgtaggtttctatgttggtccagagaacgtctcacttattttctcgaatcagaaccattcctgtatgagatctttagatacctcataggaaaggatatcacaaataaattatattctcttaacgatccaacactcaatgacaagaaggcgaagaaactcgaacatcagcttagtctgtgcacccagatctccatgcttgaaatgagaaactcaatcgcttcctcttccgatagtgacgacggcttgcatcagttcctaagaggcacctcaagtatgtcatcccttcacgtgagttccccccaccagcgagctagcgccaagatgaaacccattgaggagggggccgaggatgatgacgacgtcttcgagccagcctctccaaataccctcaaagtacatcagctgccgtag

SEQ ID NO: 329771 - DNA, 1083 bp, Artificial Sequence
  derived and/or modified sequence
atgaactacaccgagtcctctccacttcgggaaagcactgctattggctttaccccggagcttgagtccatcattcccgtgcctagtaacaaaactacttgcgagaactggcgggaaattcaccatcttgtgttccacgtggccaatatttgcttcgcagtaggactggtcatccctacaacccttcatctgcacatgatcttcctgcgcgggatgctgaccttgggctgtaccctatacatcgtgtgggccacgttgtaccggtgcgctttggatattatgatctggaactcggtgtttctgggagtcaacatccttcacctttcctacctgctctataaaaaaaggccggtcaagatcgaaaaggagctgtccgggatgtacaggagactttttgaacctctgagggtccccccagacttatttagacgtcttaccgggcagttctgcatgattcagacactgaagaaaggtcagacctatgcggcagaggacaagacttccgtggatgacaggctgagtatcctgctgaagggcaaaatgaaggtctcttacagaggtcacttccttcacaatatctacccttgcgcattcatcgattcccctgagtttagatctacccagatgcacaagggcgagaaattccaggttactattatagctgacgataactgcaggttcctctgctggtctagagagcggcttacgtatttcctcgagtcagagccatttttgtacgagatttttaggtacttgattggcaaggacattacaaataaactctattccctgaacgatccgacgctgaacgacaagaaagcgaaaaagctggagcaccagctgtctctgtgcacgcaaatctcaatgttggagatgcgaaattccatagctagttcctcagactccgatgacggcttgcatcaatttctcaggggaaccagcagtatgagctccttgcacgtctcctctccccatcagcgagcctccgcaaagatgaaacccatcgaagagggggccgaggatgatgacgatgtcttcgagcccgctagccccaacacactgaaggtgcaccagctcccttag

SEQ ID NO: 329772 - DNA, 1083 bp, Artificial Sequence
  derived and/or modified sequence
atgaattacaccgagtcatcccccctacgggagtctactgccattggctttacccctgagttggagtcgatcatccccgtaccttccaacaagactacttgtgagaactggagggagatccaccacctcgttttccacgtggctaatatctgctttgccgtcggtctagtaatcccgaccacgctacacctacatatgatattcctgcgaggcatgcttacacttggatgtacgctgtatattgtgtgggctactctgtataggtgcgcattagacatcatgatttggaatagcgtattcctgggagtgaacattctgcacctgagctatctcttatataagaaaaggcctgttaaaatcgagaaggagttgtctgggatgtaccggcgcctatttgaacccctgcgcgtgccccctgacctgttcagaaggctaacaggacagttttgtatgattcagactttaaagaaaggacagacctatgccgctgaagacaaaacctccgtggacgatcgactctccatcctgctcaaagggaagatgaaggtctcctatcgagggcacttcttacataacatctatccatgtgcattcattgatagcccggagtttagatcaacccagatgcacaagggcgagaaatttcaggtgaccataattgcagacgataattgtaggttcctgtgttggtcacgagagaggctgacgtacttcctggagagcgagccctttttgtacgaaattttccgatatttgatcgggaaagacatcaccaataaactgtattctctgaatgatccaacgctaaatgacaaaaaggccaagaaactggagcaccagctgtcactgtgcacccagatctcaatgctggagatgaggaactcaattgcaagctctagcgattcagacgacggcctgcaccagtttcttcggggcacctctagcatgtcttctcttcacgtgtcttcaccccaccaaagagcgtctgcaaaaatgaagccaatcgaggaaggggcagaggatgacgatgacgtgtttgaaccagcctcccccaatacactcaaagttcaccaactgccatag

SEQ ID NO: 329773 - DNA, 1083 bp, Artificial Sequence
  derived and/or modified sequence
atgaactacacagagagcagccccctgcgggagagcacagccatcggcttcaccccagagctggagagcatcatccctgtgcccagcaacaagaccacctgtgagaactggagggagatccaccacctggtgttccacgtggccaacatctgctttgctgtgggcctggtgatccccaccaccctgcacctgcacatgatcttcctgcggggcatgctgaccctgggctgcaccctgtacatcgtgtgggccaccctgtaccgctgtgccctggacatcatgatctggaacagcgtcttcctgggcgtgaacatcctgcacctgagctacctgctgtacaagaagaggcctgtgaagattgagaaggagctgagcggcatgtacagaagactctttgagcccctgcgggtgcccccagacctcttccggcggctgaccggccagttctgcatgatccagaccctgaagaagggccagacctacgccgctgaggacaagacctctgtggatgaccggctgagcatcctgctgaagggcaagatgaaggtgtcctaccggggccacttcctgcacaacatctacccctgtgccttcatcgacagccctgagttccgcagcacccagatgcacaagggggagaagttccaggtgaccatcatcgcagatgacaactgccgcttcctgtgctggagccgggagcggctgacctacttcctggagagcgagcccttcctgtatgagatcttccgctacctgattggcaaggacatcaccaacaagctgtacagcctgaatgaccccaccctgaatgacaagaaggccaagaagctggagcaccagctgagcctgtgcacccagatctccatgctggagatgagaaattccatcgccagcagcagtgacagtgatgatggcctgcaccagttcctgcggggcaccagctccatgagcagcctgcacgtgagcagcccccaccagagggccagcgccaagatgaagcccatcgaggagggcgcagaagatgatgatgatgtgtttgagcccgccagccccaacaccctgaaggtgcaccagctgccctag

SEQ ID NO: 329774 - DNA, 1083 bp, Artificial Sequence
  derived and/or modified sequence
atgaactacaccgagagcagccccctgcgggagagcaccgccatcgggtttactcctgaacttgaaagtattatccccgtgccatcaaataagacaacctgtgagaattggcgagaaattcaccatcttgtattccatgtggcgaatatttgcttcgctgtcggtctggtgatcccaactactctgcacctgcacatgatatttctgaggggcatgctgactctgggctgcactctgtacatcgtgtgggctactctctatcgttgtgcgctggatatcatgatctggaatagtgtgtttctgggcgtcaacattctgcatctgtcttatctactctataagaagcgacccgttaaaatagagaaggagctgtcaggcatgtatcggcgactgtttgagcctctgcgagtcccaccagatctgttccgaaggctgactggccagttttgcatgatccagactctgaagaaggggcagacatacgcggccgaggacaagacatccgtggatgatcgcctatctatcctcctgaagggcaaaatgaaggtgtcctatcgtggtcatttcctccacaacatttatccttgtgccttcattgatagcccagagttccgctctacccagatgcacaaaggcgagaaattccaagtaaccattatagcagatgataactgcagattcctctgttggagccgggaaaggttgacctacttccttgagagcgaacctttcctgtacgaaattttccggtacttgatcggaaaggacataacaaacaaactctatagtctcaatgacccaacccttaatgataagaaagccaagaaactggagcaccagctgtctttatgcacccagataagcatgctagaaatgaggaactccatcgccagttcttctgacagtgatgacggattgcaccagtttttacgggggacttcatcaatgtcatctctccacgtatcttccccccaccagagggcatccgcaaaaatgaaacctatagaggagggcgctgaggatgacgatgacgtgttcgaaccagcctctcccaataccctcaaggtccaccagctcccttag

SEQ ID NO: 329775 - DNA, 1083 bp, Artificial Sequence
  derived and/or modified sequence
atgaactacaccgagagcagccccctgcgggagagcaccgccatcggctttactcctgagttagaatccattatcccagtgcccagtaataagaccacctgcgagaattggcgtgagatccatcatctggtcttccacgtagcgaatatttgttttgctgtggggttggtcattcccaccaccttgcatttgcacatgatcttcctaagggggatgttgactcttgggtgcacactctatattgtctgggctaccctgtaccgctgcgccctggatattatgatctggaacagtgtcttcttaggagttaacatccttcacctgtcatacctgttgtataagaaaaggcctgtcaaaattgagaaggagctgtccggaatgtataggcgactcttcgagcctctccgcgtgcctcctgatttgtttcgacgcctgacggggcagttctgtatgattcaaactctaaagaagggacagacatacgctgcagaggataaaacgtccgtggacgacaggctatccatactgcttaaaggaaagatgaaagtgtcatatcgtggtcattttcttcacaatatctatccttgtgcatttattgactcccctgaattcaggtccacccagatgcacaaaggcgaaaagttccaggttaccattattgctgatgacaattgtcgattcctgtgctggtcccgagaacggctgacatatttcttggagtccgagccgtttctatacgaaatattccgctacctaatagggaaggacataacaaataaactctactccctgaatgacccgacccttaacgataagaaggctaagaagctagagcaccaactgagcctgtgcactcaaatttcaatgttggagatgaggaactctattgcctcatcgtccgacagcgacgatgggttacatcaattcctgagagggacatcatccatgtcatcactgcacgtgagttctccccatcagcgcgcaagtgccaaaatgaaacccattgaagaaggggcagaagatgacgatgatgtgttcgaacctgcatctccgaacactcttaaggtgcaccagttaccctag

SEQ ID NO: 329776 - DNA, 1083 bp, Artificial Sequence
  derived and/or modified sequence
atgaactacaccgagagcagccccctgcgggagagcaccgccatcggattcactccggagctggaatccatcatccctgtgcctagcaataagactacttgcgaaaactggagagaaatccatcacttggtgtttcacgtcgcaaacatttgcttcgccgttgggctcgtgataccaactacactgcacttacacatgatattcttgcgcgggatgctcacactgggttgtacgctttacatagtgtgggccaccctgtatcgatgtgcactggatattatgatctggaattccgtgttccttggtgtcaatatcctccacctttcctacctgttgtataagaagcggcccgtgaaaatcgagaaggaactgtcagggatgtatcgacggctctttgaacccttgcgggtacccccagatttgtttagacgcctaacaggacagttttgcatgatacagaccttaaaaaaagggcagacctatgccgctgaagacaaaacgagcgtcgacgatcggctgtcgatcctcctcaagggcaagatgaaggtctcttaccgggggcattttctccataacatttacccatgcgcctttatagattcccctgaattccggtccacacagatgcacaagggcgagaagtttcaggtgactataattgcagacgataactgccgcttcctttgctggagcagggaacgactgacctactttttagagagtgaacccttcctttacgaaatatttagatatctcattggaaaggacattaccaataagctgtattctcttaacgatccaacattgaatgataagaaagcaaaaaagctggagcaccagctctccctgtgcacacagattagcatgctggaaatgagaaattctatcgcatcctcatccgactcagatgatggactacaccaatttctcagaggaaccagctccatgtccagccttcacgtatccagcccacatcagcgggcaagtgctaagatgaagcctattgaggagggagcagaggacgacgatgatgtttttgaaccagcatccccaaatactctcaaagtccaccagctgccatag

SEQ ID NO: 329777 - DNA, 1083 bp, Artificial Sequence
  derived and/or modified sequence
atgaattacacagaaagctcacctcttagggagtcaactgcaatcggttttacaccggagctggagtctatcattccagtgcccagcaataaaactacctgcgagaattggcgggagattcatcaccttgtgtttcacgtcgccaacatctgcttcgcagtcggattggtgattccaactaccctgcatctgcacatgatatttctgagaggaatgttaacactgggatgcaccctgtatatcgtgtgggcaacactgtatcgctgcgccctcgatataatgatctggaacagcgtattccttggtgtaaatatactccacttgagctatctgctgtacaaaaaacgacctgttaaaattgaaaaggagctgagcggcatgtaccggagactgttcgagcccttgcgggtccctccagatctcttccgccgattgactggccagttttgcatgatccagacattgaaaaaaggtcagacctacgccgctgaagacaaaacgagtgttgacgacagattgtccatattactcaagggcaagatgaaagtcagttaccgtggtcactttctgcataacatttatccgtgtgcctttatcgatagtccagagttcaggtctactcagatgcataagggcgagaagtttcaggttacaattatcgcagacgacaattgccggttcctttgttggtcacgcgaacgcttgacctatttcctcgagagcgagccgtttctatacgagatttttcgttacctgataggtaaggacattaccaacaaactctactctctgaacgatcccactctgaatgacaagaaagcgaaaaagctggaacatcaactgtccctgtgcactcagatcagtatgctggaaatgaggaattcaatcgcctcttcttctgatagcgacgatggcttgcaccagtttctgagaggaacctcctcaatgtccagtcttcacgtttcaagcccccaccagcgagcatccgccaagatgaaacctattgaggagggagccgaggacgacgacgacgtgttcgagcctgcaagtccgaataccctcaaggtgcatcagctgccatag

SEQ ID NO: 329778 - DNA, 1083 bp, Artificial Sequence
  derived and/or modified sequence
atgaattacaccgaatcatctccccttcgggaatcaaccgctatcggcttcactccagagcttgagtcgatcatccccgtgccctcaaataaaaccacgtgtgaaaattggagggagattcatcacctggtgttccacgtcgctaacatctgttttgcagttggactcgtgattcctacaaccctccacctgcacatgatctttttgcggggaatgctaaccttgggatgcacactgtacatcgtttgggctactctctaccgctgtgctttagacataatgatatggaacagtgttttcttaggcgtgaacatcctgcatctgagctacctgctttacaagaaacgcccagtgaaaatcgagaaggagctgtcagggatgtatcggcgattattcgaaccgttgagggtgcctccagacttattccggagactgaccggtcaattttgtatgattcagactttgaagaagggacaaacttatgccgcagaggacaaaacaagtgtggacgaccgattgtccatcctactgaaaggcaagatgaaagtatcttacagagggcattttctgcacaatatctacccgtgtgcatttatcgacagtcccgagtttagatcgactcaaatgcacaagggggagaaattccaggttactattatcgccgatgacaactgtcggttcctctgctggtcaagagagagacttacgtactttctggaaagcgaacctttcctgtatgaaattttccgctatctgattggtaaggatattacaaataagctatattccttgaacgaccccacactgaatgacaagaaggctaagaagctcgaacaccagctgagcctgtgtactcaaatctctatgctggaaatgagaaattcaatagcgagtagcagtgacagtgatgacggcttgcaccagtttctgagggggacttcttcaatgagctccctccatgtctctagcccacaccagcgagcaagtgcaaaaatgaagcccattgaggagggcgctgaagatgatgatgatgtgtttgaacccgcatcacccaacactctgaaagtccaccagctaccctag

SEQ ID NO: 329779 - DNA, 1083 bp, Artificial Sequence
  derived and/or modified sequence
atgaactataccgagagttcaccgttgagagagtccaccgccatcgggttcactccagagttggagtctataattccggttcctagcaacaaaactacttgcgaaaactggagagagatccatcacctggtgttccacgtggcgaatatctgtttcgctgtcggactggtcatccccaccacactccatctgcatatgatatttctcagagggatgctcactctgggctgtacactgtatattgtgtgggccaccctgtatcgatgtgctctggatatcatgatctggaacagcgtgttcttaggggtaaacattctgcacctcagctatttgctatacaagaaaagaccagtgaagattgaaaaagaactgagtggcatgtacagacgacttttcgagcctctccgggtgccccctgatctcttccgcagactgacaggccaattctgcatgatccagaccctcaagaagggccagacatacgccgcagaggataagacctctgtggatgatcgcctgtcaatcttgcttaaagggaagatgaaggtgtcctacaggggccatttcctacacaacatctatccatgcgcgtttatagatagccctgagttccgctccactcagatgcacaagggagagaaatttcaagtcaccatcatagccgacgataactgcagattcttgtgctggtcccgtgagcgcctcacatactttctcgaaagtgagccctttctatatgagatatttcggtacctgatcggcaaggacattaccaataagctgtattctcttaacgatccgactctgaacgacaaaaaggctaaaaagctcgagcaccagctatccctttgcacacagatcagcatgctggagatgagaaattcgatcgccagctcctcggacagcgatgatggcctgcatcaatttcttagaggcacctctagcatgtcatccctccacgtgagttcgccccaccagcgggctagtgccaagatgaagcccatcgaggagggggctgaggatgatgatgacgtctttgaaccagccagtccgaacacactcaaggtgcaccaactcccatag

SEQ ID NO: 329780 - DNA, 5567 bp, Artificial Sequence
  derived and/or modified sequence
gtcgcgatgcctattttagtcaaagcggctgcgggcttggggacccggcccgggcagcggagcttccggacccgccgacccgccgaggagcgcgcgtcgggctcccgtcgagcagctgagcccgtgtgccccgcgtcccgcgccccgaagctgccgctccgaactttggtcggcgctgcccaggctccccgccagggaccagccgggaattttcaaaatgaattatacagagtccagcccattgagagaatcaactgccataggttttacacctgagttagaaagtatcatacctgtgccttccaataagaccacttgtgaaaactggagagagatacatcatctggtttttcatgtagcaaatatttgttttgcagttgggttggttattccaactactcttcaccttcatatgatatttcttaggggaatgttaactctaggatgtaccctttatatcgtctgggccactctctaccgatgtgccttggatataatgatctggaactctgtgttcttgggtgtcaacattttgcatctgtcgtatcttttatacaagaagagaccggtaaagattgaaaaggaactcagtggcatgtaccggcgattgtttgaaccactccgtgtgcctccagatttgttcagaagactaactggacagttttgcatgatccaaaccttgaaaaagggccaaacttatgctgcagaggataaaacctcagttgatgaccgtctgagtattctcttgaagggaaaaatgaaggtctcctatcgaggacattttctgcataacatttacccctgtgcctttatagattctcctgaatttagatcaactcagatgcacaaaggtgaaaaattccaggtcaccattattgcagatgataactgcagatttttatgctggtcaagagaaagattaacatactttctggaatcagaacctttcttgtatgaaatctttaggtatcttattggaaaagacatcacaaataagctctactcattgaatgatcccaccttaaatgataaaaaagccaaaaagctggaacatcagctcagcctctgcacacagatctccatgttggaaatgaggaacagtatagccagctccagtgacagtgacgacggcttgcaccagtttcttcggggtacctccagcatgtcctctcttcatgtgtcatccccacaccagcgagcctctgccaagatgaaaccgatagaagaaggagcagaagatgatgatgacgtttttgaaccggcatctccaaatacattgaaagtccatcagctgccttgatcagagagagaattcaggttaccaagacggaaggtgtcttgaagagatcctgaaaaataccagcactttttcatggcttttaggttattctgctttagtgcatccagactggtggagtcggagggaggaagtgaggaagggtcaaggatggaagagttctttcacttaccctttttattagtcagcttttaaagtaattgttttactgagccttctgactatgccttgttctcttttgagatatatattttcacagtcttttctagatatattattgttttaacttaacaaatcttagcaatctctcaatgccttttcacttatttttttccaagttatgattctttttcctcacagtcttttttgttccatagcaatgaggttgtccatttgataattttaacaaacaatgtaagtttaaaattgaggctaaggtaacatgaaaaagcagggaatctcaaactttattccatatatacacacacacacacacacacacacacacacatacatacatacatatatatatatatatacatatatatacatacacacatacatataattttttttttttttgagatggagtttcactctgtcgcccaggctggagtgtagtggcacattctcagctcactgcaaactccacctcctggattcacgccactctcctgcctcagcctcccgagtagctgggactacaggcacctgccaccgcgcccagctaatttttttgtatttttagtagagatggggtttcactgtgttagccaggatggtctcgatctcctgacctcgtgatccgcccaccttggcctcccagagtgctgggattacaggcgtgagccaccgcgcccggcctattccatatttttttaatgggacattttagagaaaggtgtgatttgactggttttatttttctcccaggccagaagtattactccactagatcaccttacttaattgggcactgtgtggataacttgataatgaacaaaactctcagattttactcacattacccttgtattatgccatttataaactgctctgaaacctgaagctggaaagataacagatgggtttctgagcacggggttaacctccagctaaactcaacttccttgggatttggagtcaccatgttgtgcacactctggtgtgggaaacactttatgtagggtgggaggacaggggagttaaatggctgggcaggtgccacaggatgaggccactgaaagatctgcttcattctttgatctgtattctgaagttccagattgttcatctagaggcagagacatctcttttaaaaaagtgccagatgccccagtgccagagctgcgaacgtgaacacagtggaaggcagagggtttactacaggccaggccatggacaccccacccaggtactgcagtgagggccttgattccagagctctttttcctactgaaatcatggtttagtaaacagtggcatttggctggtgggaaatgcgtaactggtcagtgtgtctggccagcgtggctgtggcacttggccaggacgctccgttgaatgaagctcattgattggccatgctggtcatgtctattttgcttcatccactagaaccaactttgagtcagtctcctgttacgttaaatggctaagaaaagttccaaatgaagttgttctcaggtgaactgagccaaaagaagcaactcttaccatgaggtgatttctgttagaggagacatataaataagctcatctagggtcacctcattttcctaaatatgtttttaaagcaattattgtagtaatttcatttgagttaaatttacatgctcggtcactcattgagaaaatttacacagactctgaatccagttcctgtcatcttcagatgttggtttattgacatcacagtaaaaaggctactgtcgactggacacagtggctcacacatgtaatcacagcactttggggggccaaggtgggtggattgcttaagcccaggagttcaagaccagcctgggcaacatggctaaaccccatctctacaaaaaaaattagctgggtgtggtggtacatacctgtagtcccagctactcagaaggctgaggtgggaggttcacttgaacctgggaggttgaggttgcagtgagcacagatcacaccactgcactccagcctgggcaacagagtgagaccctatttcaaaaaaaggctgctttcactgtactgctgcagcagtctcttcaggtagctaaattaggagcttgttttggagaaatgaagcaaaggtgaatgacagcctaggcttgaaattataaagctctctcaggttgaactctctcgtgcgctctcgctctcactttcgccctgtacctgagagcacaggtgtaactgtgatgtcatagtgccgagactactttcctttaaccattggggttaagttgggcagcccatttagtttacacgcgcataagactaatttacaaaatcactctatacagtcattagatgtaacatccttccctgagtagaaagtaatgcatgtgtttggagattattttctgtaatgctgggaacaaacctgttttaaaagcacactgctaaaagtaggtgatataagaccatttgctgtttttattaaagtatgtgtgtgtatcagtgtctcaatgtgaagattgtaacctcaagattaggaatcttaaaagagccacttagcctgaatgggaaacgtgagactatttttaaacacacacctctaaggaagaagcctcccatatagacttgatctcaaagaagcagataagaagacagaaaagtgttttaagtgtaagatctcctatggagtactttaaattcatttatacaaatgaataagtgtatctttgtataatgcataaatacatagataaaaacatgtttgctgccaaagttcccaataagatgcttcctgtgttttttggcctttacttagctgaatgatcaaagttcagaaaatggtctgcaaaagttactccatatacaaccccaaatctactactttaaatgtaacatcaactcagttgtatgaatctggagtgtaatatttatattagaatgtatatgtcatttaaaatattttgaaagccctcataaatatttatatttactaaactaatagcatagacactatataaatccgcagtgatgcttatatatcttaaattagtaataatgggtgctatataattattttcagttactatccctgacactctggaatcttctccatttctccctatcactcaatttcattttaatcattggacacctttgcgttttgctgctaacagtgtgtgtatgtcaccctctttatatctggttttcccacttgtctgaagctctcctgatcttagaacctggagctgcagattcctccatgtcagctcccatcacggccccaaagacagagtcacttggttgctgagtcacttggttgctggaaaaatctttggggaaagctggtataagctacacactgacctgtccccagtgtttccaggtaatgacttggcactccagagaaagtttcatgctgttgcgtgtggtggctccaagccaagcacctggcatgcaggtcagcccttcccagcgggcgtggcgtcgtcctcttcacagatgccacgttgcagccccaaggcctcaccattttgcgttttttagaaacccattttcttggtcatttataaagctgctttatagatatctttgatcctggcatgccttggtttcctctcccttccctctttccaatcctggtttcctaacctcctcttgtagtaattctcaactcaactcaaagtcccaagaatttggaatggtaggatgctgtgcggggagctcgaggctgaggcataatcactgcttcggttctgctcatcaggggacacgctcccttactcatggcagccatgtttgattgtcacagagccccccgaatactctgtctatagtgacacactgtaggtgtcataaattttaagaaacctgcttttaagtactatttataggtttttctgttatacttgcaacctagttttaaaatacatgaggattttatgaaagctttatacagacatttataggaaactcattctttgattttaggtgccatttaaattgataacacttactttataaaaagatgctttttgtctggatagagccttatagtttaaaatatcttcatatattgccatttgatcaaataaatttcttacttagaaaa

SEQ ID NO: 329781 - DNA, 1663 bp, Artificial Sequence
  derived and/or modified sequence
gcggccgccgctcaggtcaggcagccccagcgtccccgggccctcggccccaccgagtgccggctcccgcgctctgcggcggcaagccccttggaattttcaaaatgaattatacagagtccagcccattgagagaatcaactgccataggttttacacctgagttagaaagtatcatacctgtgccttccaataagaccacttgtgaaaactggagagagatacatcatctggtttttcatgtagcaaatatttgttttgcagttgggttggttattccaactactcttcaccttcatatgatatttcttaggggaatgttaactctaggatgtaccctttatatcgtctgggccactctctaccgatgtgccttggatataatgatctggaactctgtgttcttgggtgtcaacattttgcatctgtcgtatcttttatacaagaagagaccggtaaagattgaaaaggaactcagtggcatgtaccggcgattgtttgaaccactccgtgtgcctccagatttgttcagaagactaactggacagttttgcatgatccaaaccttgaaaaagggccaaacttatgctgcagaggataaaacctcagttgatgaccgtctgagtattctcttgaagggaaaaatgaaggtctcctatcgaggacattttctgcataacatttacccctgtgcctttatagattctcctgaatttagatcaactcagatgcacaaaggtgaaaaattccaggtcaccattattgcagatgataactgcagatttttatgctggtcaagagaaagattaacatactttctggaatcagaacctttcttgtatgaaatctttaggtatcttattggaaaagacatcacaaataagctctactcattgaatgatcccaccttaaatgataaaaaagccaaaaagctggaacatcagctcagcctctgcacacagatctccatgttggaaatgaggaacagtatagccagctccagtgacagtgacgacggcttgcaccagtttcttcggggtacctccagcatgtcctctcttcatgtgtcatccccacaccagcgagcctctgccaagatgaaaccgatagaagaaggagcagaagatgatgatgacgtttttgaaccggcatctccaaatacattgaaagtccatcagctgccttgatcagagagagaattcaggttaccaagacggaaggtgtcttgaagagatcctgaaaaataccagcactttttcatggcttttaggttattctgctttagtgcatccagactggtggagtcggagggaggaagtgaggaagggtcaaggatggaagagttctttcacttaccctttttattagtcagcttttaaagtaattgttttactgagccttctgactatgccttgttctcttttgagatatatattttcacagtcttttctagatatattattgttttaacttaacaaatcttagcaatctctcaatgccttttcacttatttttttccaagttatgattctttttcctcacagtcttttttgttccatagcaatgaggttgtccatttgataattttaacaaacaatgtaagtttaaaattgaggctaaggtaacatgaaaaagcagggaatctcaaactttattccatata

SEQ ID NO: 329782 - DNA, 1500 bp, Artificial Sequence
  derived and/or modified sequence
ggagagcgccgatggctggggacccgaggtccgcgccacccacccgcaacctccttccccgagcctttgggaacgggttgttggccagacaagtcccagaaactgcctgctttgaagcatgaataagtgcgaaaagactcttagcaatgaattttcaaaatgaattatacagagtccagcccattgagagaatcaactgccataggttttacacctgagttagaaagtatcatacctgtgccttccaataagaccacttgtgaaaactggagagagatacatcatctggtttttcatgtagcaaatatttgttttgcagttgggttggttattccaactactcttcaccttcatatgatatttcttaggggaatgttaactctaggatgtaccctttatatcgtctgggccactctctaccgatgtgccttggatataatgatctggaactctgtgttcttgggtgtcaacattttgcatctgtcgtatcttttatacaagaagagaccggtaaagattgaaaaggaactcagtggcatgtaccggcgattgtttgaaccactccgtgtgcctccagatttgttcagaagactaactggacagttttgcatgatccaaaccttgaaaaagggccaaacttatgctgcagaggataaaacctcagttgatgaccgtctgagtattctcttgaagggaaaaatgaaggtctcctatcgaggacattttctgcataacatttacccctgtgcctttatagattctcctgaatttagatcaactcagatgcacaaaggtgaaaaattccaggtcaccattattgcagatgataactgcagatttttatgctggtcaagagaaagattaacatactttctggaatcagaacctttcttgtatgaaatctttaggtatcttattggaaaagacatcacaaataagctctactcattgaatgatcccaccttaaatgataaaaaagccaaaaagctggaacatcagctcagcctctgcacacagatctccatgttggaaatgaggaacagtatagccagctccagtgacagtgacgacggcttgcaccagtttcttcggggtacctccagcatgtcctctcttcatgtgtcatccccacaccagcgagcctctgccaagatgaaaccgatagaagaaggagcagaagatgatgatgacgtttttgaaccggcatctccaaatacattgaaagtccatcagctgccttgatcagagagagaattcaggttaccaagacggaaggtgtcttgaagagatcctgaaaaataccagcactttttcatggcttttaggttattctgctttagtgcatccagactggtggagtcggagggaggaagtgaggaagggtcaaggatggaagagttctttcacttaccctttttattagtcagcttttaaagtaattgttttactgagccttctgactatgccttgttctcttttgagatatatattttcacagtc

SEQ ID NO: 329783 - DNA, 1083 bp, Artificial Sequence
  derived and/or modified sequence
atgaactacaccgagagcagccccctgagagagagcaccgccatcggcttcacccccgagctggagagcatcatccccgtgcccagcaacaagaccacctgcgagaactggagagagatccaccacctggtgttccacgtggccaacatctgcttcgccgtgggcctggtgatccccaccaccctgcacctgcacatgatcttcctgagaggcatgctgaccctgggctgcaccctgtacatcgtgtgggccaccctgtacagatgcgccctggacatcatgatctggaacagcgtgttcctgggcgtgaacatcctgcacctgagctacctgctgtacaagaagagacccgtgaagatcgagaaggagctgagcggcatgtacagaagactgttcgagcccctgagagtgccccccgacctgttcagaagactgaccggccagttctgcatgatccagaccctgaagaagggccagacctacgccgccgaggacaagaccagcgtggacgacagactgagcatcctgctgaagggcaagatgaaggtgagctacagaggccacttcctgcacaacatctacccctgcgccttcatcgacagccccgagttcagaagcacccagatgcacaagggcgagaagttccaggtgaccatcatcgccgacgacaactgcagattcctgtgctggagcagagagagactgacctacttcctggagagcgagcccttcctgtacgagatcttcagatacctgatcggcaaggacatcaccaacaagctgtacagcctgaacgaccccaccctgaacgacaagaaggccaagaagctggagcaccagctgagcctgtgcacccagatcagcatgctggagatgagaaacagcatcgccagcagcagcgacagcgacgacggcctgcaccagttcctgagaggcaccagcagcatgagcagcctgcacgtgagcagcccccaccagagagccagcgccaagatgaagcccatcgaggagggcgccgaggacgacgacgacgtgttcgagcccgccagccccaacaccctgaaggtgcaccagctgccctag

SEQ ID NO: 329784 - protein, 417 aa, Artificial Sequence
  derived and/or modified sequence
MFMRIAKAYAALTDEESRKNWEEFGNPDGPQATSFGIALPAWIVDQKNSILVLLVYGLAFMVILPVVVGSWWYRSIRYSGDQILIRTTQIYTYFVYKTRNMDMKRLIMVLAGASEFDPQYNKDATSRPTDNILIPQLIREIGSINLKKNEPPLTCPYSLKARVLLLSHLARMKIPETLEEDQQFMLKKCPALLQEMVNVICQLIVMARNREEREFRAPTLASLENCMKLSQMAVQGLQQFKSPLLQLPHIEEDNLRRVSNHKKYKIKTIQDLVSLKESDRHTLLHFLEDEKYEEVMAVLGSFPYVTMDIKSQVLDDEDSNNITVGSLVTVLVKLTRQTMAEVFEKEQSICAAEEQPAEDGQGETNKNRTKGGWQQKSKGPKKTAKKKKETFKKKTYTCAITTVKATETKAGKWSRWE

SEQ ID NO: 329785 - DNA, 1254 bp, Artificial Sequence
  derived and/or modified sequence
atgttcatgaggatcgccaaggcctacgcagccttgactgacgaggagtcacggaagaactgggaagagttcggaaacccagatgggcctcaggctacttctttcggaatcgcgttgcctgcctggatagtggatcagaaaaacagtatcctcgtgctgctggtgtacggactggcgttcatggttatattaccagttgttgtcgggtcctggtggtacagaagcatcaggtattcgggagaccagatcctgattagaacaacccagatatacacttattttgtgtataaaactaggaatatggacatgaaacgcttgatcatggttctggccggtgcttcggagtttgacccacaatacaacaaagacgcaaccagtcgccctacagacaatatcttgatcccacagctgattcgcgaaattggaagcataaaccttaaaaaaaatgaacccccactcacctgtccctactccctcaaagcaagagtgctgctgctgtcgcacctggctcggatgaagatcccggaaacgttggaggaagaccagcagttcatgctgaaaaaatgcccagcacttttacaggaaatggtaaacgtaatttgccagctgatcgtaatggcccggaatagagaggaacgggagttccgcgcccccactcttgcctccctcgagaattgcatgaaactctcccagatggctgtgcaaggcttgcagcaatttaagtcccccctcttgcaactcccgcacattgaggaggacaatctgagacgcgtgagtaatcacaagaagtataagataaagactattcaggacttagtctccttgaaagagtctgacagacataccctattgcactttctcgaagatgagaagtacgaagaggttatggctgtgctggggtcttttccctatgtgacaatggatattaaaagccaggttttggacgatgaggactctaacaacatcaccgtgggttccctggttactgtattggtcaagctgaccagacagaccatggcagaggtctttgagaaggagcagagcatctgcgcggccgaagaacagcctgccgaagatggccagggcgaaaccaacaagaatcggacaaaaggaggttggcaacaaaagtccaaaggacctaagaaaacagcaaaaaagaagaaagaaacatttaagaaaaaaacttacacatgcgcaatcactacagtcaaagcgactgagacaaaggcaggcaagtggtccagatgggaatag

SEQ ID NO: 329786 - DNA, 1137 bp, Artificial Sequence
  derived and/or modified sequence
gagcacgaaagagaatttcgggccccaacacttgcctccctggaaaattgcatgaaactgtctcagatggccgtgcagggtctgcagcagtttaagtctccgctgctccagctcccccacatcgaagaagataacctgagacgagtatcaaaccacaaaaagtacaagataaagaccatccaagatctagtgagtctgaaggaatcagaccgccacactctgttgcactttctcgaggacgaaaagtatgaggaggtcatggcagtgcttgggtccttcccctacgtgaccatggacatcaaaagccaggtgctggacgacgaggattctaataatatcacagtggggagtttggtgactgtactcgtcaagctcaccagacagaccatggccgaagttttcgaaaaagaacagtccatctgcgctgcagaggaacagcccgcagaggatggccaaggggaaactaacaaaaaccgaacaaaaggtggctggcagcagaaaagcaaagggcctaaaaagacagccaagagcaaaaaaaagaagcccctgaagaagaaaccaacccctgtgcttctcccacaaagtaagcagcagaagcagaaacaagctaacggagtagttgggaatgaagccgccgtcaaggaagacgaggaggaggtgtctgataagggaagcgattctgaggaggaatggcaagaactccagcaatccatccagagaaaagagagggccttattggaaacaaagtcaaaaattacacaccctgtttactcattgtactttccagaagaaaaacaggagtggtggtggctgtatatcgccgataggaaggagcagacattaatctcaatgccatatcacgtgtgtaccttaaaggatactgaggaagtcgagctcaagtttccagcacccgggaagcctggcaattatcaatacaccgtctttttgcgcagcgactcatatatgggccttgaccagattaagccgctgaagttggaggttcacgaggccaaacctgtgccagagaatcatccacagtgggataccgcaatagaaggtgacgaggatcaagaggatagtgaaggattcgaggacagttttgaggaagaagaagaggaggaggaggacgatgactag

SEQ ID NO: 329787 - DNA, 1254 bp, Artificial Sequence
  derived and/or modified sequence
atgttcatgagaattgccaaggcctatgctgccctgacagatgaggagagcaggaagaactgggaggagtttggaaatccagatggcccccaggccaccagctttggaattgccctgcctgcctggatcgtggaccagaagaacagcatcctggtgctgctggtgtatggcctggccttcatggtgatcctgcctgtggtggtgggctcctggtggtaccgcagcatccgctacagcggggaccagatcctgatccgcaccacccagatctacacctactttgtgtacaagaccaggaacatggacatgaagaggctcatcatggtgctggccggggccagcgagtttgacccccagtacaacaaggatgccaccagccggcccacagacaacatcctgatcccccagctgatccgggagatcggcagcatcaacctgaagaagaatgaaccacccctgacctgcccctacagcctgaaggcccgggtgctgctgctgagccacctggccaggatgaagatccctgagaccctggaggaggaccagcagttcatgctgaagaagtgcccagccctgctgcaggagatggtgaatgtcatctgccagctgattgtgatggccaggaaccgggaggagcgggagttccgggcccccaccctggccagcctggagaactgcatgaagctgagccagatggctgtgcagggcctgcagcagttcaagagccccctgctgcagctgccccacatcgaggaggacaacctgcggcgggtgagcaaccacaagaagtacaagatcaagaccatccaggacctggtgtccctgaaggagagtgacagacacaccctgctgcacttcctggaggatgagaagtatgaggaggtgatggctgtgctgggcagcttcccctacgtgaccatggacatcaagagccaggtgctggatgatgaggacagcaacaacatcaccgtgggcagcctggtgacagtgctggtgaagctgacccggcagaccatggccgaggtgtttgagaaggagcagagcatctgtgccgctgaggagcagcctgcagaagatggccagggcgagaccaacaagaacagaaccaagggcggctggcagcagaagagcaagggccccaagaagacagccaagaagaagaaggagaccttcaagaagaagacctacacctgtgccatcaccaccgtgaaggccacagagaccaaggccggcaagtggagccgctgggagtag

SEQ ID NO: 329788 - DNA, 1137 bp, Artificial Sequence
  derived and/or modified sequence
gagcacgagcgggagttccgggcccccaccctggccagcctggagaactgcatgaagctgagccagatggctgtgcagggcctgcagcagttcaagagccccctgctgcagctgccccacatcgaggaggacaacctgcggcgggtgagcaaccacaagaagtacaagatcaagaccatccaggacctggtgtccctgaaggagagtgacagacacaccctgctgcacttcctggaggatgagaagtatgaggaggtgatggctgtgctgggcagcttcccctacgtgaccatggacatcaagagccaggtgctggatgatgaggacagcaacaacatcaccgtgggcagcctggtgacagtgctggtgaagctgacccggcagaccatggccgaggtgtttgagaaggagcagagcatctgtgccgctgaggagcagcctgcagaagatggccagggcgagaccaacaagaacagaaccaagggcggctggcagcagaagagcaagggccccaagaagacagccaagagcaagaagaagaagcccctgaagaagaagcccacccctgtgctgctgccccagagcaagcagcagaagcagaagcaggccaacggggtggtgggcaatgaagctgctgtgaaggaggatgaggaggaggtgtctgacaagggcagtgacagcgaggaggagtggcaggagctgcagcagagcatccagaggaaggagcgggccctgctggagaccaagagcaagatcacccaccctgtgtacagcctgtacttccctgaggagaagcaggagtggtggtggctgtacatcgctgacaggaaggagcagaccctcatctccatgccctaccacgtgtgcaccctgaaggacacagaggaggtggagctgaagtttcctgcccctgggaagccaggcaactaccagtacacagtgttcctgcggagtgacagctacatgggcctggaccagatcaagcccctgaagctggaggtgcatgaggccaagcctgtgcctgagaaccacccccagtgggacacagccattgaaggagatgaggaccaggaggacagcgagggctttgaggacagctttgaggaggaggaggaggaggaggaggatgatgactag

SEQ ID NO: 329789 - DNA, 1254 bp, Artificial Sequence
  derived and/or modified sequence
atgttcatgcggatcgccaaggcctacgccgccctgaccgacgaggagtcccggaagaattgggaggagttcgggaatccagacgggccacaggccaccagtttcgggattgcgctgcccgcctggattgtggaccagaagaatagcatcctggtgctactggtgtacggcctagcttttatggtcatcctccctgtggtggttggatcatggtggtacaggtctatcaggtactccggagaccaaattttgatcaggaccacccagatctacacatactttgtgtacaagacgcggaacatggacatgaagcggctcatcatggtgttagctggcgcctcggaattcgacccgcagtacaataaagacgccacatcaaggcctacagacaatattctaatcccgcagctgatcagagagatcggctctattaacctcaagaagaacgaaccaccacttacttgtccatattcgctcaaggctcgcgtgctgcttctgtcccacctggcacggatgaagatccccgaaaccctggaggaggatcagcagtttatgctgaagaaatgtcccgccttgctccaggaaatggtaaatgtaatttgccagttgatcgttatggcccgcaacagggaggagcgagagtttcgggctccaactttggccagcctcgagaattgtatgaagctgtcacagatggccgtgcaggggctgcagcaattcaaatccccactcctacaactcccccacattgaagaagacaacctgagacgggtatctaatcataaaaagtataaaatcaaaacaatccaggacctggtttcccttaaggaaagcgacaggcacacactgctacactttttggaagacgagaagtacgaggaggtgatggcggtcctgggatcctttccctacgtgacaatggatatcaagagccaagttttagacgacgaagattcgaacaatatcactgttggatcactagttacagttcttgtgaaactgacgcgccagacgatggcggaggtttttgagaaggagcagtcaatttgtgccgccgaagaacagccagccgaagatggtcagggagaaactaacaagaaccggacaaagggaggttggcaacagaagagcaaggggccaaagaaaacggccaagaaaaagaaggaaacgttcaaaaagaagacttacacttgcgccatcaccactgtgaaggccacagaaaccaaggcaggcaagtggtccaggtgggagtag

SEQ ID NO: 329790 - DNA, 1137 bp, Artificial Sequence
  derived and/or modified sequence
gagcacgagcgggagttccgggcccccaccctggccagcctggagaattgtatgaagctgtctcaaatggctgttcagggtctgcagcagttcaaatcgccgttgttgcagctgccacacatcgaagaggacaatctcagaagggttagtaaccacaagaagtataaaatcaagaccattcaggatctggtgagtctcaaggaatcggaccgacacaccttactccattttctggaggatgagaaatatgaagaggtgatggcagtcctgggctcttttccatacgtgactatggacattaagagccaggtactggacgacgaggattccaataacattacggtgggatcgctggttactgtgctcgttaaactcacaaggcagacaatggccgaagtcttcgagaaagagcaatcaatttgtgccgcggaggaacagccggcagaggacggtcaaggggaaaccaataaaaacaggaccaaaggcggttggcagcagaaatcaaaggggcctaaaaagaccgccaaatctaaaaagaagaaaccattgaaaaagaaacccactcctgtactgttgccccagtctaagcagcagaaacagaagcaagcaaacggcgtcgtcgggaacgaagcagccgtgaaggaggacgaagaggaagtgagtgataaagggtcagattcagaagaggagtggcaagagctgcagcagtctatacagcggaaagagagagcattgcttgagacaaaatccaagatcactcaccctgtgtattctctttatttccctgaagagaaacaggagtggtggtggctctatattgccgaccgaaaggagcagactcttatatccatgccatatcacgtctgcacgctgaaggataccgaggaggttgaacttaaattccctgcccccggcaaacctgggaattaccaatacaccgtgtttttgcgttccgactcttacatggggctggatcagatcaaacctcttaaactggaggtacatgaagcaaaacccgtcccagaaaatcaccctcagtgggacaccgcgatagaaggagatgaggatcaggaggattctgaggggtttgaggattcctttgaggaagaagaagaagaggaggaagacgatgattag

SEQ ID NO: 329791 - DNA, 1254 bp, Artificial Sequence
  derived and/or modified sequence
atgttcatgaggatcgcgaaggcatacgcagccctcactgatgaagagtcccgtaagaactgggaggagttcggcaacccagacggcccacaggcgacaagttttggcattgccctcccggcatggatcgtggaccagaaaaacagtatcctcgtgcttctggtgtatgggcttgctttcatggtaatattgcctgtggtcgtggggagctggtggtaccggtccattcggtattcaggggatcagatactcatcagaaccacgcagatctatacatacttcgtgtacaaaacacgcaatatggacatgaagcgccttatcatggtactcgcaggggcttccgagtttgatccccagtacaataaggacgccacatctcgacccacagacaacattctcattccccagctcatcagggagattggttctatcaacttaaagaaaaacgagccgccattgacatgtccatacagcctcaaggccagggtgctcctactgtctcacctggcacgaatgaagatcccagagaccttggaggaggatcagcagtttatgttaaagaaatgcccagcgttgctgcaggagatggtcaacgtgatctgccagttgatagtaatggcacggaaccgcgaggaaagggagttcagggctcctaccctcgctagcctggaaaactgtatgaagctgtcccagatggccgttcagggcctgcagcagttcaagtctccccttctccagcttcctcatattgaggaggacaatctgcgacgcgtgtccaaccataagaagtataagataaagaccatacaggacctcgtgtctttgaaggagtccgacaggcacacactcttgcacttcctcgaggacgagaaatatgaagaagtgatggccgtattggggtccttcccgtacgtgactatggacattaagagccaggtccttgatgatgaagattctaacaacattaccgtgggcagcctggttactgtgctggtgaagctcacccggcagaccatggcagaagtttttgaaaaggaacaaagcatttgcgctgctgaggaacagccggctgaagacggacagggcgagacaaataagaacagaacaaagggcggatggcagcagaagagcaaaggacctaagaagactgccaaaaagaaaaaggagacattcaagaagaagacctacacctgcgccattactactgttaaagcaacagaaaccaaggcaggaaaatggagccggtgggagtag

SEQ ID NO: 329792 - DNA, 1137 bp, Artificial Sequence
  derived and/or modified sequence
gaacatgagagagaatttcgtgcacctactctggcttccctggagaactgtatgaaactgtcacaaatggccgtacagggacttcaacagttcaagtcgcccctgcttcaattaccccatatcgaagaggataacctgcgccgtgtgagtaaccacaagaaatataaaatcaaaactattcaggatctcgttagcttgaaggagagcgaccgccacaccctcctgcactttctggaagacgagaagtacgaggaggtgatggccgtgctcggcagctttccttatgtcaccatggatatcaaaagccaggtcctggatgatgaggacagcaataacattaccgtgggttctctagtgacggtgttagtgaagttaacgcgccagaccatggcagaagtgtttgagaaggagcagtccatctgtgctgctgaagagcagcccgcagaggacggtcagggggaaactaataagaacaggaccaagggaggctggcagcaaaaatccaaaggacccaagaagactgcaaagtccaagaagaagaaaccacttaaaaagaaacccacacctgttctgcttccccagagcaaacagcagaagcagaaacaggcaaacggggttgtcggaaacgaggctgctgtcaaagaggacgaggaggaggtctcagacaaaggctcagattccgaggaggagtggcaggagctgcaacagagcatccaaagaaaggagcgcgctctgctggaaaccaagtctaagattactcatccagtgtactctctgtattttcctgaggaaaagcaggagtggtggtggctctacatcgccgaccgcaaagaacagactctcatttccatgccatatcacgtatgtactcttaaagacacagaagaggtggaactgaagtttcctgcgccaggcaaacctggaaattaccaatacaccgtattcctgcggtctgattcttatatgggactggaccaaataaaacccctgaagttggaggtgcacgaggccaagccagtgcctgagaatcatccacaatgggacacggccatcgagggcgatgaagaccaagaggatagcgagggcttcgaggactcctttgaggaagaggaagaggaagaggaggacgacgattag

SEQ ID NO: 329793 - DNA, 5085 bp, Artificial Sequence
  derived and/or modified sequence
gaacatgaaagggagtttcgtgctccaactttggcatccctagaaaactgcatgaagctttctcagatggccgttcagggacttcagcaatttaagtctccccttctgcagctccctcatattgaagaggacaatcttagacgggtttctaatcataagaagtataaaattaaaactatccaggatttggtgagtttaaaagaatcagatcgtcacactctactgcacttccttgaagatgaaaaatatgaagaggttatggctgtccttgggagttttccatatgtgaccatggatataaaatcacaggtgttagatgatgaagatagcaacaacatcacagtaggatccttagttacagtgttggttaagttgacaaggcaaacaatggctgaagtatttgaaaaggagcagtccatctgtgctgcagaggaacagccagcagaagatgggcagggtgaaactaacaagaacaggacaaaaggaggatggcaacagaagagtaaaggacccaagaaaactgctaaatcaaaaaaaaagaaacctttaaaaaaaaaacctacacctgtgctattaccacagtcaaagcaacagaaacaaaagcaggcaaatggagtcgttgggaatgaagctgcagtaaaggaagatgaagaagaagtttcagataagggcagtgattctgaagaagagtggcaagaattacaacaaagcatacagcgaaaagagagagctctattggaaaccaaatcaaaaataacacatcctgtgtatagcctttactttcctgaggaaaaacaagaatggtggtggctttacattgcagataggaaggagcagacattaatatccatgccatatcatgtgtgtacgctgaaagatacagaggaggtagagctgaagtttcctgcaccaggcaagcctggaaattatcagtatactgtgtttctgagatcagactcctatatgggtttggatcagattaaaccattgaagttggaagttcatgaggctaagcctgtgccagaaaatcacccacagtgggatacagcaatagagggggatgaagaccaggaggacagtgagggctttgaagatagctttgaggaagaagaggaggaagaagaagatgatgactaagcagtactctgaatggaccacagtgtttgcacatatttgcaattttttgctgttttggaagtgtatcataaaccagaaacagtacagaactgatgttgagggaggtgtagtttttttactcttgaaatgggtgcataatataactaggcagtggcggtgccttggtacaacctgaaaaatgttaaggcttattgaaacctttcaagtaggggatggtacatttatttcatctgcaaatgataataaatcctttgttattataactgtccagaagtgtgggctatgtattatctgatcagtctatggtcccagtaaaagtaaagatgcaggaaacacagtctgtaaatgagcgacttttctttgttcagctttagttttagcaaacaccacaaatatgttttaagtaacatcgctcaagtttaagtaacatcgctcaagttgataatctcttgataagctctgttgttgacattttgcagtgatacaacagctccactcatagatttaaacttttatttttacttatcttggtcataagttggcattctctcacattccacatgatatagagggctacgttttggaattttccttttcttaattgcccagagttatcagacagattataaaaatggcttttaatggcttaaaccatttctaaacctctatcttagcagatcaatgcaggatctaattcttttgataagttctagctctaaaagtgatagtgggactgtatgttttctgatactggtggcttatgttattaaaccttttttaaaaaaggttcactctaaaagctgaactacatccttagttttcagtctacttgactctatcaggagctttttaaggaaagtaagtataacatgcaaaggaagctttttttgtattcattttggactcctgtcaataaaaatagaagtttgttgactcgttttatgtttcaatggtgtgtgtctttttactatcaggacataaatagggcaatccacttctttatttttcaactaaagattgaatagtattgtacattactgctaaagtgactgctatttctgtatactgtagaaaaacccaggagtgagagggatttcccctcatagtacaactggaaggatagtgcttgtaaagagtagagatgtgtacatgatgaatcattgagggagggtggatatttttattcctagatatggaggaaacataagtctgtagtattataaaactgattgtaataattctttcctatcaaaatctccataggtcaaaatattgttggaatactaaaatttgcaaccttgtttactttaaaaggttgccactttcagtgcagaatactaccggcatcttgttactgcaatagttggaaataaaatgtgaaaattagcaaaaccatgaatggtttttttggttctaaatttaagatgtaatatttcctataaaagggtgaaagcagtttctttctctataacctcaatcaccagtttagtgagagcctttcttggcaggcaggaggcagtgtcactgaggatttttttcatttacttcattgtacaagtaggagggtgggtttaattttcaaatcaggttctgctgtgaagcaccagtgtcttgaggcagctactgattacctaagtgtggtggcagggggtaagccagctggtgtcaagtgaaaggagggattagagaaaacaggtgtggcacgaaggcaaggaaactgagcagacaagacagaacaatgtgtagaatgcatatttcctagttttcttgaaagatttcaagaaaagttgtttttttttttctagtggctactttgccttaaagaggctttataagttcattcacacagctggcttctctggttttaagattctggagaggatgataacctagtaacaccacagtgcttaaaaaaaaaaaaaaaaaaaaaactaccatcaccagaaaattccaccagtttgttttccttttctctttgtgtgatgtgtatgtacttcccaactaagtaaaataaaatttcctctagtgagtgctttaggtaacctctttccatatggcagtagtgaaagaactgagccttcagttgatagttcttctctctccagcaagtcgctaaactccacatcccttcgtttttcctctggaatgagaataacaaactatcctagtttgcatttaatctaatggaaacttgagcaaagtttcaattttcttcctataaagaaactgacattttgtcaacaattgatgagcctatagatcatacagtgtataggaagtgaaattgaaacagttaaattatgtgatatttttctctaattggtaaagtacctattaaaatacagctgttcatgaggagacttaccacaattcaaagtgtagcagttgtgtattttagcattataatatttgattgaggccctgaggtgttaatatctcaatctcagagttagatgttcatgtcctttttgaattttttaaacatttttcataattttttttttaagttagggagcacattgagtgaagttctctgtgtagaacaataccttctgctctgcttctcccagctttcactgagggctggaaaaggacaggcctgtccagctgtactgtcccactgtgtatggggaagctcaggctctggtggaagcagggggcgtggatgtcaaacaactgatgtggaaacagggagggagagatataatgaggctctctaggcatgttatttttgaccacaagttttgttcagtttgcttcagccaatccaaaccatatactagagtgttctgtagtcacaattcttatttcaaatgtaattcagcaccttacataatttttgagaggttgtcattcatcacatatttactgagtttctatgtgccaggctctgtgactggatactggagctatcaaaatgaaaaaaatagtgttaagaactcactcgctggtgttagagcaggtagatgagtggcaatccatttaaatccatttgccttggctattatttggaatgcctttttttttttttagtctatctactgtaggcagaagaattatttctttaggggctagctgtttattttgctggcctttttttctctctttctctttttcttcttaagacggagtctcgctctgtcctccaggctggaggagtgcagtggcacgatctcagctcactgcaacctccgcctcccagcttcaagcgattcttctgcctcagcctcctgagtagctgggactgcaggtgcatgccaccacacccagctaattttttaatttttagtagagatgggattttgccacgttgtccagcctggtctcgaactcctggcctcaagtgatcagccctcctcagcctcccaaagtgctggcattacaggcatgagccactgcgcccagcctgttgggtttttttggaaaaaaaacaaaaacaacaaatcatcatcctttcctttaaaatgtttttttttttttaagaaacaattttcccacaaacggtctgatttaactccatgaaatcctctatttagactgccttaaagtgaaataactgttggtgaaccataacattttgccagctgtgtagtgattagtccaaatatgtctcaagaagttagcaccaagcattctcatccatttaaacttgatgctagggctattttgcaaaacttaaaaagatgcgatcttgtacatatttctgtaacctgagctgaaaacccaaataacaatcattgacatactttagggctattgtttcaggtgggggtgtatacatcccaggggcgtggagatgatcaatccattgaggaagtattaagatgattatttgtatttaatctcatccttttaaatttctatttttgtgtgttttataatgtacataatatattgtacaattgtacacttctattatttataaataaacatttattggtgcattaa

SEQ ID NO: 329794 - DNA, 1254 bp, Artificial Sequence
  derived and/or modified sequence
atgttcatgagaatcgccaaggcctacgccgccctgaccgacgaggagagcagaaagaactgggaggagttcggcaaccccgacggcccccaggccaccagcttcggcatcgccctgcccgcctggatcgtggaccagaagaacagcatcctggtgctgctggtgtacggcctggccttcatggtgatcctgcccgtggtggtgggcagctggtggtacagaagcatcagatacagcggcgaccagatcctgatcagaaccacccagatctacacctacttcgtgtacaagaccagaaacatggacatgaagagactgatcatggtgctggccggcgccagcgagttcgacccccagtacaacaaggacgccaccagcagacccaccgacaacatcctgatcccccagctgatcagagagatcggcagcatcaacctgaagaagaacgagccccccctgacctgcccctacagcctgaaggccagagtgctgctgctgagccacctggccagaatgaagatccccgagaccctggaggaggaccagcagttcatgctgaagaagtgccccgccctgctgcaggagatggtgaacgtgatctgccagctgatcgtgatggccagaaacagagaggagagagagttcagagcccccaccctggccagcctggagaactgcatgaagctgagccagatggccgtgcagggcctgcagcagttcaagagccccctgctgcagctgccccacatcgaggaggacaacctgagaagagtgagcaaccacaagaagtacaagatcaagaccatccaggacctggtgagcctgaaggagagcgacagacacaccctgctgcacttcctggaggacgagaagtacgaggaggtgatggccgtgctgggcagcttcccctacgtgaccatggacatcaagagccaggtgctggacgacgaggacagcaacaacatcaccgtgggcagcctggtgaccgtgctggtgaagctgaccagacagaccatggccgaggtgttcgagaaggagcagagcatctgcgccgccgaggagcagcccgccgaggacggccagggcgagaccaacaagaacagaaccaagggcggctggcagcagaagagcaagggccccaagaagaccgccaagaagaagaaggagaccttcaagaagaagacctacacctgcgccatcaccaccgtgaaggccaccgagaccaaggccggcaagtggagcagatgggagtag

SEQ ID NO: 329795 - DNA, 1137 bp, Artificial Sequence
  derived and/or modified sequence
gagcacgagagagagttcagagcccccaccctggccagcctggagaactgcatgaagctgagccagatggccgtgcagggcctgcagcagttcaagagccccctgctgcagctgccccacatcgaggaggacaacctgagaagagtgagcaaccacaagaagtacaagatcaagaccatccaggacctggtgagcctgaaggagagcgacagacacaccctgctgcacttcctggaggacgagaagtacgaggaggtgatggccgtgctgggcagcttcccctacgtgaccatggacatcaagagccaggtgctggacgacgaggacagcaacaacatcaccgtgggcagcctggtgaccgtgctggtgaagctgaccagacagaccatggccgaggtgttcgagaaggagcagagcatctgcgccgccgaggagcagcccgccgaggacggccagggcgagaccaacaagaacagaaccaagggcggctggcagcagaagagcaagggccccaagaagaccgccaagagcaagaagaagaagcccctgaagaagaagcccacccccgtgctgctgccccagagcaagcagcagaagcagaagcaggccaacggcgtggtgggcaacgaggccgccgtgaaggaggacgaggaggaggtgagcgacaagggcagcgacagcgaggaggagtggcaggagctgcagcagagcatccagagaaaggagagagccctgctggagaccaagagcaagatcacccaccccgtgtacagcctgtacttccccgaggagaagcaggagtggtggtggctgtacatcgccgacagaaaggagcagaccctgatcagcatgccctaccacgtgtgcaccctgaaggacaccgaggaggtggagctgaagttccccgcccccggcaagcccggcaactaccagtacaccgtgttcctgagaagcgacagctacatgggcctggaccagatcaagcccctgaagctggaggtgcacgaggccaagcccgtgcccgagaaccacccccagtgggacaccgccatcgagggcgacgaggaccaggaggacagcgagggcttcgaggacagcttcgaggaggaggaggaggaggaggaggacgacgactag

SEQ ID NO: 329796 - protein, 205 aa, Artificial Sequence
  derived and/or modified sequence
MSAQRLISNRTSQQSASNSDYTWEYEYYEIGPVSFEGLKAHKYSIVIGFWVGLAVFVIFMFFVLTLLTKTGAPHQDNAESSEKRFRMNSFVSDFGRPLEPDKVFSRQGNEESRSLFHCYINEVERLDRAKACHQTTALDSDVQLQEAIRSSGQPEEELNRLMKFDIPNFVNTDQNYFGEDDLLISEPPIVLETKPLSQTSHKDLD

SEQ ID NO: 329797 - DNA, 618 bp, Artificial Sequence
  derived and/or modified sequence
atgagcgcccagagactgatcagcaacagaaccagccagcagagcgccagcaacagcgactacacctgggagtacgagtactacgagatcggccccgtgagcttcgagggcctgaaggcccacaagtacagcatcgtgatcggcttctgggtgggcctggccgtgttcgtgatcttcatgttcttcgtgctgaccctgctgaccaagaccggcgccccccaccaggacaacgccgagagcagcgagaagagattcagaatgaacagcttcgtgagcgacttcggcagacccctggagcccgacaaggtgttcagcagacagggcaacgaggagagcagaagcctgttccactgctacatcaacgaggtggagagactggacagagccaaggcctgccaccagaccaccgccctggacagcgacgtgcagctgcaggaggccatcagaagcagcggccagcccgaggaggagctgaacagactgatgaagttcgacatccccaacttcgtgaacaccgaccagaactacttcggcgaggacgacctgctgatcagcgagccccccatcgtgctggagaccaagcccctgagccagaccagccacaaggacctggactag

SEQ ID NO: 329798 - DNA, 618 bp, Artificial Sequence
  derived and/or modified sequence
atgagcgcccagcgtctgatctccaacaggacaagccagcagtctgccagcaacagcgactacacttgggagtatgagtattacgagatcgggccagtctcattcgaaggactgaaagcccataaatactccattgtcattggattttgggttggcttagctgtgttcgtcatattcatgtttttcgtcttgaccctgctgacaaaaactggcgctccacaccaggacaacgcagaaagctctgaaaaacgctttaggatgaattctttcgtgagcgattttggtcgtccactcgagcccgataaagtgttctcgagacaaggtaatgaagagtcaagatctctgtttcattgctacattaacgaagtggaacgccttgaccgcgcaaaagcttgccaccagaccacggcattagactctgacgtgcagcttcaagaggccattaggtcgagcggccaacctgaggaagagctgaaccgcctgatgaaattcgacatcccaaacttcgtcaacactgatcagaattattttggcgaggacgacttgctgatttctgagccgcctatagtactcgaaactaaacctttgtctcagactagccataaggacttggactag

SEQ ID NO: 329799 - DNA, 618 bp, Artificial Sequence
  derived and/or modified sequence
atgtctgcccagaggctcatcagcaacagaaccagccagcagagcgccagcaacagcgactacacctgggagtatgagtactatgagatcggccctgtgtcctttgagggcctgaaggcccacaagtacagcatcgtgattggcttctgggtgggcctggccgtgtttgtgatcttcatgttctttgtgctgaccctgctgaccaagacaggagccccccaccaggacaatgctgagagcagcgagaagcgcttcaggatgaacagctttgtgtctgactttggccggcccctggagccagacaaggtgttcagccggcagggcaatgaggagagccgcagcctcttccactgctacatcaatgaggtggagcggctggaccgggccaaggcctgccaccagaccacagccctggacagtgatgtgcagctgcaggaggccatccgcagcagcggccagcctgaggaggagctgaaccggctgatgaagtttgacatccccaactttgtgaacacagaccagaactactttggagaagatgacctgctgatcagcgagccccccatcgtgctggagaccaagcccctgagccagaccagccacaaggacctggactag

SEQ ID NO: 329800 - DNA, 2153 bp, Artificial Sequence
  derived and/or modified sequence
ctcggatctaggagctactcgcccggccctgggcggtgggaggcggcggcggcggcggcgctcgcgcacctcggaggagccaggagccggaaccagggccgagcccgcgggccggggctagccagccggtcggagatgtccgcccagaggttaatttctaacagaacctcccagcaatcggcatctaattctgattacacctgggaatatgaatattatgagattggaccagtttcctttgaaggactgaaggctcataaatattccattgtgattggattttgggttggtcttgcagtcttcgtgatttttatgttttttgtgctgaccttgctgaccaagacaggagccccacaccaagacaatgcagagtcctcagagaagagattcagaatgaacagctttgtgtcagactttggaagacctctggagccagataaagtattttctcgccaaggcaacgaggagtccaggtctctctttcactgctacatcaatgaggtggaacgcttggacagagccaaagcttgtcaccagaccacagcccttgacagtgacgtccaactccaggaagccatcagaagcagtgggcagccagaggaggagctgaacaggctcatgaagtttgacatccccaactttgtgaacacagaccagaactactttggggaggatgatcttctgatttctgaaccacctattgttctggaaactaagccactttcccagacctcacacaaagacctggattgagaaacatgctctgtaaagggtcttcctgaagatgtggattctatctttatgtagcaagaaatctacatccaccaaaattgtgtgtgtttgggggagagagagacatagagatagagacagagaggcagagaagagacccctttagaagagagctgagctgattaagctgagtggttttttgttttgttttgtttttgctttttaatacatttggagctttgggagtattaaagtatttacaccaagcttgtccaacccgtggcatgtgtcccaggacagctttgaatgtggcccaatacaaattttaaactttattaaaacatgagttttgtttttttttttgctattttttttaaagctcgtcagctatcgttagtgttagtgtactttatgtgtggcccaagacaactcttcttccagtgtggcacagggaagctaaaagattggacacctctgatttatactagctcgttttgcttgttgaaaaatttggccaaatacctattgtcagcattcttgggtgaggattagcctaccatgttctaatctggccctgccactactatgctctacctttggtgagttgctttacctctctgggctgccccatttttaactgtaggttgacaggtctagagtgatccatcccacctctaatattttgtgaatttatgactttgccttcagatgaggctgagctatacataaaacagtataaactagggtactgcctcgtatctcttgtaggctctctcaaatctctgtaccttccacttaaccctaattgagccaagctttagtcaggggatctggttgtctaccagaatgtcaggagactcatcttacacagtcatggtggccaatgtttctggtgggttgtgctgaaacagctcttctgagaacttccaaccacccatgctctaacctggagacagccatcccctgcctcagaataagtaccaattcgtagtacatgtatggtactcttgtccccaagaaatgttaggaagcttgtcagctgaatgagaggaggtgccttctgggtatctctgtgttggtgtatctgtgccattggctacagaacaagaaaaatactatttgccatgctattaccttggcagatgtgtaggtgatagtcatctggctttgagctgagatggtcagtgggttgtaaattccccactagcagatattcagggtggcctgagttatgtaaacaagtgagcaacacagctttaatttcatggaggaatcaaagctgcacactggtattaaaacaacttgattttgcgcacacagttgcatgcatggcaagctgttaacctctgggtggcattttcattatgaatttgttcaccacctgtcttgcttaagctacaaaataaatgcatttgactgca

SEQ ID NO: 329801 - DNA, 618 bp, Artificial Sequence
  derived and/or modified sequence
atgagcgcccagcggctgatcagcaaccggaccagccagcagagcgcctccaatagtgactacacgtgggagtatgaatattatgagatcgggccagtgtccttcgaggggctgaaagcccataagtattccatcgttattggcttctgggttggccttgcggtattcgtaatttttatgttctttgtcctgacactgctgacaaagaccggcgcacctcaccaagacaacgcggagtcgtcagagaaacggttccgcatgaactccttcgtctcggacttcggccgtcccttggagcccgataaagtctttagccgacaaggcaatgaagagtcccgctcactgttccactgttacattaatgaggtggaaaggttagatagagccaaagcatgtcatcagacaaccgccttggatagcgacgtgcagctccaggaagctatccgatcttctggccaaccggaggaggagctgaatagactaatgaagtttgatatcccaaacttcgtcaatacggaccagaactattttggggaggatgacttacttatctctgagccacctatcgtgctcgaaaccaaacccctctcgcagacaagccataaagacctcgactag

SEQ ID NO: 329802 - DNA, 618 bp, Artificial Sequence
  derived and/or modified sequence
atgagcgcccagcggctgatctcaaacaggacgagccaacagagtgcaagtaactccgactatacatgggaatacgagtactatgaaattggccctgtgtctttcgagggcttgaaggcacacaaatattctatcgttatcggtttttgggttggccttgccgtgttcgttatcttcatgttcttcgtcctcactttgctgactaagactggagcacctcatcaggacaacgctgagagcagcgagaagagatttcgcatgaatagcttcgtgtctgacttcggccgaccgttagagccggataaagtgttttccagacagggaaatgaggagtctcgttcattgtttcattgttacatcaacgaagtcgaaaggttagacagggccaaggcttgtcatcaaaccactgcccttgactcggatgtccagttgcaggaagccatccgctcctcaggtcagcctgaggaggaactgaataggttgatgaagtttgatatccccaacttcgtgaatactgatcagaattacttcggtgaagacgatctgctcattagcgaaccacctatagtgttggaaactaagcccctgtcgcaaacatcccataaggacctggattag

SEQ ID NO: 329803 - protein, 206 aa, Artificial Sequence
  derived and/or modified sequence
  misc_feature (1)..(1): Xaa can be any naturally occurring amino acid
XWVGSLSMGMIFFCCPIVSVFTDLFGCRKTAVVGAAVGFVGLMSSSFVSSIEPLYLTYGIIFACGCSFAYQPSLVILGHYFKKRLGLVNGIVTAGSSVFTILLPLLLRVLIDSVGLFYTLRVLCIFMFVLFLAGFTYRPLATSTKDKESGGSGSSLFSRKKFSPPKKIFNFAIFKVTAYAVWAVGIPLALFGYFVPYVHLVSMLLH

SEQ ID NO: 329804 - protein, 326 aa, Artificial Sequence
  derived and/or modified sequence
MVLSQEEPDSARGTSEAQPLGPAPTGAAPPPGPGPSDSPEAAVEKVEVELAGPATAEPHEPPEPPEGGWGWLVMLAAMWCNGSVFGIQNACGVLFVSMLETFGSKDDDKMVFKTAWVGSLSMGMIFFCCPIVSVFTDLFGCRKTAVVGAAVGFVGLMSSSFVSSIEPLYLTYGIIFACGCSFAYQPSLVILGHYFKKRLGLVNGIVTAGSSVFTILLPLLLRVLIDSVGLFYTLRVLCIFMFVLFLAGFTYRPLATSTKDKESGGSGSSLFSRKKFSPPKNFQFCHLQGDSLCSVGSWNTTCTFWILCALCSLGEYAPSLIMNITI

SEQ ID NO: 329805 - DNA, 621 bp, Artificial Sequence
  derived and/or modified sequence
tgatgggtcggtagccttagtatgggaatgatttttttctgttgtcctatagtcagcgtttttacggacctgttcggctgccgcaagactgccgtggtcggcgccgctgttggatttgtggggcttatgtctagtagctttgtctccagcatcgagcctctctatctgacgtatggcatcatcttcgcctgtggatgttcgttcgcttaccaaccctccctggtgatcttaggccattatttcaaaaagaggctaggactcgtaaacgggattgtgaccgctggctcctctgttttcactatcctgctgcccctcctgctgcgagtgctcatcgactctgttgggttgttttacactctaagagtgctgtgcatctttatgttcgtgctgtttctggccgggttcacttaccgccctctggctacaagcacgaaggataaagagtcaggcggctctggttccagcttgttctccaggaaaaagttcagcccccctaaaaaaatctttaacttcgctatattcaaggttacggcctacgctgtgtgggcagtgggtattcctctggctctgttcgggtactttgtcccttacgtccatctggtgagcatgttacttcactag

SEQ ID NO: 329806 - DNA, 981 bp, Artificial Sequence
  derived and/or modified sequence
atggttctgtcacaggaagagccagacagtgcaagagggacctctgaggctcagccccttgggcccgcccctacaggtgcggccccacctcctggtccaggaccttctgactctcccgaggctgcagtggagaaagttgaggtggaattggctggtcctgcaactgcagaaccccacgagccccccgaaccacctgaaggcgggtggggctggttagtgatgctcgccgcaatgtggtgcaatggttccgtgtttggaattcagaacgcatgtggggttctgtttgtatctatgcttgaaacattcggtagcaaagatgatgataagatggtctttaaaaccgcatgggttggaagcctgagcatgggtatgattttcttctgctgccctatcgtgtcagtgtttactgacttgttcgggtgtaggaagactgcagtggttggcgcagcagtgggctttgtagggctgatgtccagctcttttgtgtcttctatcgagccgctatacctgacttacggcatcatttttgcttgtgggtgctcttttgcataccagccatctctggtgattctggggcactacttcaaaaagaggcttggtttggtgaatggcatcgttaccgctggatcttcggtgtttaccattctgctgcctttgctgctacgcgtcctcatcgactctgtgggacttttctataccttacgcgtattatgcatcttcatgttcgtgctttttcttgcaggcttcacctacagacccttagccacatccactaaggataaagagagcggcggcagtggttcctccttattctctcgtaagaaattctctccacccaaaaactttcagttttgccatctgcagggggattcattgtgcagcgtcgggtcgtggaataccacctgtaccttctggatattgtgtgccttgtgcagtttaggggagtacgctcccagcctcatcatgaacatcaccatatag

SEQ ID NO: 329807 - DNA, 621 bp, Artificial Sequence
  derived and/or modified sequence
tgatgggtgggcagcctgtccatgggcatgatcttcttctgctgccccatcgtgtctgtgttcacagacctgtttggctgcaggaagacagctgtggtgggcgctgctgtgggctttgtgggcctgatgagcagcagctttgtgagcagcattgagcccctgtacctgacctacggcatcatctttgcctgtggctgcagctttgcctaccagcccagcctggtgatcctgggccactacttcaagaagaggctgggcctggtgaatggaattgtgacagctggcagctctgtgttcaccatcctgctgcccctgctgctgcgggtgctgattgattctgtgggcctcttctacaccctgcgggtgctgtgcatcttcatgtttgtgctcttcctggccggcttcacctaccggcccctggccaccagcaccaaggacaaggagagcggcggcagcggcagcagcctcttcagcaggaagaagttcagcccccccaagaagatcttcaactttgccatcttcaaggtgacagcctatgctgtgtgggccgtgggcatccccctggccctgtttggctactttgtgccctacgtgcacctggtgtccatgctgctgcactag

SEQ ID NO: 329808 - DNA, 981 bp, Artificial Sequence
  derived and/or modified sequence
atggtgctgagccaggaggagccagacagcgcccggggcaccagcgaggcccagcccctgggccctgcccccactggagctgcccctcctcctggccctggccccagcgacagccctgaggccgctgtggagaaggtggaggtggagctggccggccctgccacagctgagccccatgagcccccagagcccccagagggcggctggggctggctggtgatgctggccgccatgtggtgcaatggatctgtgtttggcatccagaatgcctgtggggtgctgtttgtgtccatgctggagaccttcggcagcaaggatgatgacaagatggtgttcaagacagcctgggtgggcagcctgtccatgggcatgatcttcttctgctgccccatcgtgtctgtgttcacagacctgtttggctgcaggaagacagctgtggtgggcgctgctgtgggctttgtgggcctgatgagcagcagctttgtgagcagcattgagcccctgtacctgacctacggcatcatctttgcctgtggctgcagctttgcctaccagcccagcctggtgatcctgggccactacttcaagaagaggctgggcctggtgaatggaattgtgacagctggcagctctgtgttcaccatcctgctgcccctgctgctgcgggtgctgattgattctgtgggcctcttctacaccctgcgggtgctgtgcatcttcatgtttgtgctcttcctggccggcttcacctaccggcccctggccaccagcaccaaggacaaggagagcggcggcagcggcagcagcctcttcagcaggaagaagttcagcccccccaagaacttccagttctgccacctgcagggcgacagcctgtgcagcgtgggctcctggaacaccacctgcaccttctggatcctgtgtgccctgtgcagcctgggggagtatgcccccagcctcatcatgaacatcaccatctag

SEQ ID NO: 329809 - DNA, 621 bp, Artificial Sequence
  derived and/or modified sequence
tgatgggtgggcagcctgagcatgggcatgatcttcttctgctgccctattgtgtctgtcttcaccgacctgtttggctgtagaaaaactgcagtggtgggggccgctgttgggttcgtggggttgatgagcagtagttttgtgtcaagcattgagccgttgtatttgacttatggtatcatcttcgcttgtgggtgctccttcgcctatcaaccttccctggtgatcctaggccactatttcaagaaacggcttggactcgtaaatggaattgtgactgcaggatccagcgtctttacaattctgctcccgttgttgttgcgtgttctgattgacagcgtgggattgttctatacactgcgggtgctgtgcatcttcatgtttgtgctattcctagctggcttcacgtatcggcccctagctacttcgacaaaagacaaggaatcaggtggcagcgggtcatcactttttagcaggaaaaagttcagtccacctaagaagatattcaactttgccatattcaaggtcacggcttacgctgtctgggccgtcggcatacccctcgcgctgttcggctactttgtgccatatgtgcacctcgtgagtatgcttctccattag

SEQ ID NO: 329810 - DNA, 981 bp, Artificial Sequence
  derived and/or modified sequence
atggtgctgagccaggaggagcccgacagcgcccggggcaccagcgaagctcaacctcttggccctgcaccgaccggagctgcccctccacccggtccagggcccagtgatagcccagaagccgctgttgaaaaggttgaagtggaacttgccggccctgccacggcggaaccccacgagccgcctgaaccaccggaggggggatggggctggttggtgatgctggccgcaatgtggtgtaatgggtcagtcttcgggatccaaaatgcatgcggcgttctgtttgtgtccatgctagagacgttcggatccaaggatgatgataagatggtattcaaaacagcttgggtgggcagtctgagcatgggaatgattttcttttgctgtcccattgtgagtgtgtttaccgacctgttcggttgccgcaagactgccgttgtgggcgcagccgtaggcttcgtgggcttaatgagctcaagttttgtaagctccattgagcctttatatctcacctacggcatcatatttgcatgtggttgctcctttgcttaccagcccagtctcgtcatccttggccattacttcaaaaagcgtctgggattggtaaacggcatagttactgctggctcctctgtgtttacaatcctgctgcctctactactgagggtgctcattgacagtgttggacttttctatactctaagagtcctgtgtatcttcatgttcgtcctgttcctagccggcttcacataccgccctctagccacatcaacaaaggataaggagtccggcggatcaggtagttctctgtttagcaggaaaaagttcagtcccccaaaaaatttccaattctgccacctgcagggtgattctctgtgttccgtgggatcgtggaacaccacttgcacgttctggatcctttgcgctctgtgttctctgggcgagtatgctccaagtctgatcatgaatataacaatctag

SEQ ID NO: 329811 - DNA, 621 bp, Artificial Sequence
  derived and/or modified sequence
taatgggtgggatccctcagcatgggaatgattttcttttgctgtccaattgtgagcgtgttcacagatctcttcggatgccggaagaccgcagtggtgggagctgcagtagggttcgtagggctcatgtcatcttcattcgtgagcagcatcgagccactgtatctgacttacggaatcattttcgcctgcggttgttcttttgcctaccagcccagcctagtgatcctgggtcactattttaagaaacggttagggcttgttaatggtattgtaacggctggttcaagtgtcttcaccattctgttaccactgctgctccgggtgcttattgactccgtgggcttgttttatacactacgggttctgtgcattttcatgtttgttctgttcctggcagggtttacttacagacccctggcaactagtactaaggataaagagtcaggaggtagcggcagctccttgttttcgaggaagaaattctcaccacctaaaaagattttcaactttgcaatatttaaagtgacagcatacgccgtgtgggctgtcgggatacctctggcactttttggttacttcgtcccctatgtgcacctcgtgtctatgctgctgcactag

SEQ ID NO: 329812 - DNA, 981 bp, Artificial Sequence
  derived and/or modified sequence
atggtgctctcccaagaagagccagactcagcacggggaacgtccgaggcacagccgctgggcccagcccctaccggagcagccccacccccaggacccggaccctctgacagcccggaagccgcagtcgaaaaagtagaggtagagctagccggtccagctaccgcagagccccacgagcccccagaacctccagagggcggatgggggtggctcgtcatgctagctgccatgtggtgtaatggatctgtttttggaattcagaatgcctgtggcgtcttgttcgtatccatgctggagacattcggctcgaaagatgatgacaagatggtgtttaaaaccgcatgggtgggaagtctgagtatgggaatgatcttcttctgttgtccaatagtgtccgtgttcaccgatttgttcgggtgtcgcaagaccgcagttgtcggcgcagctgtaggtttcgtggggcttatgtcctcgtcctttgtgtctagcatcgagcccttgtatctgacctacggcatcatctttgcatgtgggtgcagctttgcataccagccctcgcttgtcattcttggtcactactttaagaagcggctcggcctcgtcaatgggatcgtgaccgctggcagctccgtgtttacaatcctgctgcccctgctgctcagggtgttgatcgatagtgtgggattattttataccctgcgtgtcctgtgtatcttcatgttcgtgctgttcctggctggttttacttaccgaccgttggccaccagcaccaaagacaaggagtcagggggaagcgggagctcgctgttctccaggaagaagttctcgccaccaaaaaatttccagttctgccaccttcagggagattccctctgtagtgtcggctcctggaataccacctgtacgttctggattttatgtgctctgtgcagccttggggagtacgcaccaagtctgataatgaatattaccatttag

SEQ ID NO: 329813 - DNA, 646 bp, Artificial Sequence
  derived and/or modified sequence
catgggtaggttctctctccatggggatgattttcttttgctgcccaatagtcagcgtcttcacagacctatttggttgtcggaaaacagctgtcgtgggtgctgctgttggatttgttgggctcatgtccagttcttttgtaagttccatcgagcctctgtaccttacctatggaatcatatttgcctgcggctgctcctttgcataccagccttcattggtcattttgggacactatttcaagaagcgccttggactggtgaatggcattgtcactgctggcagcagtgtcttcacaatcctgctgcctttgctcttaagggttctgattgacagcgtgggcctcttttacacattgagggtgctctgcatcttcatgtttgttctctttctggctggctttacttaccgacctcttgctaccagtaccaaagataaagagagtggaggtagcggatcctccctcttttccaggaaaaagttcagtcctccaaaaaaaattttcaattttgccatcttcaaggtgacagcttatgcagtgtgggcagttggaataccacttgcactttttggatactttgtgccttatgttcacttggtgagtatgctccttcactgatcatgaatattactatttaataaaga

SEQ ID NO: 329814 - DNA, 1231 bp, Artificial Sequence
  derived and/or modified sequence
agtcgggggtgcggggctgtgacctagaggcttcagtgtcgatccccgaggtgttcgcgcgcgccagctgtcctcgcggccgcctgcgcgctggccgcctgcgcgctgccagcccgcccgcccgccaggggctccgccgccctcgcctcggcctcgttagcccgccaggagccccgcagctcctccgggagcccgctggtaactcgcgtccctcgcgcttctccggcgcctgaggggcccgcctcgggccatggtgctctcccaggaggagccggactccgcgcggggcacgagcgaggcgcagccgctcggccccgcgcccacgggggccgctccgccgcccggcccgggaccctcggacagccccgaggcggctgtcgagaaggtggaggtggagctggcggggccggcgaccgcggagccccatgagccccccgaaccccccgagggcggctggggctggctggtgatgctggcggccatgtggtgcaacgggtcggtgttcggcatccagaacgcttgcggggtgctcttcgtgtccatgctggaaaccttcggctccaaagacgatgacaagatggtctttaagacagcatgggtaggttctctctccatggggatgattttcttttgctgcccaatagtcagcgtcttcacagacctatttggttgtcggaaaacagctgtcgtgggtgctgctgttggatttgttgggctcatgtccagttcttttgtaagttccatcgagcctctgtaccttacctatggaatcatatttgcctgcggctgctcctttgcataccagccttcattggtcattttgggacactatttcaagaagcgccttggactggtgaatggcattgtcactgctggcagcagtgtcttcacaatcctgctgcctttgctcttaagggttctgattgacagcgtgggcctcttttacacattgagggtgctctgcatcttcatgtttgttctctttctggctggctttacttaccgacctcttgctaccagtaccaaagataaagagagtggaggtagcggatcctccctcttttccaggaaaaagttcagtcctccaaaaaattttcaattttgccatcttcaaggtgacagcttatgcagtgtgggcagttggaataccacttgcactttttggatactttgtgccttatgttcacttggtgagtatgctccttcactgatcatgaatattactatttaa

SEQ ID NO: 329815 - DNA, 621 bp, Artificial Sequence
  derived and/or modified sequence
tgatgggtgggcagcctgagcatgggcatgatcttcttctgctgccccatcgtgagcgtgttcaccgacctgttcggctgcagaaagaccgccgtggtgggcgccgccgtgggcttcgtgggcctgatgagcagcagcttcgtgagcagcatcgagcccctgtacctgacctacggcatcatcttcgcctgcggctgcagcttcgcctaccagcccagcctggtgatcctgggccactacttcaagaagagactgggcctggtgaacggcatcgtgaccgccggcagcagcgtgttcaccatcctgctgcccctgctgctgagagtgctgatcgacagcgtgggcctgttctacaccctgagagtgctgtgcatcttcatgttcgtgctgttcctggccggcttcacctacagacccctggccaccagcaccaaggacaaggagagcggcggcagcggcagcagcctgttcagcagaaagaagttcagcccccccaagaagatcttcaacttcgccatcttcaaggtgaccgcctacgccgtgtgggccgtgggcatccccctggccctgttcggctacttcgtgccctacgtgcacctggtgagcatgctgctgcactag

SEQ ID NO: 329816 - DNA, 981 bp, Artificial Sequence
  derived and/or modified sequence
atggtgctgagccaggaggagcccgacagcgccagaggcaccagcgaggcccagcccctgggccccgcccccaccggcgccgcccccccccccggccccggccccagcgacagccccgaggccgccgtggagaaggtggaggtggagctggccggccccgccaccgccgagccccacgagccccccgagccccccgagggcggctggggctggctggtgatgctggccgccatgtggtgcaacggcagcgtgttcggcatccagaacgcctgcggcgtgctgttcgtgagcatgctggagaccttcggcagcaaggacgacgacaagatggtgttcaagaccgcctgggtgggcagcctgagcatgggcatgatcttcttctgctgccccatcgtgagcgtgttcaccgacctgttcggctgcagaaagaccgccgtggtgggcgccgccgtgggcttcgtgggcctgatgagcagcagcttcgtgagcagcatcgagcccctgtacctgacctacggcatcatcttcgcctgcggctgcagcttcgcctaccagcccagcctggtgatcctgggccactacttcaagaagagactgggcctggtgaacggcatcgtgaccgccggcagcagcgtgttcaccatcctgctgcccctgctgctgagagtgctgatcgacagcgtgggcctgttctacaccctgagagtgctgtgcatcttcatgttcgtgctgttcctggccggcttcacctacagacccctggccaccagcaccaaggacaaggagagcggcggcagcggcagcagcctgttcagcagaaagaagttcagcccccccaagaacttccagttctgccacctgcagggcgacagcctgtgcagcgtgggcagctggaacaccacctgcaccttctggatcctgtgcgccctgtgcagcctgggcgagtacgcccccagcctgatcatgaacatcaccatctag

SEQ ID NO: 329817 - protein, 328 aa, Artificial Sequence
  derived and/or modified sequence
MKTCWKIPVFFFVCSFLEPWASAAVKRRPRFPVNSNSNGGNELCPKIRIGQDDLPGFDLISQFQVDKAASRRAIQRVVGSATLQVAYKLGNNVDFRIPTRNLYPSGLPEEYSFLTTFRMTGSTLKKNWNIWQIQDSSGKEQVGIKINGQTQSVVFSYKGLDGSLQTAAFSNLSSLFDSQWHKIMIGVERSSATLFVDCNRIESLPIKPRGPIDIDGFAVLGKLADNPQVSVPFELQWMLIHCDPLRPRRETCHELPARITPSQTTDERGPPGEQGPPGPPGPPGVPGIDGIDGDRGPKGPPGPPGPAGEPGKPGAPGKPGTPGADTSP

SEQ ID NO: 329818 - protein, 680 aa, Artificial Sequence
  derived and/or modified sequence
MLPQIPFLLLVSLNLVHGVFYAERYQMPTGIKGPLPNTKTQFFIPYTIKSKGIAVRGEQGTPGPPGPAGPRGHPGPSGPPGKPGYGSPGLQGEPGLPGPPGPSAVGKPGVPGLPGKPGERGPYGPKGDVGPAGLPGPRGPPGPPGIPGPAGISVPGKPGQQGPTGAPGPRGFPGEKGAPGVPGMNGQKGEMGYGAPGRPGERGLPGPQGPTGPSGPPGVGKRGENGVPGQPGIKGDRGFPGEMGPIGPPGPQGPPGERGPEGIGKPGAAGAPGQPGIPGTKGLPGAPGIAGPPGPPGFGKPGLPGLKGERGPAGLPGGPGAKGEQGPAGLPGKPGLTGPPGNMGPQGPKGIPGSHGLPGPKGETGPAGPAGYPGAKGERGSPGSDGKPGYPGKPGLDGPKGNPGLPGPKGDPGVGGPPGLPGPVGPAGAKGMPGHNGEAGPRGAPGIPGTRGPIGPPGIPGFPGSKGDPGSPGPPGPAGIATKGLNGPTGPPGPPGPRGHSGEPGLPGPPGPPGPPGQAVMPEGFIKAGQRPSLSGTPLVSANQGVTGMPVSAFTVILSKAYPAIGTPIPFDKILYNRQQHYDPRTGIFTCQIPGIYYFSYHVHVKGTHVWVGLYKNGTPVMYTYDEYTKGYLDQASGSAIIDLTENDQVWLQLPNAESNGLYSSEYVHSSFSGFLVAPM

SEQ ID NO: 329819 - protein, 51 aa, Artificial Sequence
  derived and/or modified sequence
MLPQIPFLLLVSLNLVHGVFYAERYQMPTGIKGPLPNTKTQFFIPYTIKSK

SEQ ID NO: 329820 - protein, 216 aa, Artificial Sequence
  derived and/or modified sequence
MLPQIPFLLLVSLNLVHGVFYAERYQMPTGIKGPLPNTKTQFFIPYTIKSKGIAVRGEQGTPGPPGPAGPRGHPGPSGPPGKPGYGSPGLQGEPGLPGPPGPSAVGKPGVPGLPGKPGERGPYGPKGDVGPAGLPGPRGPPGPPGIPGPAGISVPGKPGQQGPTGAPGPRGFPGEKGAPGVPGMNGQKGEMGYGAPGRPGERGLPGPQGPTGPSGP

SEQ ID NO: 329821 - DNA, 174 bp, Artificial Sequence
  derived and/or modified sequence
atgtggaagcccatgcccagccccagcaacatgaaggccagcgctgccctgctgtgcctgctgctgacagctgctgccttcagcccccagggcctggcccagcctgccagccggcccaactggaccaggagatctgtgctgaccccccacaggagcggcagcaggaccctgtag

SEQ ID NO: 329822 - DNA, 2043 bp, Artificial Sequence
  derived and/or modified sequence
atgctgccccagatccccttcctgctgctggtgagcctgaacctggtgcacggcgtgttctacgccgagagataccagatgcccaccggcatcaagggccccctgcccaacaccaagacccagttcttcatcccctacaccatcaagagcaagggcatcgccgtgagaggcgagcagggcacccccggcccccccggccccgccggccccagaggccaccccggccccagcggcccccccggcaagcccggctacggcagccccggcctgcagggcgagcccggcctgcccggcccccccggccccagcgccgtgggcaagcccggcgtgcccggcctgcccggcaagcccggcgagagaggcccctacggccccaagggcgacgtgggccccgccggcctgcccggccccagaggcccccccggcccccccggcatccccggccccgccggcatcagcgtgcccggcaagcccggccagcagggccccaccggcgcccccggccccagaggcttccccggcgagaagggcgcccccggcgtgcccggcatgaacggccagaagggcgagatgggctacggcgcccccggcagacccggcgagagaggcctgcccggcccccagggccccaccggccccagcggcccccccggcgtgggcaagagaggcgagaacggcgtgcccggccagcccggcatcaagggcgacagaggcttccccggcgagatgggccccatcggcccccccggcccccagggcccccccggcgagagaggccccgagggcatcggcaagcccggcgccgccggcgcccccggccagcccggcatccccggcaccaagggcctgcccggcgcccccggcatcgccggcccccccggcccccccggcttcggcaagcccggcctgcccggcctgaagggcgagagaggccccgccggcctgcccggcggccccggcgccaagggcgagcagggccccgccggcctgcccggcaagcccggcctgaccggcccccccggcaacatgggcccccagggccccaagggcatccccggcagccacggcctgcccggccccaagggcgagaccggccccgccggccccgccggctaccccggcgccaagggcgagagaggcagccccggcagcgacggcaagcccggctaccccggcaagcccggcctggacggccccaagggcaaccccggcctgcccggccccaagggcgaccccggcgtgggcggcccccccggcctgcccggccccgtgggccccgccggcgccaagggcatgcccggccacaacggcgaggccggccccagaggcgcccccggcatccccggcaccagaggccccatcggcccccccggcatccccggcttccccggcagcaagggcgaccccggcagccccggcccccccggccccgccggcatcgccaccaagggcctgaacggccccaccggcccccccggcccccccggccccagaggccacagcggcgagcccggcctgcccggcccccccggcccccccggcccccccggccaggccgtgatgcccgagggcttcatcaaggccggccagagacccagcctgagcggcacccccctggtgagcgccaaccagggcgtgaccggcatgcccgtgagcgccttcaccgtgatcctgagcaaggcctaccccgccatcggcacccccatccccttcgacaagatcctgtacaacagacagcagcactacgaccccagaaccggcatcttcacctgccagatccccggcatctactacttcagctaccacgtgcacgtgaagggcacccacgtgtgggtgggcctgtacaagaacggcacccccgtgatgtacacctacgacgagtacaccaagggctacctggaccaggccagcggcagcgccatcatcgacctgaccgagaacgaccaggtgtggctgcagctgcccaacgccgagagcaacggcctgtacagcagcgagtacgtgcacagcagcttcagcggcttcctggtggcccccatgtag

SEQ ID NO: 329823 - DNA, 156 bp, Artificial Sequence
  derived and/or modified sequence
atgctgccccagatccccttcctgctgctggtgagcctgaacctggtgcacggcgtgttctacgccgagagataccagatgcccaccggcatcaagggccccctgcccaacaccaagacccagttcttcatcccctacaccatcaagagcaagtag

SEQ ID NO: 329824 - DNA, 651 bp, Artificial Sequence
  derived and/or modified sequence
atgctgccccagatccccttcctgctgctggtgagcctgaacctggtgcacggcgtgttctacgccgagagataccagatgcccaccggcatcaagggccccctgcccaacaccaagacccagttcttcatcccctacaccatcaagagcaagggcatcgccgtgagaggcgagcagggcacccccggcccccccggccccgccggccccagaggccaccccggccccagcggcccccccggcaagcccggctacggcagccccggcctgcagggcgagcccggcctgcccggcccccccggccccagcgccgtgggcaagcccggcgtgcccggcctgcccggcaagcccggcgagagaggcccctacggccccaagggcgacgtgggccccgccggcctgcccggccccagaggcccccccggcccccccggcatccccggccccgccggcatcagcgtgcccggcaagcccggccagcagggccccaccggcgcccccggccccagaggcttccccggcgagaagggcgcccccggcgtgcccggcatgaacggccagaagggcgagatgggctacggcgcccccggcagacccggcgagagaggcctgcccggcccccagggccccaccggccccagcggcccctag

SEQ ID NO: 329825 - DNA, 2043 bp, Artificial Sequence
  derived and/or modified sequence
atgctaccacagatcccttttcttctcctggtgtccttaaacctggtccatggggtgttctatgcagaaaggtatcaaatgcctacggggataaaaggccccttacccaatacgaagacacaattctttattccatataccattaaatctaagggaatcgccgttcgaggggaacaaggcacacctggacccccgggaccagccggcccccggggacaccctggcccctctggacctcccggtaaacccggatacgggtctcctggcctacagggggaacctggattgccaggtcctcccggcccgagtgcagttggcaaaccaggggtgccggggctgccaggaaagccaggagaacgcggcccttatggacccaagggggacgttggccctgcagggttacctggcccgcgcggccctcccggtccacccggcatcccaggtcccgcgggaatttccgtgcccggaaaacctggccagcagggcccgacaggggccccagggccacgagggtttccaggggagaagggtgctcccggcgtccctggcatgaatgggcagaagggtgagatgggctacggcgcccctggacgtcccggtgaaagggggctgcctgggccacaagggcccacaggcccctcgggcccacccggagtcggaaaaagaggagagaacggcgttccgggccagcccggcattaagggagacaggggattccctggtgagatgggaccaatcgggccacctgggccccaggggccgccaggggagcggggcccagagggtatcgggaaacccggagccgcgggagcccccggacaacccggaatccctgggacaaaggggttgcccggcgcccccggaatcgcgggccctcccggaccccccggctttggaaaacccggactgcccggtttgaagggcgaaaggggccctgccgggctgcctggcggtcctggagctaaaggagagcaaggtcccgccggactccccggaaagccgggccttacaggaccgcccggcaatatggggcctcaggggccaaaggggattcccggatctcatgggttgcccggaccaaagggggaaactgggcccgccggccccgctgggtacccaggcgccaagggagaacgcggcagtcctggctcggatgggaagcccgggtacccagggaagcctggcctcgatgggcctaagggcaaccccggactgcccgggccaaagggcgatcccggggtgggcggcccacctggattaccaggtcctgtaggcccggcaggggccaaggggatgccaggacacaacggcgaggctggcccaaggggggcacctggcattccagggaccaggggcccgattggcccaccaggtattccagggttcccgggctctaagggggaccctggtagtccgggacctccaggcccagcaggcatcgccactaaaggtctgaatggaccaactgggcctcctggcccacccggcccccgcgggcactctggcgagcccggtctgcctgggccccctggaccaccaggcccacctgggcaggctgtcatgcccgagggcttcatcaaagccggccagaggccttctctgagcgggaccccactggtctctgccaaccaaggcgtgacgggcatgccagtgagtgcatttaccgttatcctctctaaggcataccccgccatcggtacacccatcccgtttgacaagatactctacaaccgacaacagcactatgacccgaggacaggaattttcacatgtcagataccaggtatttattactttagttaccatgtacacgtaaaaggtactcacgtctgggttggactgtacaagaatggtaccccagtgatgtacacgtatgacgagtataccaagggataccttgatcaggcatcaggttccgctattattgaccttaccgagaacgaccaggtctggctgcaactgcctaatgccgagagcaacggtttgtactcatctgaatatgttcactcatctttttctggatttttggttgctcccatgtag

SEQ ID NO: 329826 - DNA, 2043 bp, Artificial Sequence
  derived and/or modified sequence
atgctgccacagattcctttcctgcttcttgtgagtttgaatttggtgcacggagtattctatgctgaacgctatcagatgccaacagggataaagggtccgcttccgaacactaagacgcagttcttcattccctacacaatcaaatccaagggcattgctgtccggggagaacagggcactcctggccctccgggacccgctggccctcgagggcatccgggtccgtccgggcccccgggaaaacccgggtacgggtcacccggtctgcaaggcgagcccgggttacccggaccaccggggccatccgctgttggcaagcccggggtccctggtttaccaggcaaacctggcgaacggggaccttacggccctaagggtgatgtcggtcctgccgggcttccaggacctaggggcccaccaggtccgcctggcattcccgggcccgccgggatatcagtgccagggaagcctggacagcagggacctacaggggccccagggccgaggggcttccccggcgaaaagggcgcccccggcgtgcccgggatgaatggacagaagggcgagatggggtacggagcgcctggtagacctggcgagagaggccttcccggccctcagggaccaacgggcccctccgggcctccaggggtcggcaagcggggcgaaaatggggtgcccgggcagcctgggatcaagggggaccggggattcccgggggaaatgggaccaatcggacccccaggtcctcaggggcctcccggtgagagaggacccgagggcataggaaaacctggggctgccggcgcccccggccaacctggtattcctggcactaaggggctcccaggcgcgccgggaatagccggtccccctggccctcctggcttcggcaaacctggtttgcccgggctgaagggcgaacgagggccagccggcctgcctggcggacccggtgctaaaggagagcaaggaccagctggcctaccaggtaagccaggccttactgggccccccggcaacatgggcccgcaggggccaaagggaatcccaggtagccacggtcttcctggaccaaagggagagactggtcctgccggaccggccgggtaccctggagccaaaggtgaaagaggatcccctggaagcgatggtaaaccggggtatccaggaaaacccggcctggatggacccaaggggaacccgggcctgcctggacccaaaggcgatcccggagtcgggggacctcccggcctccctgggcctgtggggcctgccggcgctaaaggtatgcccgggcataatggcgaggccggcccgcgtggcgcccctggaattccgggaactcggggacctatcggaccacctggaatccccggtttcccaggtagcaaaggcgaccctggctctccaggacctccgggacccgccggcattgcaaccaagggattgaacggtcccacaggaccaccaggccctcctggaccaagagggcatagcggtgagccaggactcccggggccccctggaccccctggccccccaggccaggccgttatgccggaggggttcatcaaggctgggcagaggccatctcttagtggcacccccttagtgagcgccaaccagggggtgaccggtatgcctgtttccgctttcaccgtgatcttgtccaaagcttatccagctataggcacacctattccattcgataagatcctgtacaacagacagcagcactacgacccgagaactgggattttcacatgtcagattccaggcatctattacttcagttatcatgtacatgtgaaaggaacgcacgtatgggtgggcctctataaaaacggcactcctgtgatgtacacctatgatgagtatacaaaagggtaccttgatcaggcctccggctctgcgatcattgacctgaccgagaatgaccaggtgtggctgcagctgcccaatgcggagtccaatggactatatagcagcgaatatgttcacagttcttttagcggatttctggtggcccctatgtag

SEQ ID NO: 329827 - DNA, 156 bp, Artificial Sequence
  derived and/or modified sequence
atgttgccccagattccctttctgcttttggtgagtttaaatctcgtgcacggcgtgttctacgctgagaggtatcaaatgccgaccggaattaagggccctctccccaacaccaagacacaattctttatcccatacacaattaagtccaaatag

SEQ ID NO: 329828 - DNA, 651 bp, Artificial Sequence
  derived and/or modified sequence
atgctgccgcagattcctttcctcttgctggtaagcctgaacctcgtgcatggcgtattctatgccgagagatatcagatgccaactggtatcaaggggcccctgcctaataccaaaacacagttcttcatcccttacactatcaagagtaaagggatagcggttagaggggagcagggcacccctggacctccgggcccagctgggccacgcggccacccaggtccctcaggaccccccgggaaacctggatacggctctccagggctacagggtgagccgggcctcccggggcctccaggaccttctgctgtgggcaaaccgggtgttccggggttgccaggcaaacctggagaacggggaccttacggacccaagggagacgtaggccccgccggactcccaggaccacgtggtcctcctggcccccccggcatacctggaccagccggaatcagcgttccaggaaagcccggccaacaggggcccactggagctccaggcccgcggggctttcctggggaaaaaggagcacctggagtccctggaatgaacggccaaaagggagagatggggtacggggcccccggacgtcctggcgaacggggactgcccgggccgcaagggcccactggtccctcgggaccttag

SEQ ID NO: 329829 - DNA, 2043 bp, Artificial Sequence
  derived and/or modified sequence
atgctgccccagatccccttcctgctgctggtgtccctgaacctggtgcatggagtcttctacgccgagcgctaccagatgcccaccggcatcaagggccccctgcccaacaccaagacccagttcttcatcccctacaccatcaagagcaaaggaattgctgtgcggggggagcagggcaccccaggccccccaggccctgctggcccccggggccaccctggccccagcggccccccaggcaagccaggctacggcagccctggcctgcagggcgagcccggcctgcccggccccccaggccccagcgctgtgggcaagccaggagtgcccggcctgcccgggaagccaggagagcggggcccctacggccccaagggagatgtgggccctgctggcctgcccggcccccggggccccccaggccccccaggcatccctggccctgctggcatctctgtgcctgggaagccaggccagcagggccccaccggggcccctggcccccggggcttccctggagagaagggggcccctggggtgcccggcatgaatggccagaagggggagatgggctatggagcccctggccggcctggagagcggggcctgcccggcccccagggccccaccggccccagcggccccccaggagtgggcaagagaggagaaaatggagtgcccggccagcccggcatcaagggggaccggggcttccctggagagatgggccccatcggccccccaggcccccagggccccccaggagagcggggccctgagggcatcggcaagccaggagctgctggggcccctggccagcccggcatccctggcaccaagggcctgcccggggcccctggcattgctggccccccaggccccccaggctttgggaagccaggcctgcccggcctgaagggggagcggggccctgctggcctgcccggcggccctggggccaagggggagcagggccctgctggcctgcccgggaagccaggcctgactggacctcctggcaacatgggcccccagggccccaagggcatccctggcagccacggcctgcccggccccaagggggagaccggccctgctggccctgctggctacccaggggccaagggggagcggggcagccctggcagtgatggcaagccaggctacccaggcaagccaggcctggatggccccaagggcaaccctggcctgcccggccccaagggggaccccggggtgggcggccccccaggcctgcccggccctgtgggccctgctggggccaagggcatgcctggccacaacggggaggccggccccaggggggcccctggcatccctggcacccggggccccatcggccccccaggcatccctggcttccctggcagcaagggggaccccggcagccctggccccccaggccctgctggcatcgccaccaagggcctgaatggccccactggacctcctggccccccaggcccccggggccacagcggggagcccggcctgcccggccccccaggccccccaggccccccaggccaggccgtgatgcctgagggcttcatcaaggccggccagaggcccagcctgagcggcacccccctggtgtctgccaaccagggcgtgacaggcatgcctgtgtctgccttcaccgtcatcctgagcaaggcctacccagccatcggcacccccatcccctttgacaagatcctgtacaaccggcagcagcactatgaccccaggacaggcatcttcacctgccagatccctggcatctactacttctcctaccacgtgcacgtgaagggcacccacgtgtgggtgggcctgtacaagaatggcacccctgtgatgtacacctatgatgagtacaccaagggctacctggaccaggccagcggcagcgccatcatcgacctgacagaaaatgaccaggtgtggctgcagctgcccaatgctgagagcaatggcctgtacagcagtgaatatgtgcacagcagcttcagcggcttcctggtggcccccatgtag

SEQ ID NO: 329830 - DNA, 156 bp, Artificial Sequence
  derived and/or modified sequence
atgctgccccagatccccttcctgctgctggtgtccctgaacctggtgcatggagtcttctacgccgagcgctaccagatgcccaccggcatcaagggccccctgcccaacaccaagacccagttcttcatcccctacaccatcaagagcaagtag

SEQ ID NO: 329831 - DNA, 651 bp, Artificial Sequence
  derived and/or modified sequence
atgctgccccagatccccttcctgctgctggtgtccctgaacctggtgcatggagtcttctacgccgagcgctaccagatgcccaccggcatcaagggccccctgcccaacaccaagacccagttcttcatcccctacaccatcaagagcaaaggaattgctgtgcggggggagcagggcaccccaggccccccaggccctgctggcccccggggccaccctggccccagcggccccccaggcaagccaggctacggcagccctggcctgcagggcgagcccggcctgcccggccccccaggccccagcgctgtgggcaagccaggagtgcccggcctgcccgggaagccaggagagcggggcccctacggccccaagggagatgtgggccctgctggcctgcccggcccccggggccccccaggccccccaggcatccctggccctgctggcatctctgtgcctgggaagccaggccagcagggccccaccggggcccctggcccccggggcttccctggagagaagggggcccctggggtgcccggcatgaatggccagaagggggagatgggctatggagcccctggccggcctggagagcggggcctgcccggcccccagggccccaccggccccagcggcccctag

SEQ ID NO: 329832 - DNA, 3289 bp, Artificial Sequence
  derived and/or modified sequence
caccttctgcactgctcatctgggcagaggaagcttcagaaagctgccaaggcaccatctccaggaactcccagcacgcagaatccatctgagaatatgctgccacaaataccctttttgctgctagtatccttgaacttggttcatggagtgttttacgctgaacgataccaaatgcccacaggcataaaaggcccactacccaacaccaagacacagttcttcattccctacaccataaagagtaaaggtatagcagtaagaggagagcaaggtactcctggtccaccaggccctgctggacctcgagggcacccaggtccttctggaccaccaggaaaaccaggctacggaagtcctggactccaaggagagccagggttgccaggaccaccgggaccatcagctgtagggaaaccaggtgtgccaggactcccaggaaaaccaggagagagaggaccatatggaccaaaaggagatgttggaccagctggcctaccaggaccccggggcccaccaggaccacctggaatccctggaccggctggaatttctgtgccaggaaaacctggacaacagggacccacaggagccccaggacccaggggctttcctggagaaaagggtgcaccaggagtccctggtatgaatggacagaaaggggaaatgggatatggtgctcctggtcgtccaggtgagaggggtcttccaggccctcagggtcccacaggaccatctggccctcctggagtgggaaaaagaggtgaaaatggggttccaggacagccaggcatcaaaggtgatagaggttttccgggagaaatgggaccaattggcccaccaggtccccaaggccctcctggggaacgagggccagaaggcattggaaagccaggagctgctggagccccaggccagccagggattccaggaacaaaaggtctccctggggctccaggaatagctgggcccccagggcctcctggctttgggaaaccaggcttgccaggcctgaagggagaaagaggacctgctggccttcctgggggtccaggtgccaaaggggaacaagggccagcaggtcttcctgggaagccaggtctgactggaccccctgggaatatgggaccccaaggaccaaaaggcatcccgggtagccatggtctcccaggccctaaaggtgagacagggccagctgggcctgcaggataccctggggctaagggtgaaaggggttcccctgggtcagatggaaaaccagggtacccaggaaaaccaggtctcgatggtcctaagggtaacccagggttaccaggtccaaaaggtgatcctggagttggaggacctcctggtctcccaggccctgtgggcccagcaggagcaaagggaatgcccggacacaatggagaggctggcccaagaggtgcccctggaataccaggtactagaggccctattgggccaccaggcattccaggattccctgggtctaaaggggatccaggaagtcccggtcctcctggcccagctggcatagcaactaagggcctcaatggacccaccgggccaccagggcctccaggtccaagaggccactctggagagcctggtcttccagggccccctgggcctccaggcccaccaggtcaagcagtcatgcctgagggttttataaaggcaggccaaaggcccagtctttctgggacccctcttgttagtgccaaccagggggtaacaggaatgcctgtgtctgcttttactgttattctctccaaagcttacccagcaataggaactcccataccatttgataaaattttgtataacaggcaacagcattatgacccaaggactggaatctttacttgtcagataccaggaatatactatttttcataccacgtgcatgtgaaagggactcatgtttgggtaggcctgtataagaatggcacccctgtaatgtacacctatgatgaatacaccaaaggctacctggatcaggcttcagggagtgccatcatcgatctcacagaaaatgaccaggtgtggctccagcttcccaatgccgagtcaaatggcctatactcctctgagtatgtccactcctctttctcaggattcctagtggctccaatgtgagtacacacagagctaatctaaatcttgtgctagaaaaagcattctctaactctaccccaccctacaaaatgcatatggaggtaggctgaaaagaatgtaatttttattttctgaaatacagatttgagctatcagaccaacaaaccttccccctgaaaagtgagcagcaacgtaaaaacgtatgtgaagcctctcttgaatttctagttagcaatcttaaggctctttaaggttttctccaatattaaaaaatatcaccaaagaagtcctgctatgttaaaaacaaacaacaaaaaacaaacaacaaaaaaaaaattaaaaaaaaaaacagaaatagagctctaagttatgtgaaatttgatttgagaaactcggcatttcctttttaaaaaagcctgtttctaactatgaatatgagaacttctaggaaacatccaggaggtatcatataactttgtagaacttaaatacttgaatattcaaatttaaaagacactgtatcccctaaaatatttctgatggtgcactactctgaggcctgtatggcccctttcatcaatatctattcaaatatacaggtgcatatatacttgttaaagctcttatataaaaaagccccaaaatattgaagttcatctgaaatgcaaggtgctttcatcaatgaaccttttcaaacttttctatgattgcagagaagctttttatatacccagcataacttggaaacaggtatctgacctattcttatttagttaacacaagtgtgattaatttgatttctttaattccttattgaatcttatgtgatatgattttctggatttacagaacattagcacatgtaccttgtgcctcccattcaagtgaagttataatttacactgagggtttcaaaattcgactagaagtggagatatattatttatttatgcactgtactgtatttttatattgctgtttaaaacttttaagctgtgcctcacttattaaagcacaaaatgttttacctactccttatttacgacgcaataaaataacatcaatagatttttaggctgaattaatttgaaagcagcaatttgctgttctcaaccattctttcaaggcttttcattgttcaaagttaataaaaaagtaggacaataaagtg

SEQ ID NO: 329833 - DNA, 3498 bp, Artificial Sequence
  derived and/or modified sequence
atcagtctgtggatgatagtcccaataaaaccatattgtaaaaatttgccctaatccgaatttcagtgtattttgaaactattagatatttcaggctatgtcaaagatcctagattatttaatacagacatccaatcctaatttctgtttcttttcctttaggtaaatcattttattttcacttgattacctgagtatagcttccaaaaataactaagacatatattcacataactaaaaaatgatctctcatttatttatggcacatattaaaaatatataggataggttaaaaaagtagataactgtataaagaactcatctgtgaaacatgagaataaaaaaataggttaataacaatgctgtataaagttattcttttctgtttttcagaatccatctgagaatatgctgccacaaataccctttttgctgctagtatccttgaacttggttcatggagtgttttacgctgaacgataccaaatgcccacaggcataaaaggcccactacccaacaccaagacacagttcttcattccctacaccataaagagtaaaggtatagcagtaagaggagagcaaggtactcctggtccaccaggccctgctggacctcgagggcacccaggtccttctggaccaccaggaaaaccaggctacggaagtcctggactccaaggagagccagggttgccaggaccaccgggaccatcagctgtagggaaaccaggtgtgccaggactcccaggaaaaccaggagagagaggaccatatggaccaaaaggagatgttggaccagctggcctaccaggaccccggggcccaccaggaccacctggaatccctggaccggctggaatttctgtgccaggaaaacctggacaacagggacccacaggagccccaggacccaggggctttcctggagaaaagggtgcaccaggagtccctggtatgaatggacagaaaggggaaatgggatatggtgctcctggtcgtccaggtgagaggggtcttccaggccctcagggtcccacaggaccatctggccctcctggagtgggaaaaagaggtgaaaatggggttccaggacagccaggcatcaaaggtgatagaggttttccgggagaaatgggaccaattggcccaccaggtccccaaggccctcctggggaacgagggccagaaggcattggaaagccaggagctgctggagccccaggccagccagggattccaggaacaaaaggtctccctggggctccaggaatagctgggcccccagggcctcctggctttgggaaaccaggcttgccaggcctgaagggagaaagaggacctgctggccttcctgggggtccaggtgccaaaggggaacaagggccagcaggtcttcctgggaagccaggtctgactggaccccctgggaatatgggaccccaaggaccaaaaggcatcccgggtagccatggtctcccaggccctaaaggtgagacagggccagctgggcctgcaggataccctggggctaagggtgaaaggggttcccctgggtcagatggaaaaccagggtacccaggaaaaccaggtctcgatggtcctaagggtaacccagggttaccaggtccaaaaggtgatcctggagttggaggacctcctggtctcccaggccctgtgggcccagcaggagcaaagggaatgcccggacacaatggagaggctggcccaagaggtgcccctggaataccaggtactagaggccctattgggccaccaggcattccaggattccctgggtctaaaggggatccaggaagtcccggtcctcctggcccagctggcatagcaactaagggcctcaatggacccaccgggccaccagggcctccaggtccaagaggccactctggagagcctggtcttccagggccccctgggcctccaggcccaccaggtcaagcagtcatgcctgagggttttataaaggcaggccaaaggcccagtctttctgggacccctcttgttagtgccaaccagggggtaacaggaatgcctgtgtctgcttttactgttattctctccaaagcttacccagcaataggaactcccataccatttgataaaattttgtataacaggcaacagcattatgacccaaggactggaatctttacttgtcagataccaggaatatactatttttcataccacgtgcatgtgaaagggactcatgtttgggtaggcctgtataagaatggcacccctgtaatgtacacctatgatgaatacaccaaaggctacctggatcaggcttcagggagtgccatcatcgatctcacagaaaatgaccaggtgtggctccagcttcccaatgccgagtcaaatggcctatactcctctgagtatgtccactcctctttctcaggattcctagtggctccaatgtgagtacacacagagctaatctaaatcttgtgctagaaaaagcattctctaactctaccccaccctacaaaatgcatatggaggtaggctgaaaagaatgtaatttttattttctgaaatacagatttgagctatcagaccaacaaaccttccccctgaaaagtgagcagcaacgtaaaaacgtatgtgaagcctctcttgaatttctagttagcaatcttaaggctctttaaggttttctccaatattaaaaaatatcaccaaagaagtcctgctatgttaaaaacaaacaacaaaaaacaaacaacaaaaaaaaaattaaaaaaaaaaacagaaatagagctctaagttatgtgaaatttgatttgagaaactcggcatttcctttttaaaaaagcctgtttctaactatgaatatgagaacttctaggaaacatccaggaggtatcatataactttgtagaacttaaatacttgaatattcaaatttaaaagacactgtatcccctaaaatatttctgatggtgcactactctgaggcctgtatggcccctttcatcaatatctattcaaatatacaggtgcatatatacttgttaaagctcttatataaaaaagccccaaaatattgaagttcatctgaaatgcaaggtgctttcatcaatgaaccttttcaaacttttctatgattgcagagaagctttttatatacccagcataacttggaaacaggtatctgacctattcttatttagttaacacaagtgtgattaatttgatttctttaattccttattgaatcttatgtgatatgattttctggatttacagaacattagcacatgtaccttgtgcctcccattcaagtgaagttataatttacactgagggtttcaaaattcgactagaagtggagatatattatttatttatgcactgtactgtatttttatattgctgtttaaaacttttaagctgtgcctcacttattaaagcacaaaatgttttacctactccttatttacgacgcaataaaataacatcaataga

SEQ ID NO: 329834 - DNA, 303 bp, Artificial Sequence
  derived and/or modified sequence
gtttttacccctcctgggatcaccactgacagcatccatgaagttctgacagaagaacacaccaggatgacaaagtagtgacttttaaagagcagccaacaacaagcatatagggaatctctcagcaaatacagaatccatctgagaatatgctgccacaaataccctttttgctgctagtatccttgaacttggttcatggagtgttttacgctgaacgataccaaatgcccacaggcataaaaggcccactacccaacaccaagacacagttcttcattccctacaccataaagagtaaag

SEQ ID NO: 329835 - DNA, 732 bp, Artificial Sequence
  derived and/or modified sequence
gctcatctgggcagaggaagcttcagaaagctgccaaggcaccatctccaggaactcccagcacgcagaatccatctgagaatatgctgccacaaataccctttttgctgctagtatccttgaacttggttcatggagtgttttacgctgaacgataccaaatgcccacaggcataaaaggcccactacccaacaccaagacacagttcttcattccctacaccataaagagtaaaggtatagcagtaagaggagagcaaggtactcctggtccaccaggccctgctggacctcgagggcacccaggtccttctggaccaccaggaaaaccaggctacggaagtcctggactccaaggagagccagggttgccaggaccaccgggaccatcagctgtagggaaaccaggtgtgccaggactcccaggaaaaccaggagagagaggaccatatggaccaaaaggagatgttggaccagctggcctaccaggaccccggggcccaccaggaccacctggaatccctggaccggctggaatttctgtgccaggaaaacctggacaacagggacccacaggagccccaggacccaggggctttcctggagaaaagggtgcaccaggagtccctggtatgaatggacagaaaggggaaatgggatatggtgctcctggtcgtccaggtgagaggggtcttccaggccctcagggtcccacaggaccatctggccctc

SEQ ID NO: 329836 - DNA, 2043 bp, Artificial Sequence
  derived and/or modified sequence
atgctgccccagatccccttcctgctgctggtgagcctgaacctggtgcacggagttttctacgcagaacgataccaaatgccaaccggcatcaaaggtcctctgcctaataccaaaactcaattttttatcccgtatactatcaaatccaagggcatagctgtcaggggagagcaaggcactcctggacccccgggccccgccggccccaggggacaccctggcccctctggaccacctggaaagcctggttatgggtcacccgggctgcagggggagccaggccttccgggccccccgggcccctccgccgtgggcaagccgggtgtgcctggcctgccaggcaagcccggggagaggggaccctatggtcctaagggtgatgtcgggccagcaggactccctgggccacgaggccctcccggcccccctggtattccaggtcctgccggcatctctgtcccaggtaaaccaggacagcaagggcccacaggcgcccccggacctcgcggattccctggagagaaaggcgctcccggagttcccggaatgaacggccagaagggagaaatgggatacggggcccccggtagaccaggagagaggggactccccggcccacaaggtcccacaggcccgagcggacccccaggggtgggcaagagaggcgagaacggggttccaggacagcctggaattaaaggagaccgtggtttccccggagagatgggcccaataggaccccctggccctcaggggcctccgggtgagcgcggccccgaaggcatcggaaaacctggggccgctggcgcccccggccagcccggcatacctggaactaagggcctccccggggcaccaggaatagccgggccgcccggccccccgggcttcggtaagcctggtctcccaggcctcaagggagagagggggcccgcaggacttcccgggggcccaggtgcgaaaggagagcagggccccgccgggctgccaggaaaaccgggcctcaccgggccgcctggaaatatgggcccccagggtcctaaaggcattccggggtcccacggattgcctggacctaagggggaaacaggccccgcaggccctgccgggtaccctggggcgaaaggagagcgaggctcacccggaagcgacggcaagccaggctatcccggcaagcctggactggacgggccaaaaggcaatccggggttaccaggaccaaagggggatcccggcgtaggcggccctcccgggttgccaggaccagtggggcccgccggcgcgaagggaatgccaggccataatggagaagccggaccgcggggggctccaggaattcccggaacgcggggcccgatcggcccgcccggcattccaggctttcccggctccaagggcgacccggggtctccaggacccccagggcccgccggcatcgcaacgaagggcttgaatggccccaccggaccacccggtcctcccggccccagagggcactcgggggaaccagggctccctggaccgcccgggccccccggtccccctggtcaggctgtgatgccagagggcttcatcaaggccggtcagagaccttccttatccgggacacctttggtgtctgcgaaccaaggcgtaactggcatgcccgtttcagcgttcaccgtgatcctttctaaagcctacccggccattggcaccccaatccctttcgataaaatcttgtacaacaggcagcagcattacgatcccaggacgggtatcttcacctgccaaattcccggaatttattactttagctaccacgtccacgtgaagggcacacacgtctgggtgggcttatacaagaatgggacacccgtaatgtacacttatgatgagtacacaaaagggtatctagatcaggcctctggcagtgcgatcattgacctcacagagaacgaccaggtgtggctgcagttgcctaacgccgaatcaaacggactgtattcctccgaatacgtccattcaagtttttctggcttcctggtcgccccgatgtag

SEQ ID NO: 329837 - DNA, 2043 bp, Artificial Sequence
  derived and/or modified sequence
atgctgccccagatccccttcctgctgctggtgagcctgaacctggtccacggggtcttctatgccgaacgttatcaaatgcccactggaataaaggggcctctgcccaacactaagacacagtttttcattccatatacgatcaaaagcaagggaatcgccgtgagaggagaacagggaacaccagggcccccaggcccggccggcccccggggccatccaggaccatccggaccgccgggaaagcctggttatggttccccggggctccagggggaaccggggctccccggtcctccggggccatcagcagtaggtaagcctggggtgccggggctgcccggtaaacccggggagagaggtccatacggacccaagggagatgtgggcccagccgggctccctggccccagaggccccccaggacctcctggtattcccggacctgccggaatcagcgtgcccggtaagccagggcagcagggccctactggggcgccaggaccacggggattccccggcgaaaagggggcacccggagtacctggaatgaacggtcaaaaaggtgaaatgggatacggagctccaggccgccccggcgaaaggggtctaccagggcctcagggacccacgggtccctcagggccaccaggcgtcggaaagagaggtgaaaatggtgtgcccggacagcccggcattaagggggatcgaggattccccggagaaatgggccctattggaccgcccggcccccaaggtccaccaggagaaagagggcccgagggcattgggaagcccggcgctgctggcgcccctggacagcccggtatccccggaacaaagggactccccggggctccaggcatagccgggccccctggtcctccggggttcgggaagcctggcctaccggggctcaaaggcgagcgtggtcctgcaggactgcctggaggccctggtgcaaaaggcgagcaggggcccgccgggctgccagggaaacccggcctgacagggcctcctggcaatatggggccacaggggccgaagggcattccaggctctcacgggcttcctggacctaagggagagacaggtcccgcgggaccggcagggtatcctggggcaaagggagagcgaggtagtcccggatccgacggaaagcctggttaccctgggaagcccggactggatgggcccaagggaaacccaggtctgcctggccctaaaggggatcccggggtcgggggacctccaggcctgcccgggccagtgggtcccgccggggccaagggaatgcccggtcacaacggggaagctgggcccaggggcgctccaggtatccctggcaccagggggccgatcgggccgcccgggatcccaggatttccgggctctaaaggcgatcctggatcccccggccctccggggcctgctggcattgccactaagggattgaacggccctactgggccacctggccccccagggccacggggtcactcaggggagcctggcctacccggaccaccaggtcctcccggaccacccggtcaggccgtcatgcctgagggcttcattaaggccgggcagaggcctagtcttagcggcacccccctggtctcagctaaccagggtgttactggcatgcccgtatccgccttcactgtgattctatctaaggcctaccctgccatcggaacacccatcccttttgacaagattttatataatcgacagcagcactacgacccgcggacaggtatattcacgtgccagatccccggcatttactatttctcttatcatgtgcacgtgaaaggcacccatgtctgggtggggctttacaagaacggaacaccagtgatgtatacatacgatgagtataccaagggctatttggatcaggcctcagggtccgccatcatagatttaaccgagaacgaccaagtttggctccagttgcccaatgccgaatccaacgggctgtacagcagtgaatacgtgcattcatcattttctggctttctggtagctcccatgtag

SEQ ID NO: 329838 - DNA, 156 bp, Artificial Sequence
  derived and/or modified sequence
atgctgccccagatccccttcctgctgctggtgagcctgaacctggtccacggggttttttatgcagagaggtaccagatgcccaccgggattaagggtcccctacccaacaccaagacgcaattttttattccttataccattaagagcaaatag

SEQ ID NO: 329839 - DNA, 651 bp, Artificial Sequence
  derived and/or modified sequence
atgctgccccagatccccttcctgctgctggtgagcctgaacctggtgcacggcgttttctatgccgagagataccagatgccaaccgggattaagggtcctttacctaataccaagacccagttctttatcccgtataccataaagtcaaaggggatcgccgtaaggggagagcaaggcacccctgggccccctggcccagccggccctcgcggtcaccccggacctagcggcccaccaggcaagccagggtatggtagcccaggactgcagggcgagcccggattgcccggacctcccggccctagtgccgtcggtaagccaggcgttcctgggctaccggggaaaccaggagagcgaggtccatacgggccaaagggcgatgtgggtccagccggcctgccaggtccacgcggacctcctgggccgcccggcatccctggcccagctggaatttccgttccaggcaagcctgggcagcagggtccaacaggcgctcctgggcccagaggatttcccggtgagaaaggtgcacccggcgtgcctggcatgaacggccagaaaggggaaatgggatacggtgctccagggcggcctggtgagcgggggctgccagggccccagggccccactgggccatccgggccatag

SEQ ID NO: 329840 - DNA, 2043 bp, Artificial Sequence
  derived and/or modified sequence
atgttgccccaaatacccttcctgcttctcgtttcactcaatctggtccatggcgtcttctatgcagagagatatcagatgcccactggaattaaaggcccattgccaaacacaaaaacccagttctttatcccgtataccatcaagagtaagggtatagccgttcgcggagaacagggcactcccggtcccccaggcccagcaggccctcggggacacccaggtccctcgggccctcccggtaagcccggatacggcagccctggactgcagggcgagcccggactccctggtccccctgggccaagtgcagttggcaagccaggcgtccctggactgccagggaaaccgggtgagcgcggaccttatggaccgaaaggggatgttggccctgcaggattaccgggaccgcgaggaccccctggaccacctggcattcctggtccggctggtatctccgtccccggaaagccgggacaacagggtcccactggagcaccgggacccagaggattccccggagagaagggcgcacctggagtcccaggtatgaatggccagaagggggaaatgggctacggagcccctggcaggcccggtgagagaggtttgcccggtccccaggggccaactggcccatccggccctcccggagtgggtaagcgcggagaaaatggggtgccagggcaacccggtataaagggtgaccggggttttccaggcgaaatgggccctattggcccaccgggtccacagggacctcctggcgagaggggtcctgagggcataggtaagccgggagcagctggtgcaccaggccagcctgggataccagggacaaaggggctgcctggggctcctggcatcgcaggtcctcctggcccacccggtttcggaaagccgggactgccagggttgaaaggtgagaggggacctgcgggactcccaggtggcccaggagctaaaggcgagcagggtcccgctggcctgccgggaaagcctggactaaccggacctcctggtaacatgggcccacagggaccaaagggcatacctggatcgcatggacttccagggccaaagggggaaacgggacctgctggtccagctggctaccctggtgctaaaggcgaacgagggtcaccaggatcagatggcaaacctgggtatcccggaaagccaggattggatggccctaagggcaaccccggtctccctgggcctaagggcgacccgggagtggggggacctccaggacttcccggtccggtcggacctgccggagccaaggggatgccgggacataatggtgaagctggccctcgcggagcccctgggattccagggacgcgtgggccaattggccctcctggaatcccaggctttcccggttcgaagggggatccaggttctcccggtcccccaggacctgctggaattgccacaaaagggcttaatgggcctacgggaccacctggacctccaggccctcgcggtcattccggagagcctggcctccctggccctccaggccctcctggcccacccggtcaggctgtgatgcccgaaggttttattaaggcaggacaacgtccgagtctgtccggaacccctctcgtctcagctaaccaaggggtgacgggcatgccggtgtctgcctttactgtgatactctcaaaagcatacccggcaattggcaccccgatccctttcgataagattttatataataggcaacaacactatgacccccgaacgggcatctttacatgccagattcccggaatctactacttcagctaccacgtgcatgtcaagggcacccatgtctgggttggcctgtacaaaaacggcaccccagttatgtatacctacgacgagtacaccaagggctatcttgatcaagcctctggcagcgcaatcatcgatttaaccgaaaacgaccaagtatggctccagctgcctaatgcagagagcaacggactgtacagcagcgagtacgtacatagtagcttctccggttttctcgttgcccctatgtag

SEQ ID NO: 329841 - DNA, 2043 bp, Artificial Sequence
  derived and/or modified sequence
atgcttccacaaatccctttcctgctcctggtatctttgaacttagtgcatggagtcttctatgccgaaaggtatcaaatgcccaccggcattaaaggcccattgccaaacaccaaaacacagttttttattccttacacgatcaaatcaaaggggatcgccgtgagaggagagcagggcacccctggaccccctggtcctgccggacctcgtggccacccaggcccatccgggccacctggtaagcccggttacggatcccccggattgcagggcgagccagggctgcctggacccccagggcctagtgcggtggggaagcccggtgttcctgggctgcccggaaagcccggagaaaggggcccttacggaccaaagggcgatgtgggacccgctggtctgcccggtcccaggggacctcccggaccaccaggtattcccggacccgcagggatttccgtccctggaaagccaggccagcagggtcctacgggcgcaccgggtcccagaggcttcccaggtgagaagggcgctccgggagtccctgggatgaatggccagaaaggggaaatgggttatggagctccaggcagacctggcgagaggggcttgcctgggccacagggacctacaggccctagcggccctccgggtgttggcaaacgaggcgagaacggtgtgccaggccagccaggcatcaaaggcgacagaggatttcccggtgaaatggggcctattggaccacctggcccacaaggccctcctggcgaaagaggacctgaaggcattggcaagccaggcgcagccggtgcgcctggacagccgggtatcccaggcaccaagggtctacctggtgctcctggtatagcaggccctccaggcccacccggtttcggtaagcccggactgccagggctgaaaggcgagaggggccctgcaggactaccaggcggaccaggggcaaaaggcgagcaagggccagcgggactgcctggcaagccgggactcaccggaccaccagggaatatgggaccccagggccctaaaggaatacctgggtcccacggacttcctggacctaaaggcgaaacgggaccagccggacctgccggttatcctggagccaaaggtgaaagaggttcccccggatctgacggaaaacccggttatccaggtaagcccggtctcgatggacccaagggtaaccccggtctccccggtccaaaaggtgacccaggcgtcgggggtcctcctggactccccggtccagttggtcccgcaggcgcaaagggaatgcctggacacaacggagaggccggacccagaggggctccaggcatccctgggacgaggggacccatcggcccacccggaataccgggattcccaggcagcaaaggagacccaggcagccctggtcctcccggtccagccggtatcgccacaaaagggctaaacggtccgaccgggccacccggtccacctggcccacggggtcattccggagagccgggtctccccggtccaccaggtcccccagggccaccgggacaggcggttatgcccgaaggcttcattaaagctggccagaggccatccctctccggaacaccactcgtgagcgccaatcagggcgtgacggggatgcctgtgagtgcatttacagttattcttagcaaagcataccctgctataggcacacctatcccatttgacaagatattgtacaatcgccagcagcattacgatccccgaaccgggatcttcacatgccaaattcccggaatatactactttagctaccacgtccatgtcaagggcactcacgtttgggtaggtctttacaaaaacgggacacctgtgatgtatacttacgacgagtatactaaaggctacctggaccaggcatccggttccgccattatcgacttaacggaaaacgaccaggtttggctacagctaccaaacgccgagagcaatggtctctacagctctgagtatgtgcattcatctttctctggcttcctggttgcgcctatgtag

SEQ ID NO: 329842 - DNA, 156 bp, Artificial Sequence
  derived and/or modified sequence
atgctcccccaaatcccatttctgttacttgtgtccctcaacctggtccacggggttttttatgccgagcgctaccagatgcctaccggcattaagggaccactccccaacacgaagacccaattttttattccatacacgatcaagtcgaaatag

SEQ ID NO: 329843 - DNA, 651 bp, Artificial Sequence
  derived and/or modified sequence
atgctgccacagatcccttttctgctgctggtgagtctcaacttagtgcacggggtgttttatgcagagcggtaccagatgccaacaggaattaaagggcctctgcctaacaccaagacacagttttttatcccttacacaatcaagagtaaggggatcgccgtcaggggtgagcaggggacccccggacctcccggtcctgctgggccacgtggccatcctggcccaagtggtcctcctggcaaacccggttacgggagtccgggactccagggggaacccggattacccggtcccccaggcccaagcgctgtggggaaacccggtgtgcctggattacccggtaagcccggagagcgcggtccgtatggcccaaagggcgatgttggcccagcaggcttgccaggaccacgcggacctccaggtccccctggaattccaggccctgcaggaatttctgttccgggtaaacctggacaacagggaccaaccggcgctcccggacccagaggcttccccggagaaaaaggcgctccaggggttccaggtatgaacggccaaaagggagagatggggtatggcgctcccggtcgcccaggggaacggggactaccgggacctcagggcccaacggggccatctggaccatag

SEQ ID NO: 329844 - DNA, 375 bp, Artificial Sequence
  derived and/or modified sequence
atgctgcccagcaaggcctttgaatttgccaccgtgaagtccatgcacggcatcttcggctgcggcctggccctgccccctgtgtttgctgctgagctgctgtacctgacccgggcctgtgccagtgatgagcagcccttcatcacagccctgcggcccccaccccggcccccacccagcgccctgcagttcatcagccggctggtgcccatcgccacctgtggcctgggcggccccccagacatcctgagctttggcagccctgtgaccccagagctgctgcccttctggggcgcccacatctgtgacaccctggtgtgccctgtgcacttcctgcacctggagttcctgagctgcagccacatcagcatctag

SEQ ID NO: 329845 - DNA, 726 bp, Artificial Sequence
  derived and/or modified sequence
gaagaataagagctattattattctttatgtcttatccttttttttttttaaaaaaaaaaccaagtttccttctaagggaaataaacaccaaaggtaggattccaaggaaatgactcacagcggctggcagggctctggcggggctggcccgggcccccgcgctccagcccgcagcagatgtcggcccggccttccctccctcccttgccggccaaacccgctggaagcccgcggttgcgggagcgccctgcgcccgtgggacctggcggcgaggacgcctattccctgcttctgcgaccacagctgggcactcggaaagttgctagggccgaagaggcgggaggggaggaagggaagcgagaggcggaggcgtggaccaggcgggcagcagcctcagcccgccgaggagtgatcctccgactgtgaaaaaccagacctctggctgcctggctccctaggaatcaagaagacgcacagactgaaaatcaagggaggaaggaacaagatcaaggatgaggattagcatctgcaaattgaactctatctaatttgcatgtttatttcttagaattgtaattaaatttgtgtaataaatgttttccatttcatttgtacacttaaaacttgggtgactgacatgcagttaagtgaatttcctttttttaaaagcaaatgtagattattcaataaagcagcaaaccaatattaaacataattagaactaa

SEQ ID NO: 329846 - DNA, 524 bp, Artificial Sequence
  derived and/or modified sequence
gagtggtggctgggtatggaggcgaaggcggcacccaagccagctgcaagcggcgcgtgctcggtgtcggcagaggagaccgaaaagtggatggaggaggcgatgcacatggaaatatttctttaaggactcatcaaactgtgtgcaaacaaggtctgtttccatctctcccccttttatcatgacatcactagaaagcagtttatagtagtaatgtctttggagaaaataataaactacgaagtctcttccatctaggtgctttcattatctgtatctgggcaggccctgactagagaaaaaaaagaaattatattcaaggacaaaatagagaccagtgtttgggctgggaagaacagagattttattctttaattttgaaggttgatcatttgttactttatgaaaaaccttgtagccatttttaaatagtatctgatcttggtctttccccctaaaaaaggcaagaaaggttaaattcaaagctacctgcacaaatttcagacccattttgcctgagcttt

SEQ ID NO: 329847 - DNA, 3542 bp, Artificial Sequence
  derived and/or modified sequence
agtgtggctgtaccattttatattccgaccagcagtatatgagtaatatcacttctccacagccttgccagcatttgatgttgtttttacgtttcactttagtcatgctgatgggtgtgtagtgatacctcattgtggttttagttgacatttctctaccggctaatgatgtgaaaacatcttttcgtgtacttatttgctatgtgtgttatcttctttggtgaaatgtctgtcttttgccttctcatatagtttggatatttgtcgcctccaaatttcatgttgaaattgaatccctggtattagtagcagggcctggtgggaagtttggatcatggggaggatacctcataaatcatttttatagtggcaagttctcactatattattatcatgagaatataccatcccctcctttctttcttcttctcttaccatgtgatgcctgctcccattgccttctgccatgagtggaagcttcctgaggccctcactggaagcagatgctgataccatacttcttgtacagtctggagaactgccaaagaagccctcgaaaatactgaagttcctgttggctgtcttatggtctacaacaatgaagttgtagggaaggggagaaatgaagttaaccaaaccaaaaatgctactcgacatgcagaaatggtggccatcgatcaggtcctcgattggtgtcgtcaaagtggcaagagtccctctgaagtatttgaacacactgtgttgtatgtcactgtggagccgtgcattatgtgtgcagctgctctccgcctgatgaaaatcccgctggttgtatatggctgtcagaatgaacgatttggtggttgtggctctgttctaaatattgcctctgctgacctaccaaacactgggagaccatttcagtgtatccctggatatcgggctgaggaagcagtggaaatgttaaagaccttctacaaacaagaaaatccaaatgcaccaaaatcgaaagttcggaaaaaggaatgtcagaaatcttgaacatgttctgatgaaagaaccaagtgacccaaagtgacctggacaagattcatagactgaaagctgttgacatcgttgaatcatatgtttatatattgtttttaatctgcaggaaaatggtgtctctcatcatttgctctgttaagggaacaaattagcactttttagaagtctgacaattgtaaacagttattagcttttccagaagctgattcccattttaagatgggggaaaattaaggtttgaggttttagaaattagcaagtagtgcatacccttctagccacaagtgcccagtccaggcaagtgctgacttcttagagaatgtgtggccagacccagggacctggagtgtgtttggactgcagtttgccaccctgagaacaccttctccaggactggcatttcagaatcagattcttcattttttgcagctacgatgttcttccagggcactgggggctgtgacttctctctaaattgtatataagttgtgtatatagagaccataattatatggtccttagaaaagactttgcttttataaagcatttagaaaaaatgcatacttttaaaacaagtgcttgagttgtcacttaaaaattatagcatattgctataataaaaccttatttatgtcttatttgaagatgaatagtcttaaaagataaagacataaatgggacaattgttattgagcaaaaaaccaaattatcccaccctcatggagcttatattctagcaaggggagatggatatgatagattacacagtttattggaggacaataagagttatggcaaaaagcaaaaggaacacagggtaaaggggataggtgccatttggtggtgagaatgctgactgaaaaatagaatgatcaatttaatctgaaacaaatggttatttcttttataatccatataataaatttaaaatctaaaatgtaaaattttgaacacaacactggaaagggtatccacagcaggaagtccccagttcacctccatgactacagggcagctttgcacagccctctgggcgcactgtgtgcctctgcccagaagggggcctcgccgttccaccagaagctcagctccaggccctggaggggctgctgctcctcagttgcatttcttcagtagattcatttccttgatgcaaagcatctgtatttgttggttctgtcatttgagcgatgtctctgacttgtttgttttgaattacattacaggctggaatgtaattgtggtgaaagtatttttatattgctgagagtagcagctaatcacagttacatgcttcagaggacttataattgcttggttttgtgtgtgtgtgtgtgtgtgtgtgtgtgtgtgtgtgtgtttaactgcatttgaaaagttttatggagaatatgcatgattttaaatctgtgataatgttacatgcaccttcaatttcatccactttaaaaattatcttctcattgaattttagtgcttctactagtttgttcctttttgcagttggtcgtaattcatttctggcttcttatgctttcctgcaagcagatttcattgcatttattgtgttcatatcattttcttggggattatttgtaggacaaccaacctggagttttgcctctctagagtaccacccagtaagtctggctgagcatcttatgtccagtaggttcttggtaaacatttgctaaatgaaattactgattgaaatttggggaaaagtgaataagaagactatctaggacaaaaagccaaagccgaaaatagtatatgagcattctagcccagagactgtcgctactaaaagaatgaaggaaataataaagtgatagacagggaaggatagaaaagacttaacaatatacatatgttccgtctttgctgttttggagaatgatggataagtagtgtttcctgattctgaagcatagctgaacaatttaattgtggtttaccatctttttggttccctcttcagtaattaacctatcgaaaatctgtcctaaatgtttggactggggcacagttccctccatcgctttgggagaaaatcattaatatggcatactgcagattggagggcaggaccactgagggtgtcatagacattagctctatggaattctgctagcaatttccaagtgacagtgaggaattatggatatatgttgaggtcattcagcttcctgagtaccacattccccagctacttagacacgggttaaaatattaagatgtcctagttcaacagcttgaattccattgattgatactgatagtgcctgtccaagacaccagctgaaagacttgttttgtgtacaaaatagttctgaaagtggtgagatacaaaaaggttttagaatcactgccctgttgagagaaattagggggaaatgattacatttagaagctgctagagttatccagtgtttgctggtctttgcaacaaactgtggagaatgggtggtatgtaatgctttggtaggcttcaatcactgataaaagatcatgtt

SEQ ID NO: 329848 - protein, 36 aa, Artificial Sequence
  derived and/or modified sequence
MEAKAAPKPAASGACSVSAEETEKWMEEAMHMEIFL

SEQ ID NO: 329849 - DNA, 111 bp, Artificial Sequence
  derived and/or modified sequence
atggaggccaaggccgcccccaagcccgccgccagcggcgcctgcagcgtgagcgccgaggagaccgagaagtggatggaggaggccatgcacatggagatcttcctgtag

SEQ ID NO: 329850 - DNA, 111 bp, Artificial Sequence
  derived and/or modified sequence
atggaggccaaggcagctccaaagccggctgcttcaggcgcctgtagtgtgtcagccgaggaaacagagaagtggatggaagaggctatgcatatggagatattcctatag

SEQ ID NO: 329851 - DNA, 111 bp, Artificial Sequence
  derived and/or modified sequence
atggaggccaaggccgcccccaagccagctgccagcggggcctgcagcgtgtctgctgaggagacagagaagtggatggaggaggccatgcacatggagatcttcctgtag

SEQ ID NO: 329852 - DNA, 111 bp, Artificial Sequence
  derived and/or modified sequence
atggaggccaaggccgcccccaagcccgccgccagcggcgcctgcagtgttagcgctgaggaaacagagaaatggatggaagaggctatgcacatggaaattttcctgtag

SEQ ID NO: 329853 - DNA, 111 bp, Artificial Sequence
  derived and/or modified sequence
atggaagctaaggccgctcccaagcccgctgcgtctggtgcttgctcagtgagcgccgaagaaaccgagaagtggatggaagaagcaatgcatatggagatctttttgtag

SEQ ID NO: 329854 - protein, 83 aa, Artificial Sequence
  derived and/or modified sequence
MLRNLLALRQIGQRTISTASRRHFKNKVPEKQKLFQEDDEIPLYLKGGVADALLYRATMILTVGGTAYAIYELAVASFPKKQE

SEQ ID NO: 329855 - protein, 115 aa, Artificial Sequence
  derived and/or modified sequence
MHTQDSEVVPVPAWPFSLVVFSCGGCWSVTAKMLRNLLALRQIGQRTISTASRRHFKNKVPEKQKLFQEDDEIPLYLKGGVADALLYRATMILTVGGTAYAIYELAVASFPKKQE

SEQ ID NO: 329856 - DNA, 252 bp, Artificial Sequence
  derived and/or modified sequence
atgctgagaaacctgctggccctgagacagatcggccagagaaccatcagcaccgccagcagaagacacttcaagaacaaggtgcccgagaagcagaagctgttccaggaggacgacgagatccccctgtacctgaagggcggcgtggccgacgccctgctgtacagagccaccatgatcctgaccgtgggcggcaccgcctacgccatctacgagctggccgtggccagcttccccaagaagcaggagtag

SEQ ID NO: 329857 - DNA, 348 bp, Artificial Sequence
  derived and/or modified sequence
atgcacacacaagacagtgaggtggtgcctgtcccggcatggccttttagtttggtggtgttctcctgtggcggctgctggtcggtcactgcaaagatgctgcgcaatttgctggcactccggcagattgggcaacgtacaatcagtactgcgtccagaaggcactttaagaacaaggtccctgagaagcaaaaactcttccaggaagacgatgaaatccccttgtacctcaagggaggagtggccgacgcacttctctatagagccacaatgatcttaactgtcggcggaactgcttacgctatctacgagctcgctgtcgcatcatttccaaaaaagcaggagtag

SEQ ID NO: 329858 - DNA, 348 bp, Artificial Sequence
  derived and/or modified sequence
atgcacacccaagattccgaagttgtacccgtgcccgcttggcctttcagcctggtggtgtttagttgtggaggatgttggtccgttacagctaagatgttgcgcaatctgcttgccctgcgccaaattggccagagaacaatctctactgcatctagacgacactttaaaaataaggtaccagagaaacagaaacttttccaagaagatgatgagatacctttatacttgaagggcggtgtggccgatgcacttttgtatcgcgcaaccatgatcctgactgttgggggaactgcatacgcaatttacgagcttgctgtggcaagcttcccaaagaaacaggaatag

SEQ ID NO: 329859 - DNA, 252 bp, Artificial Sequence
  derived and/or modified sequence
atgttgaggaatctactggctttgcgccagataggacagcgaactatttctactgcctctcgccgccatttcaaaaataaggtgcccgaaaagcagaaactgttccaggaggatgatgaaatcccactttacctgaaaggaggggtcgccgacgcactgctgtacagagcgacgatgatcctgaccgtaggcggtactgcctatgcaatttacgagctcgccgtcgctagtttccctaagaagcaggagtag

SEQ ID NO: 329860 - DNA, 348 bp, Artificial Sequence
  derived and/or modified sequence
atgcacacccaggacagcgaggtggtgcctgtgcctgcctggcccttcagcctggtggtgttcagctgtggcggctgctggagcgtgacagccaagatgctgaggaacctgctggccctgcggcagatcggccagaggaccatcagcacagccagcagaagacacttcaagaacaaggtgcctgagaagcagaagctgttccaggaggatgatgagatccccctgtacctgaagggcggcgtggctgatgccctgctgtaccgggccaccatgatcctgactgtgggcggcacagcctatgccatctatgagctggccgtggccagcttccccaagaagcaggagtag

SEQ ID NO: 329861 - DNA, 252 bp, Artificial Sequence
  derived and/or modified sequence
atgctgaggaacctgctggccctgcggcagatcggccagaggaccatcagcacagccagcagaagacacttcaagaacaaggtgcctgagaagcagaagctgttccaggaggatgatgagatccccctgtacctgaagggcggcgtggctgatgccctgctgtaccgggccaccatgatcctgactgtgggcggcacagcctatgccatctatgagctggccgtggccagcttccccaagaagcaggagtag

SEQ ID NO: 329862 - DNA, 348 bp, Artificial Sequence
  derived and/or modified sequence
atgcacacccaggacagcgaggtggtgcccgtgcccgcctggccctttagtttggttgttttctcttgtggaggatgttggtccgtgacagcaaaaatgctcagaaatctcctggcgctccggcagattggacaacgaaccatttccacagcgtcaaggcgacacttcaagaataaagtgcccgaaaagcagaagctgttccaggaagacgatgaaatacccctgtacctgaagggcggagtggctgacgcgctgctatatcgtgctactatgattcttactgtgggtggaaccgcatacgcaatctacgaactagctgtggccagctttccgaagaagcaggaatag

SEQ ID NO: 329863 - DNA, 348 bp, Artificial Sequence
  derived and/or modified sequence
atgcacacccaggacagcgaggtggtgcccgtgcccgcctggcccttttccttggtagtttttagttgtggcggatgttggtcagtgactgctaagatgctcaggaatctgctggccttgagacagatcgggcagcgaactatttcaaccgccagccggcgacactttaagaacaaagttcctgagaaacagaaactattccaggaagatgacgaaatacccttgtatttgaaggggggggtcgccgatgctctgttgtatagagccacaatgatcctgaccgtgggtggaaccgcatacgcaatttacgagctcgccgtggcctcgtttccaaaaaaacaggagtag

SEQ ID NO: 329864 - DNA, 252 bp, Artificial Sequence
  derived and/or modified sequence
atgctgcggaacctgctggccctgcggcagatcggccagcggaccattagcactgccagccggcgacacttcaagaacaaagtccccgagaagcagaagttgtttcaagaggatgatgagatccctctctatctgaagggcggggtggccgatgccttactctacagagctacaatgattttaaccgttggaggcaccgcctacgctatttatgagcttgcagtggcaagcttccctaagaagcaggaatag

SEQ ID NO: 329865 - DNA, 348 bp, Artificial Sequence
  derived and/or modified sequence
atgcacacccaagattcggaagtagtgccagtgcctgcgtggcctttctctcttgttgtgttctcctgcggaggctgctggtccgtcacagctaagatgctccgcaatctcctcgccctccggcagattggtcaaagaaccatctcgaccgcctccagaaggcacttcaaaaacaaggtgcctgagaagcagaagttgttccaggaggacgatgaaatccctctctacctgaaggggggtgtggcagatgccctgctgtatagagcaacaatgatacttacagttggcggaaccgcgtacgcaatctacgaattagccgttgcctcctttccaaagaaacaagagtag

SEQ ID NO: 329866 - DNA, 348 bp, Artificial Sequence
  derived and/or modified sequence
atgcacacccaggacagcgaggtggtcccagttccagcgtggccatttagcctggtggtgttctcctgtgggggttgctggagcgtcacagccaagatgctcaggaatttgctggctctccgccagattggccagaggacaattagtacagccagtagacgccatttcaaaaacaaggtgcctgaaaagcagaagctctttcaggaagacgacgaaatccccctctacctcaaggggggtgtggccgacgctctgctctacagggcaaccatgattcttactgtaggaggaactgcttatgccatttacgagctggctgtcgctagctttccaaaaaagcaggaatag

SEQ ID NO: 329867 - DNA, 252 bp, Artificial Sequence
  derived and/or modified sequence
atgctgcgcaatttgctggcgcttcgccagattggccagcggactatctcgactgcatctcgcagacattttaaaaacaaagtcccagagaaacagaaactttttcaggaggatgatgagatcccattgtacctaaagggcggtgtggccgacgccctgctgtatagggccaccatgatccttacagtcggcggaaccgcctacgccatttatgagctcgccgtcgcctccttccccaagaaacaggaatag

SEQ ID NO: 329868 - DNA, 699 bp, Artificial Sequence
  derived and/or modified sequence
agagcggatagagccgtactgccgctctagtttttcttttgctctctatggttaggagcgcaagcctctcttcggcccggaaagatttaagttcgtgaatgcatacgcaagactcggaggtagttccggttccggcgtggccattttcgttggtggtgttcagttgtggcggttgctggtcagtaacagccaagatgctgcggaatctgctggctcttcgtcagattgggcagaggacgataagcactgcttcccgcaggcattttaaaaataaagttccggagaagcaaaaactgttccaggaggatgatgaaattccactgtatctaaagggtggggtagctgatgccctcctgtatagagccaccatgattcttacagttggtggaacagcatatgccatatatgagctggctgtggcttcatttcccaagaagcaggagtgacttcagtcatcccagcaatcgcttggttcagtttcattcagctctctatggaccagtaatctgataaataaccgagctcttctttggggatcaatatttattgacttgtagtaactgccaccaataaagcagtctttaccatgctttgtctgattttatcactttatgccaataatttcaacttttggtcagccttgtaaatcttaggtaaggatcaaagaaatgattcttttgccactaaacttgtgaaagc

SEQ ID NO: 329869 - DNA, 914 bp, Artificial Sequence
  derived and/or modified sequence
aagtaccttattattccattgtcttaacactgactgacttctctatcttttcttgtgccttgacatctgtcttgagctctagatttttcattattaatctcttgagaaatgaaggttaataatgaattaacctaagttagtaaggcccaagcagcaatcattccacacaagcctgggtttaataaggtcaaaacaggaataatctcacaccaacctgagatttcttacattcctcattactgtgaatggtatagccaaccaccttgaggagcgcaagcctctcttcggcccggaaagatttaagttcgtgaatgcatacgcaagactcggaggtagttccggttccggcgtggccattttcgttggtggtgttcagttgtggcggttgctggtcagtaacagccaagatgctgcggaatctgctggctcttcgtcagattgggcagaggacgataagcactgcttcccgcaggcattttaaaaataaagttccggagaagcaaaaactgttccaggaggatgatgaaattccactgtatctaaagggtggggtagctgatgccctcctgtatagagccaccatgattcttacagttggtggaacagcatatgccatatatgagctggctgtggcttcatttcccaagaagcaggagtgacttcagtcatcccagcaatcgcttggttcagtttcattcagctctctatggaccagtaatctgataaataaccgagctcttctttggggatcaatatttattgacttgtagtaactgccaccaataaagcagtctttaccatgctttgtctgattttatcactttatgccaataatttcaacttttggtcagccttgtaaatcttaggtaaggatcaaagaaatgattcttttgccactaaacttgtgaaagcaa

SEQ ID NO: 329870 - DNA, 773 bp, Artificial Sequence
  derived and/or modified sequence
cagccttagctccagggaccagcctactgaacatcgaaaaggtcaggaacgagatcacgggactgagacggcgagccggctagagcggatagagccgtactgccgctctagtttttcttttgctctctatggttaggagcgcaagcctctcttcggcccggaaagatttaagttcgtgaatgcatacgcaagactcggaggtagttccggttccggcgtggccattttcgttggtggtgttcagttgtggcggttgctggtcagtaacagccaagatgctgcggaatctgctggctcttcgtcagattgggcagaggacgataagcactgcttcccgcaggcattttaaaaataaagttccggagaagcaaaaactgttccaggaggatgatgaaattccactgtatctaaagggtggggtagctgatgccctcctgtatagagccaccatgattcttacagttggtggaacagcatatgccatatatgagctggctgtggcttcatttcccaagaagcaggagtgacttcagtcatcccagcaatcgcttggttcagtttcattcagctctctatggaccagtaatctgataaataaccgagctcttctttggggatcaatatttattgacttgtagtaactgccaccaataaagcagtctttaccatgctttgtctgattttatcactttatgccaataatttcaacttttggtcagccttgtaaatcttaggtaaggatcaaagaaatgattcttttgccactaaacttg

SEQ ID NO: 329871 - DNA, 348 bp, Artificial Sequence
  derived and/or modified sequence
atgcacacccaggacagcgaggtggtgcccgtgcccgcctggcccttcagcctggtggtgttcagctgcggcggctgctggagcgtgaccgccaagatgctgagaaacctgctggccctgagacagatcggccagagaaccatcagcaccgccagcagaagacacttcaagaacaaggtgcccgagaagcagaagctgttccaggaggacgacgagatccccctgtacctgaagggcggcgtggccgacgccctgctgtacagagccaccatgatcctgaccgtgggcggcaccgcctacgccatctacgagctggccgtggccagcttccccaagaagcaggagtag

SEQ ID NO: 329872 - protein, 279 aa, Artificial Sequence
  derived and/or modified sequence
MVDYLQKAVLLNLGTIELYGSNDPYRREPRSPRKSRQPSGGVLIVTSCMCGLSSLYSESMKKLRSSFLTGLCDISEGTVVPEDRCKSPTSAKMSRKLSLPTDLKPDLDVKDNSFSRSRSSSVTSIDKESREAISALHFCETFTRKTDSSPSPCLWVGTTLGTVLVIALNLPPGGEQRLLQPVIVSPSGTILRLKGAILRMAFLDTTGCLIPPAYEPWREHNVPEEKDEKEKLKKRRPVSVSPSSSQEISENQYAVICSEKQAKVISLPTQNCAYKQNIT

SEQ ID NO: 329873 - protein, 264 aa, Artificial Sequence
  derived and/or modified sequence
IELYGSNDPYRREPRSPRKSRQPSGGVLIVTSCMCGLSSLYSESMKKLRSSFLTGLCDISEGTVVPEDRCKSPTSAKMSRKLSLPTDLKPDLDVKDNSFSRSRSSSVTSIDKESREAISALHFCETFTRKTDSSPSPCLWVGTTLGTVLVIALNLPPGGEQRLLQPVIVSPSGTILRLKGAILRMAFLDTTGCLIPPAYEPWREHNVPEEKDEKEKLKKRRPVSVSPSSSQEISENQYAVICSEKQAKVISLPTQNCAYKQNIT

SEQ ID NO: 329874 - DNA, 840 bp, Artificial Sequence
  derived and/or modified sequence
atggtggactacctgcagaaggccgtgctgctgaacctgggcaccatcgagctgtacggcagcaacgacccctacagaagagagcccagaagccccagaaagagcagacagcccagcggcggcgtgctgatcgtgaccagctgcatgtgcggcctgagcagcctgtacagcgagagcatgaagaagctgagaagcagcttcctgaccggcctgtgcgacatcagcgagggcaccgtggtgcccgaggacagatgcaagagccccaccagcgccaagatgagcagaaagctgagcctgcccaccgacctgaagcccgacctggacgtgaaggacaacagcttcagcagaagcagaagcagcagcgtgaccagcatcgacaaggagagcagagaggccatcagcgccctgcacttctgcgagaccttcaccagaaagaccgacagcagccccagcccctgcctgtgggtgggcaccaccctgggcaccgtgctggtgatcgccctgaacctgccccccggcggcgagcagagactgctgcagcccgtgatcgtgagccccagcggcaccatcctgagactgaagggcgccatcctgagaatggccttcctggacaccaccggctgcctgatcccccccgcctacgagccctggagagagcacaacgtgcccgaggagaaggacgagaaggagaagctgaagaagagaagacccgtgagcgtgagccccagcagcagccaggagatcagcgagaaccagtacgccgtgatctgcagcgagaagcaggccaaggtgatcagcctgcccacccagaactgcgcctacaagcagaacatcacctag

SEQ ID NO: 329875 - DNA, 795 bp, Artificial Sequence
  derived and/or modified sequence
atcgagctgtacggcagcaacgacccctacagaagagagcccagaagccccagaaagagcagacagcccagcggcggcgtgctgatcgtgaccagctgcatgtgcggcctgagcagcctgtacagcgagagcatgaagaagctgagaagcagcttcctgaccggcctgtgcgacatcagcgagggcaccgtggtgcccgaggacagatgcaagagccccaccagcgccaagatgagcagaaagctgagcctgcccaccgacctgaagcccgacctggacgtgaaggacaacagcttcagcagaagcagaagcagcagcgtgaccagcatcgacaaggagagcagagaggccatcagcgccctgcacttctgcgagaccttcaccagaaagaccgacagcagccccagcccctgcctgtgggtgggcaccaccctgggcaccgtgctggtgatcgccctgaacctgccccccggcggcgagcagagactgctgcagcccgtgatcgtgagccccagcggcaccatcctgagactgaagggcgccatcctgagaatggccttcctggacaccaccggctgcctgatcccccccgcctacgagccctggagagagcacaacgtgcccgaggagaaggacgagaaggagaagctgaagaagagaagacccgtgagcgtgagccccagcagcagccaggagatcagcgagaaccagtacgccgtgatctgcagcgagaagcaggccaaggtgatcagcctgcccacccagaactgcgcctacaagcagaacatcacctag

SEQ ID NO: 329876 - DNA, 840 bp, Artificial Sequence
  derived and/or modified sequence
atggtagactacctgcagaaagccgttctccttaacctggggactatcgagttatacggaagcaacgacccctatcggagagagcccaggtcgccccgaaagtccagacaacctagtgggggagtattaatagtaacatcgtgtatgtgcggcctcagctccctctattcagaatcgatgaaaaagctgcgctcctctttccttacagggttgtgtgatataagcgagggcaccgtggtgccagaggaccggtgcaaatctcccacctcagcgaagatgtcacgtaaactcagcctgccaaccgacctgaaaccggatctggacgtgaaggataatagttttagcagaagcaggtcttcgtcagtgaccagtatcgacaaggaaagcagagaggccatttccgcactgcacttctgcgaaacttttacccggaagacagatagctccccgtcaccatgcctgtgggtaggcacaacacttggaactgttctagtcatagctctcaatttaccacctgggggtgaacagcgcctgttgcagcctgtgatcgtgagcccttctgggaccatactgcggttgaaaggagccattctcagaatggccttcctcgacacaaccggctgtctcatccctcctgcatatgagccttggcgcgaacacaatgtccccgaagagaaagatgagaaagaaaaactgaagaagcggcgtccagtgagcgtttcgcccagctcttcccaggagatctctgagaaccagtacgccgtgatctgcagcgagaaacaagcaaaagtgatctcactgcctacccagaactgcgcgtacaagcaaaatatcacgtag

SEQ ID NO: 329877 - DNA, 795 bp, Artificial Sequence
  derived and/or modified sequence
attgagttatatgggagcaatgacccttacaggcgcgaacccagatcgccaaggaaaagcaggcagccttcaggcggtgtgctcattgtcacatcctgcatgtgcggtctgagttcactgtactccgaatctatgaagaaacttcggtcaagcttcctgactggcctttgtgatatatcggaagggactgtcgtacctgaggaccgatgcaagtcccctacttctgcgaagatgtcccggaagctctcattgcccactgacctcaagccggatctggacgttaaagataactcattcagccgttccaggtcctcctcggtgaccagtatagacaaagagtctagggaggccatcagtgctctgcacttttgtgaaacctttacacggaagacagactccagccccagcccatgcctgtgggtgggtacaactctcgggaccgtgctggtaattgcccttaacctcccaccaggtggagaacaaaggctcttgcagcctgtaatcgtgtctcctagcggcaccattttgcgcctaaagggagccattttaaggatggctttcttagatacaaccggatgcctgatccctcctgcctacgagccttggcgggaacacaacgtgcctgaagaaaaggacgagaaggagaagctgaaaaagagacggcctgtctctgtgagtccgtcctcttcccaggagatttccgagaaccagtatgccgtgatctgctccgagaagcaggcaaaagtaatcagtctgcccacccaaaactgtgcatataagcaaaatatcacctag

SEQ ID NO: 329878 - DNA, 840 bp, Artificial Sequence
  derived and/or modified sequence
atggtggactacctgcagaaggctgtgctgctgaacctgggcaccatcgagctgtatggcagcaatgacccctaccgccgggagcccaggagccccaggaagagccggcagcccagcggaggagtgctgattgtgaccagctgcatgtgtggcctgagcagcctgtacagcgagagcatgaagaagctgcggagcagcttcctgaccggcctgtgtgacatcagcgagggcaccgtggtgcctgaggaccgctgcaagagccccaccagcgccaagatgagcaggaagctgagcctgcccacagacctgaagccagacctggatgtgaaggacaacagcttcagccgcagccgcagcagctctgtgaccagcattgacaaggagagccgggaggccatcagcgccctgcacttctgtgagaccttcaccaggaagacagacagcagccccagcccctgcctgtgggtgggcaccaccctgggcaccgtgctggtgattgccctgaacctgcccccaggaggagagcagaggctgctgcagcctgtgattgtgagccccagcggcaccatcctgcggctgaagggggccatcctgaggatggccttcctggacaccaccggctgcctgatccccccagcctatgagccctggagggagcacaacgtgcctgaggagaaggatgagaaggagaagctgaagaagagaagacctgtgtctgtgagccccagcagcagccaggagatcagcgagaaccagtatgctgtgatctgcagcgagaagcaggccaaggtgatcagcctgcccacccagaactgtgcctacaagcagaacatcacctag

SEQ ID NO: 329879 - DNA, 795 bp, Artificial Sequence
  derived and/or modified sequence
attgagctgtatggcagcaatgacccctacagaagagagcccaggagccccaggaagagccggcagcccagcggcggcgtgctgattgtgaccagctgcatgtgtggcctgagcagcctgtacagcgagagcatgaagaagctgcggagcagcttcctgaccggcctgtgtgacatcagcgagggcaccgtggtgcctgaagatcgctgcaagagccccaccagcgccaagatgagcaggaagctgagcctgcccacagacctgaagccagacctggatgtgaaggacaacagcttcagccgcagccgcagcagctctgtgaccagcattgacaaggagagccgggaggccatcagcgccctgcacttctgtgagaccttcaccaggaagacagacagcagccccagcccctgcctgtgggtgggcaccaccctgggcaccgtgctggtgattgccctgaacctgcccccaggaggagagcagaggctgctgcagcccgtcatcgtgagccccagcggcaccatcctgcggctgaagggggccatcctgaggatggccttcctggacaccaccggctgcctgatccccccagcctatgagccctggagggagcacaacgtgcctgaggagaaggatgagaaggagaagctgaagaagaggaggcctgtgtctgtgagccccagcagcagccaggagatcagcgagaaccagtatgctgtgatctgcagcgagaagcaggccaaggtgatcagcctgcccacccagaactgtgcctacaagcagaacatcacctag

SEQ ID NO: 329880 - DNA, 840 bp, Artificial Sequence
  derived and/or modified sequence
atggtggactacctgcagaaggccgtgctgctgaacctgggcaccattgagctttatggaagtaacgatccataccggagagagccccggtcacctaggaagtcccgacagcctagtggcggagtcttgatcgttacatcttgtatgtgcggactcagcagtctgtacagtgagagcatgaagaagttgcgttctagctttctgacgggtttatgtgatatttcagagggaaccgtagtccccgaggaccgctgcaagtctcctacctctgcgaaaatgtcacggaagttgtcgctaccaacagatctcaagcctgatttagatgtaaaggataacagtttcagccgtagccgaagctccagcgtgacatcaattgacaaggagtcgcgcgaagccattagcgcgcttcacttctgtgagaccttcaccaggaagaccgatagctccccatccccatgtttgtgggttggcactactctgggaactgtgctggttatcgctcttaacctgcctccgggcggagagcagagactgttacagccagtgatcgtcagcccatctggaacaattctccgcctcaagggggcgattcttagaatggcctttttggacaccacaggatgtttgatcccaccagcctacgagccgtggagagagcacaacgtgcctgaggagaaggacgagaaggagaaactgaagaagcgacggccagtgagtgtgtcgcctagctcaagccaggagatctctgaaaatcagtatgcggtgatatgctccgagaagcaggcaaaagttatctctttacctacacagaattgtgcctataaacagaacatcacttag

SEQ ID NO: 329881 - DNA, 795 bp, Artificial Sequence
  derived and/or modified sequence
atcgagctgtacggcagcaacgacccctaccggcgggagccccggtcgccacggaaatctcgacagccctccggaggagtgctgattgtgactagttgtatgtgtgggctgtcctctctctatagcgaatccatgaaaaagctccgtagtagcttcctgacaggcctttgcgatatttctgaagggaccgtagtccctgaggatcgttgtaagtcaccaacctctgccaaaatgtcgcgaaagttgtctcttcccacagatctgaagcccgatttggatgtaaaggataactcctttagccgaagtcgaagctcctctgtgactagtatcgataaggaatctcgtgaggcgatctccgccttgcacttttgcgaaacatttacacgcaagactgatagttccccatccccttgcctctgggtagggactacactcgggactgttctagttattgccctgaatttaccacccggtggcgagcagaggctgctgcagccagttatcgtgtccccctcaggcacaatattaagacttaaaggggcaatcttgaggatggcatttcttgataccaccggctgtcttatcccacctgcgtacgagccatggcgtgagcacaatgtgcctgaggagaaggacgaaaaagaaaagctgaaaaaaagaagacccgtctctgtatccccttcatcatctcaagagatctcagaaaatcagtacgctgtgatctgctccgagaaacaggctaaggtgatcagcttgcctacccagaattgtgcctacaagcagaacatcacctag

SEQ ID NO: 329882 - DNA, 840 bp, Artificial Sequence
  derived and/or modified sequence
atggtggattaccttcagaaggccgtcctgctgaatcttggtaccatcgaactatacgggtcaaacgacccataccggcgtgagcctaggtccccccgaaagtcacgccagccatctggaggggtgctaatcgtgacctcttgtatgtgcgggctctccagcctgtatagcgagtcaatgaagaaactgagaagtagctttctcacgggcctctgtgacatctccgaaggcacagtggtaccagaggatcgatgtaaatcccctacttcagccaaaatgtctcgaaagctgtcgctccctactgatttgaagccggatctcgacgtaaaggacaatagtttcagccgtagcaggtctagctctgtgacgtccattgacaaggagtcacgggaggcaatcagtgctctgcatttttgcgaaacctttactagaaagactgactccagcccctccccatgcctatgggtgggaacgacactcggaacggttttggtgattgctctgaacctccctcctgggggagaacaacgactccttcaacccgtcatcgtcagtccaagcggtacaatcctgagactcaagggggctatccttcggatggctttcctggataccactggctgtctaattccccctgcatacgaaccttggcgagaacacaatgtgcctgaggaaaaagacgagaaggagaagttgaagaagagaagacctgtttctgtatctcccagttcctctcaagagatttctgaaaaccaatacgccgtgatttgctcagagaagcaggcgaaggtgatttccttgccgactcagaattgcgcgtacaagcagaacatcacatag

SEQ ID NO: 329883 - DNA, 795 bp, Artificial Sequence
  derived and/or modified sequence
attgagctgtacgggagcaacgatccatacagaagagagccccgttccccgaggaagagccgtcaaccatctggtggcgttctaatcgtcacttcttgtatgtgcgggctgtcgtcactgtatagcgagagtatgaagaagctcaggtcctcgttcttgactggtctctgcgacatcagtgagggcaccgtggttcccgaggatcgttgtaagagtccaacctccgctaaaatgtccaggaaactgtcccttcctacagatcttaagccagatttagacgtgaaggataattcattctccaggtcccgctcttcgagcgtcacaagcatagacaaggagagtagagaggcaatttctgctttgcacttttgcgaaacttttacccgcaagacggattcctctccatcaccgtgcctatgggttggaactacccttggcaccgtgcttgtgatcgcactcaacctccctccgggtggggagcagcggctcctgcaaccagtcatcgtctctccatccggaacgattctgagacttaagggtgccattcttcggatggcattcctggatacgacgggctgcttaattccccctgcctatgagccttggcgcgagcataatgtgcccgaggaaaaagacgagaaagaaaagctcaaaaaacgccgacccgtcagtgtctctccctctagtagtcaagagatttcggagaaccagtacgccgtgatatgtagcgagaaacaggccaaggtgatttcacttcccacgcagaattgcgcctacaagcagaatattacttag

SEQ ID NO: 329884 - DNA, 6409 bp, Artificial Sequence
  derived and/or modified sequence
tgttcggattatcttttgcttccccccagctgcctccttaccctcacactcccactcctccgtttccgcggtcgaagctgccttcggccccgggtggtctcccccgcccggggaccccctgtgcctcccctcccgggctgcgggggagcccctccgagaccatgaggaaattcaacatcaggaaggtgctggacggcctgaccgccggctcgtcctcggcgtcgcagcagcaacagcagcagcatccgcctgggaaccgggagccggagatccaggaaacgctccagtccgagcactttcagctctgcaagactgttcgccatggatttccctatcaaccctcagccctggcctttgatcctgtacagaagatcctggcagtgggaactcagactggtgctttaaggctctttggtcgtccaggagtagaatgttattgccagcatgacagtggagctgcagtaatccagctccagttcctgattaatgagggagcgcttgtgagtgccttggctgatgacaccttacacttatggaatttacgtcagaagaggcctgccatactacattcgcttaaattttgcagagaaagggttacattttgccatctgcctttccagagtaagtggctctatgtgggcactgaacgaggtaatatacatattgtcaatgtggagtccttcacactctcaggctacgtcattatgtggaataaagccattgaactgtcatctaaatctcacccaggacctgtggtccatataagtgataatccaatggacgagggaaagcttttgattggctttgaatctggaacagtagttttatgggacctcaaatcaaagaaagccgactacagatacacatatgatgaggctatccactctgttgcttggcatcatgaaggaaaacaatttatttgcagtcattcagatggcaccttgactatatggaatgtaaggtcccctgctaaaccagtacagacaatcactccacatggaaaacagttaaaggatgggaagaagccagaaccatgcaaacctatcctcaaggtggaattcaaaacgactagatctggggagccttttattattttatcaggaggtttgtcatatgatactgtaggaagaagaccttgcttaacagtgatgcatgggaaaagcactgctgtgctagaaatggactattcaattgttgattttctaacgctgtgtgaaacaccatacccaaatgattttcaagaaccatatgctgtggttgttcttctagaaaaggatttagtacttatagaccttgcacaaaatggatatcctatatttgaaaatccctaccctttgagtatacatgagtcccctgttacatgttgcgaatattttgcggattgtcctgtggaccttattcctgcactttattctgttggagctagacagaaacgtcaaggttacagcaaaaaggaatggcccatcaacggaggtaattggggcttgggtgctcaaagttacccagaaataattattacagggcatgctgatgggtcagttaagttctgggatgcttctgcaataactctacaagtattatataagctaaagacatctaaagtatttgaaaagtcaagaaataaagatgacaggccaaacacagacattgtagatgaagatccatatgccattcagatcatctcctggtgtccagaaagtagaatgctgtgcatcgctggagtttcagctcatgtcattatttatagattcagcaagcaggaagtaatcacagaagtcattccgatgcttgaagttcgattattatatgagataaatgatgtggaaactccggagggtgagcagccaccacctttgccaacacccgtgggagggtccaaccctcagcccatccctcctcagtctcatccatctaccagtagcagttcatctgatgggcttcgtgataatgtaccttgtttaaaagttaaaaactcaccacttaaacagtctccaggttatcaaacagaactagttattcagttggtttgggtgggtggagaaccaccacaacaaataaccagcctggcagtcaattcttcctatggactggtggtttttggcaattgcaatggcattgctatggttgactacctccagaaagcagtgctgctcaacctgggcactattgaattatatggctctaatgatccttatcggagagaaccccgatctcctcgtaaatctcgacagccttcaggaggtgtgctgattgtgacttcttgcatgtgcggcctttctagcttatattctgaatctatgaaaaaactacgttcttcttttttaaccggtctgtgtgatattagtgaagggactgttgttccagaggatcgctgcaaatctccaacctctgcaaagatgtcaaggaagttaagcttacctactgacctaaagcctgatttagatgtaaaggataactcctttagccgatcacggagttcaagtgtaacaagcattgacaaagaatcccgagaagcgatctccgctcttcatttctgtgaaacgtttactcgaaagacggactcgtccccttccccttgtctatgggttggaacaacgctaggaacagtgcttgtcattgcactgaaccttcccccagggggagagcaaagacttcttcagccagtaattgtgtctccaagtggtactatattgaggttaaaaggtgcaatcttgagaatggcatttctggataccacaggctgcttaataccacctgcgtatgaaccctggagagagcacaatgttcctgaagaaaaagacgaaaaggagaaattgaaaaaacggcggcctgtctcagtatccccctcctcttctcaggaaattagtgaaaaccagtatgcagtgatatgttctgaaaagcaagcaaaagtaatctcactgccaacccagaactgtgcttataagcaaaatattacagagacctcgtttgtgcttcgtggagatattgtagcattgagtaacagtatctgccttgcctgtttctgtgccaatggacatataatgacttttagtttgccaagtttaagacctctgttggatgtgtattacttgccccttaccaatatgcggatagccagaacgttctgctttaccaacaatggacaagcattataccttgtttcacctacagaaatccagagacttacttatagtcaagagacctgtgaaaatcttcaggaaatgttgggtgaactcttcactcctgtagaaacacctgaagcaccaaacaggggattctttaaaggcttatttggaggtggtgcacaatctcttgacagagaagaactatttggagaatcgtcctcaggaaaggcttcaaggagccttgcacagcatattcctggccctggtggcattgaaggcgtaaaaggggcagcatctggagttgttggtgaattagcacgagccaggctggcactagatgaaagagggcagaaacttggcgatctggaagaaagaactgcggccatgttatcaagtgcagagtcattttctaaacatgctcatgagattatgttgaaatacaaagataagaagtggtaccagttctgacaaccagaatccaataagtccaacttcagccagaaggaaaaaagttttccatttttattacattctttaggaaagttaacgttaaagggatgttcgtcactgaatactgttctttcctagcacagtcatgcactgttttacctcagtcatgtggctttaactgaggagtgttcacacgcactcgaaatggagtatatggtgtgtgccagttatgagttgaccatttgggaattaaacaggtcacacgtgacagatgaagaaaccaagggggctgctgaggagacctggtgcagggactaatcctggatcattcctgtattaaactttcatatgccaaaagggtttgtgccgttttatctgccatcagtgtttgacctgtttagggcagaggcaataagtcagaagtcttgaagttgaaatagttatatgtgtgtcattggactggattataaacagctgtcttggactttccctctcttaacactgactggtcatcagtatcattagtgaaaaagaaacaaattgtttgttatcatctctttagacagataagctgaatggtgggctttaaataataaaaacatacacatagttgacttgtgtatgagctactcttggattcttgttattatagacttgtatttagttcatattttgtcaaaagcaaaacaagaagatacatcacttttcattgaaaagaaaagtgtagagcatgactgaattgctcatcattctgggagtttccatgtagtggctatgcagtgtggaaagtgagaaaaacctccattgtggtgaggagaatacttcaatgtcccttgtccttgttctcattaattcagctaaaggtggatttgaccaaaataatgctggttaaatttgtagaaatgttgaaattggctgtgttttaaattttgcttgaatttttataaaatgtttaaccaaatgtacctttgcattctttaattaaaattgcttaaaaaaaaactttcattatttcagtaaaatgctcagctcccttttcaaaatgccctttatttgctaactgttccaatacactcaggtgatgagccaattaaatgttagtgcacatgctatcgcatggaaaattacaagcatctgttgtcaataattatataagagtttagtctgatgacctacaaaatattttgtgtagaaatatactataaatctgtacatatcctttcaaggttttaaaaaaccaaaaagaaaggaaaatatgtacactgtgataactaaattatttctgtattggaatataatacaatttgagaccagcaatggacaatgaatgattgtttcatagaatagcattacgggcaggaaagaaaccacctagtagatctagaagtaagcaatctcagaatacagactaatctgagattattattgattgttgttaaagcaacccagcaaaagcaaaatggaagcattaaaattaatgttaatgaaatttaaatattgtcttctataaaaaattcctttaaatgattttgttttttcattaagagataatcagagcacaaattgatagtaaacaggatggttgtttttctattctatatgatcattaaaggaatatgtaggacatcttaactttttcatacagtctgttatgcatattttcctctacttttcattaataaagcttttatgtttacattttataacatgcactactagatgcaaaagtttacatcaaagtttactttaaatatcatttggtagggactaaatgtgtgtgatagagataattgatcaagccaaaagaaatattttttaaataagcccttttcaaaagtttttgaatttatagaaagcaccaatgaataacatatttctgtttcgttaatgtcagctgcctgaacattcagcagtttataaattgcttaatttgtgttatctattatccagtaaacccatagttccatgatatgtcacaggaattgttaggtcctattttaaaggtacagttttgtgaatgtcatcaataaaatcaacagttatggatttgaagaagttgggaaagcattatgtagattaatatactggttggttccctatctatgtggaaggtcatattagctgcaattatttaatttgctgtgttattttgtgttatataacacaaatatatttgtatattaacttcatttttactgtcatttttcctgttgtatacaaaatgaactaatcttgtaattattttcaaatatagaagtatatacattagatggatttccaagattttgtaagaaaatcttaaatcagtgttttgagttatttaatttttaaattaatctacaaattatgcacaacaaactagagactcagttaggattagaaagcttaaagtatgtttgagtgtaggaaataagcttctcagagttatacttgattctgtctgtagataagagacagtctacagtaataactaacccagggaatttactgtaatttgagaggtaacatctctatttttttctttttaaatacagaaagtaatagtcaccagcaagccacgatttcaggaaaactgactaaaaaaaaaagtcaaaatagaaaatatcagaaaaatgaaagatttttgtgtgccctctccatatcctcattgtttttgttgcatttgtccttgactctaaaatcactgaagtattcatgattagtagtttgtaagtaggaagtggtttttctgtatgtaccatatatccagttcatttcagttttcaaactaaaatccatatgtatttgctgagaaagttatttgaaatcttatattctgacaaattctgtacatt

SEQ ID NO: 329885 - DNA, 791 bp, Artificial Sequence
  derived and/or modified sequence
attgaattatatggctctaatgatccttatcggagagaaccccgatctcctcgtaaatctcgacagccttcaggaggtgtgctgattgtgacttcttgcatgtgcggcctttctagcttatattctgaatctatgaaaaaactacgttcttcttttttaaccggtctgtgtgatattagtgaagggactgttgttccagaggatcgctgcaaatctccaacctctgcaaagatgtcaaggaagttaagcttacctactgacctaaagcctgatttagatgtaaaggataactcctttagccgatcacggagttcaagtgtaacaagcattgacaaagaatcccgagaagcgatctccgctcttcatttctgtgaaacgtttactcgaaagacggactcgtccccttccccttgtctatgggttggaacaacgctaggaacagtgcttgtcattgcactgaaccttcccccagggggagagcaaagacttcttcagccagtaattgtgtctccaagtggtactatattgaggttaaaaggtgcaatcttgagaatggcatttctggataccacaggctgcttaataccacctgcgtatgaaccctggagagagcacaatgttcctgaagaaaaagacgaaaaggagaaattgaaaaaacggcggcctgtctcagtatccccctcctcttctcaggaaattagtgaaaaccagtatgcagtgatatgttctgaaaagcaagcaaaagtaatctcactgccaacccagaactgtgcttataagcaaaatattac

SEQ ID NO: 329886 - protein, 806 aa, Artificial Sequence
  derived and/or modified sequence
MHGKSTAVLEMDYSIVDFLTLCETPYPNDFQEPYAVVVLLEKDLVLIDLAQNGYPIFENPYPLSIHESPVTCCEYFADCPVDLIPALYSVGARQKRQGYSKKEWPINGGNWGLGAQSYPEIIITGHADGSVKFWDASAITLQVLYKLKTSKVFEKSRNKDDRPNTDIVDEDPYAIQIISWCPESRMLCIAGVSAHVIIYRFSKQEVITEVIPMLEVRLLYEINDVETPEGEQPPPLPTPVGGSNPQPIPPQSHPSTSSSSSDGLRDNVPCLKVKNSPLKQSPGYQTELVIQLVWVGGEPPQQITSLAVNSSYGLVVFGNCNGIAMVDYLQKAVLLNLGTIELYGSNDPYRREPRSPRKSRQPSGAGLCDISEGTVVPEDRCKSPTSGSSSPHNSDDEQKMNNFIEKAKMSRKLSLPTDLKPDLDVKDNSFSRSRSSSVTSIDKESREAISALHFCETFTRKTDSSPSPCLWVGTTLGTVLVIALNLPPGGEQRLLQPVIVSPSGTILRLKGAILRMAFLDTTGCLIPPAYEPWREHNVPEEKDEKEKLKKRRPVSVSPSSSQEISENQYAVICSEKQAKVISLPTQNCAYKQNITETSFVLRGDIVALSNSICLACFCANGHIMTFSLPSLRPLLDVYYLPLTNMRIARTFCFTNNGQALYLVSPTEIQRLTYSQETCENLQEMLGELFTPVETPEAPNRGFFKGLFGGGAQSLDREELFGESSSGKASRSLAQHIPGPGGIEGVKGAASGVVGELARARLALDERGQKLGDLEERTAAMLSSAESFSKHAHEIMLKYKDKKWYQF

SEQ ID NO: 329887 - protein, 174 aa, Artificial Sequence
  derived and/or modified sequence
  misc_feature (1)..(1): Xaa can be any naturally occurring amino acid
XKAVLLNLGTIELYGSNDPYRREPRSPRKSRQPSGAGLCDISEGTVVPEDRCKSPTSGSSSPHNSDDEQKMNNFIEKAKMSRKLSLPTDLKPDLDVKDNSFSRSRSSSVTSIDKESREAISALHFCETFTRKTDSSPSPCLWVGTTLGTVLVIALNLPPGGEQRLLQPVIVSPS

SEQ ID NO: 329888 - DNA, 2421 bp, Artificial Sequence
  derived and/or modified sequence
atgcacggcaagagcaccgccgtgctggagatggactacagcatcgtggacttcctgaccctgtgcgagaccccctaccccaacgacttccaggagccctacgccgtggtggtgctgctggagaaggacctggtgctgatcgacctggcccagaacggctaccccatcttcgagaacccctaccccctgagcatccacgagagccccgtgacctgctgcgagtacttcgccgactgccccgtggacctgatccccgccctgtacagcgtgggcgccagacagaagagacagggctacagcaagaaggagtggcccatcaacggcggcaactggggcctgggcgcccagagctaccccgagatcatcatcaccggccacgccgacggcagcgtgaagttctgggacgccagcgccatcaccctgcaggtgctgtacaagctgaagaccagcaaggtgttcgagaagagcagaaacaaggacgacagacccaacaccgacatcgtggacgaggacccctacgccatccagatcatcagctggtgccccgagagcagaatgctgtgcatcgccggcgtgagcgcccacgtgatcatctacagattcagcaagcaggaggtgatcaccgaggtgatccccatgctggaggtgagactgctgtacgagatcaacgacgtggagacccccgagggcgagcagcccccccccctgcccacccccgtgggcggcagcaacccccagcccatccccccccagagccaccccagcaccagcagcagcagcagcgacggcctgagagacaacgtgccctgcctgaaggtgaagaacagccccctgaagcagagccccggctaccagaccgagctggtgatccagctggtgtgggtgggcggcgagcccccccagcagatcaccagcctggccgtgaacagcagctacggcctggtggtgttcggcaactgcaacggcatcgccatggtggactacctgcagaaggccgtgctgctgaacctgggcaccatcgagctgtacggcagcaacgacccctacagaagagagcccagaagccccagaaagagcagacagcccagcggcgccggcctgtgcgacatcagcgagggcaccgtggtgcccgaggacagatgcaagagccccaccagcggcagcagcagcccccacaacagcgacgacgagcagaagatgaacaacttcatcgagaaggccaagatgagcagaaagctgagcctgcccaccgacctgaagcccgacctggacgtgaaggacaacagcttcagcagaagcagaagcagcagcgtgaccagcatcgacaaggagagcagagaggccatcagcgccctgcacttctgcgagaccttcaccagaaagaccgacagcagccccagcccctgcctgtgggtgggcaccaccctgggcaccgtgctggtgatcgccctgaacctgccccccggcggcgagcagagactgctgcagcccgtgatcgtgagccccagcggcaccatcctgagactgaagggcgccatcctgagaatggccttcctggacaccaccggctgcctgatcccccccgcctacgagccctggagagagcacaacgtgcccgaggagaaggacgagaaggagaagctgaagaagagaagacccgtgagcgtgagccccagcagcagccaggagatcagcgagaaccagtacgccgtgatctgcagcgagaagcaggccaaggtgatcagcctgcccacccagaactgcgcctacaagcagaacatcaccgagaccagcttcgtgctgagaggcgacatcgtggccctgagcaacagcatctgcctggcctgcttctgcgccaacggccacatcatgaccttcagcctgcccagcctgagacccctgctggacgtgtactacctgcccctgaccaacatgagaatcgccagaaccttctgcttcaccaacaacggccaggccctgtacctggtgagccccaccgagatccagagactgacctacagccaggagacctgcgagaacctgcaggagatgctgggcgagctgttcacccccgtggagacccccgaggcccccaacagaggcttcttcaagggcctgttcggcggcggcgcccagagcctggacagagaggagctgttcggcgagagcagcagcggcaaggccagcagaagcctggcccagcacatccccggccccggcggcatcgagggcgtgaagggcgccgccagcggcgtggtgggcgagctggccagagccagactggccctggacgagagaggccagaagctgggcgacctggaggagagaaccgccgccatgctgagcagcgccgagagcttcagcaagcacgcccacgagatcatgctgaagtacaaggacaagaagtggtaccagttctag

SEQ ID NO: 329889 - DNA, 525 bp, Artificial Sequence
  derived and/or modified sequence
tgaaaggccgtgctgctgaacctgggcaccatcgagctgtacggcagcaacgacccctacagaagagagcccagaagccccagaaagagcagacagcccagcggcgccggcctgtgcgacatcagcgagggcaccgtggtgcccgaggacagatgcaagagccccaccagcggcagcagcagcccccacaacagcgacgacgagcagaagatgaacaacttcatcgagaaggccaagatgagcagaaagctgagcctgcccaccgacctgaagcccgacctggacgtgaaggacaacagcttcagcagaagcagaagcagcagcgtgaccagcatcgacaaggagagcagagaggccatcagcgccctgcacttctgcgagaccttcaccagaaagaccgacagcagccccagcccctgcctgtgggtgggcaccaccctgggcaccgtgctggtgatcgccctgaacctgccccccggcggcgagcagagactgctgcagcccgtgatcgtgagccccagctag

SEQ ID NO: 329890 - DNA, 2421 bp, Artificial Sequence
  derived and/or modified sequence
atgcatggcaagtcaacagcagtgcttgagatggactattccattgtagacttcctcaccctgtgtgagactccttaccccaatgactttcaagaaccctacgctgtcgttgtactgctggaaaaggatctcgttttgatagatctcgcccagaacggctatccaatcttcgaaaacccctaccctttaagtattcacgagagccctgtgacgtgttgcgagtacttcgctgactgcccagtggatctcattcccgcgctatatagcgtaggtgccagacaaaaacgacagggatattccaagaaggaatggccaattaacggaggaaactgggggttgggcgctcagtcgtatcctgagatcattataacagggcatgcagacggcagtgtcaagttttgggatgcctccgccatcaccctgcaggtcctctataagctcaaaacctctaaggtgttcgagaagagcagaaataaagacgaccgccctaatactgacattgtggacgaagacccgtatgcaattcagattatctcttggtgccccgaatctcgtatgctgtgtatcgccggggtttctgctcacgttattatatatagattttctaaacaggaagttatcaccgaggtgattcctatgttagaggtccgcttgctgtatgaaatcaatgatgtggagacccccgaaggggaacaacccccaccattgcccacacccgtcggtggaagtaacccacagcctattccgccccagtcacatccttccacctccagctcaagctctgacggacttagagataatgttccctgcctgaaggtgaaaaactcccccctgaagcaatctcctggataccagacagagctagttatccaattggtgtgggtcggtggcgagcctccccagcaaattacgagtctcgctgtgaacagttcctatggtctcgtggtcttcggaaactgtaatggcatagctatggttgactatttacagaaggcggtacttcttaaccttggtaccattgaactgtacggcagtaatgacccgtatcggcgggagcccaggtctcccagaaagtccaggcagccatcgggagcagggctgtgcgatattagcgaaggcaccgtggtacctgaagacaggtgtaagtcacccacctctggcagctcaagtccgcataatagtgacgatgagcagaagatgaataatttcattgagaaggcgaaaatgtcacgcaaactcagcttacccactgacctgaaaccagatttggatgttaaggataattcctttagccggagcagaagctcctccgtcacgtcaattgataaggagtccagagaggctatatccgccctccacttttgcgagacatttacgaggaaaactgattcttccccctctccctgcctgtgggtggggacaaccctggggaccgtcctggtaatcgcccttaatctgccccccggaggtgagcagcggctgctgcaacccgttatcgtgtccccatccggtacaattctccgactgaaaggcgccatcctgaggatggcttttctggacactaccggatgcctgataccgcctgcatatgagccatggcgggaacataatgtcccggaggagaaggacgagaaggagaaactgaagaaacgccggcccgtgtcggtaagcccaagcagctcccaagagatctcggagaaccaatatgcggtcatctgtagcgaaaaacaagctaaggtgatcagcctccccacacagaactgtgcctataaacagaatattacagagaccagttttgtgctgaggggcgatattgtggccctttccaactctatttgtctcgcctgcttttgtgcaaatggtcatatcatgaccttctcgctgccctcactgaggccactgttagatgtgtactatcttcctctcaccaatatgagaattgcccgcacattttgctttacgaacaatggtcaggcattgtatctcgtcagcccgactgagattcagcgacttacttatagtcaagagacatgtgaaaacctgcaagaaatgcttggggagctgttcacacctgtagaaacaccggaagctccgaatcgcggcttctttaaggggctgtttggggggggtgcccagtcgcttgatagagaggaactattcggagaaagttcctcaggcaaggcttctcgatccctggcccaacatatccccgggccgggcgggatagaaggcgtcaaaggcgctgcttctggagtagtgggcgaactagcccgagcccggctcgcgcttgatgagagaggccaaaagctgggcgatctggaagagaggacagctgctatgctttcatcagcagagagtttcagcaagcacgcccatgaaatcatgttaaaatacaaggacaaaaaatggtaccaattttag

SEQ ID NO: 329891 - DNA, 525 bp, Artificial Sequence
  derived and/or modified sequence
taaaaggcagtcctgctgaaccttgggaccatcgaactgtacggctccaatgatccatacaggagagagcctagatcgccaagaaaatcacggcagccctccggtgcagggttgtgtgacatctcagaaggaacggtggtgccagaagatagatgcaaaagtcccacctcgggctcgagctcgccccataactcagacgacgagcagaagatgaataacttcatcgaaaaagccaagatgtccagaaagcttagcttaccaactgacctgaaacctgacctcgacgtgaaagacaactcctttagccggtcacggtctagctctgtgaccagcatcgataaggaaagccgggaggccatttcagccctgcacttctgtgaaacattcactcgaaagaccgattccagcccttcgccatgcctttgggttggaaccacactgggaactgtgctcgtgatagcgctcaacctgccaccaggaggagagcagagacttctccaacccgtgattgtctccccttcttag

SEQ ID NO: 329892 - DNA, 2421 bp, Artificial Sequence
  derived and/or modified sequence
atgcacggcaagagcacagctgtgctggagatggactacagcatcgtggacttcctgaccctgtgtgagaccccctacccaaatgacttccaggagccctatgctgtggtggtgctgctggagaaggacctggtgctgattgacctggcccagaatggctaccccatctttgagaacccctaccccctgagcatccacgagagccctgtgacctgctgtgagtactttgctgactgccctgtggacctgatcccagccctgtacagcgtgggcgcccggcagaagaggcagggctacagcaagaaggagtggcccatcaatggaggcaactggggcctgggcgcccagagctacccagagatcatcatcaccggccatgctgatggctctgtgaagttctgggatgccagcgccatcaccctgcaggtgctgtacaagctgaagaccagcaaggtgtttgagaagagcaggaacaaggatgaccggcccaacacagacatcgtggatgaggacccctatgccatccagatcatctcctggtgcccagagagcaggatgctgtgcatcgccggcgtgtctgcccacgtgatcatctaccgcttcagcaagcaggaggtgatcacagaggtgatccccatgctggaggtgcggctgctgtatgagatcaatgatgtggagaccccagagggggagcagcccccacccctgcccacccctgtgggcggcagcaacccccagcccatccccccccagagccaccccagcaccagcagcagcagcagtgatggcctgcgggacaacgtgccctgcctgaaggtgaagaacagccccctgaagcagagccctggctaccagacagagctggtgatccagctggtgtgggtgggcggggagcccccccagcagatcaccagcctggccgtgaacagcagctatggcctggtggtgtttggaaactgcaatggaattgccatggtggactacctgcagaaggctgtgctgctgaacctgggcaccatcgagctgtatggcagcaatgacccctaccgccgggagcccaggagccccaggaagagccggcagcccagcggggccggcctgtgtgacatcagcgagggcaccgtggtgcctgaggaccgctgcaagagccccaccagcggcagcagcagcccccacaacagtgatgatgagcagaagatgaacaacttcatcgagaaggccaagatgagcaggaagctgagcctgcccacagacctgaagccagacctggatgtgaaggacaacagcttcagccgcagccgcagcagctctgtgaccagcattgacaaggagagccgggaggccatcagcgccctgcacttctgtgagaccttcaccaggaagacagacagcagccccagcccctgcctgtgggtgggcaccaccctgggcaccgtgctggtgattgccctgaacctgcccccaggaggagagcagaggctgctgcagcctgtgattgtgagccccagcggcaccatcctgcggctgaagggggccatcctgaggatggccttcctggacaccaccggctgcctgatccccccagcctatgagccctggagggagcacaacgtgcctgaggagaaggatgagaaggagaagctgaagaagagaagacctgtgtctgtgagccccagcagcagccaggagatcagcgagaaccagtatgctgtgatctgcagcgagaagcaggccaaggtgatcagcctgcccacccagaactgtgcctacaagcagaacatcacagagaccagctttgtgctgcggggggacatcgtggccctgagcaacagcatctgcctggcctgcttctgtgccaacggccacatcatgaccttcagcctgcccagcctgcggcccctgctggatgtgtactacctgcccctgaccaacatgagaattgcccggaccttctgcttcaccaacaacggccaggccctgtacctggtgagccccacagagatccagaggctgacctacagccaggagacctgtgagaacctgcaggagatgctgggggagctgttcacccctgtggagaccccagaggcccccaacagaggcttcttcaagggcctgtttggaggaggagcccagagcctggaccgggaggagctgtttggagagagcagcagcggcaaggccagccgcagcctggcccagcacatccctggccctgggggcatcgagggcgtgaagggggccgccagcggcgtggtgggggagctggcccgggcccggctggccctggatgagcggggccagaagctgggggacctggaggagaggacagctgccatgctgagcagcgctgagagcttcagcaagcacgcccacgagatcatgctgaagtacaaggacaagaagtggtaccagttctag

SEQ ID NO: 329893 - DNA, 525 bp, Artificial Sequence
  derived and/or modified sequence
tgaaaagctgtgctgctgaacctgggcaccatcgagctgtatggcagcaatgacccctacagaagagagcccaggagccccaggaagagccggcagcccagcggggccggcctgtgtgacatcagcgagggcaccgtggtgcctgaagatcgctgcaagagccccaccagcggcagcagcagcccccacaacagtgatgatgagcagaagatgaacaacttcatcgagaaggccaagatgagcaggaagctgagcctgcccacagacctgaagccagacctggatgtgaaggacaacagcttcagccgcagccgcagcagctctgtgaccagcattgacaaggagagccgggaggccatcagcgccctgcacttctgtgagaccttcaccaggaagacagacagcagccccagcccctgcctgtgggtgggcaccaccctgggcaccgtgctggtgattgccctgaacctgcccccaggaggagagcagaggctgctgcagcccgtcatcgtgagccccagctag

SEQ ID NO: 329894 - DNA, 2421 bp, Artificial Sequence
  derived and/or modified sequence
atgcacggcaagagcaccgccgtgctggagatggactacagcatcgtcgactttctgacattatgcgagaccccatacccaaacgattttcaagaaccgtatgctgtagttgttctgcttgagaaagatctagtgctcatcgaccttgcacagaatggataccccatatttgagaacccttacccgctgtcaatccacgaatccccagttacctgctgcgagtattttgcagactgtccagtggacttaatccccgcactatatagcgtgggagcccggcagaaacggcaagggtacagcaagaaggaatggccaatcaatggtggcaactggggtttgggcgctcagagttatcctgaaattattatcaccgggcacgcagacggaagcgtaaagttctgggatgctagcgctattactctgcaggtgctgtacaaactcaagaccagtaaagttttcgagaagagcagaaataaggacgatcgccccaacactgacattgttgatgaagacccttacgctattcagatcataagctggtgcccagagagccgcatgctgtgtatcgccggggtttctgcccacgttataatttatcgtttcagcaaacaggaggtgattacagaggttatccctatgcttgaagtacgactcctgtacgagattaatgacgtggaaacccctgaaggggagcagccccccccactgcccaccccggtgggcggctccaacccgcaacccatccctccccagtctcacccatcgactagtagctcaagctctgatggtctgcgcgataatgtcccctgtttaaaggttaaaaactccccattgaagcaaagcccaggataccaaacagagttagtgatacagctagtctgggtcggcggagagccaccacaacagattacatccctggctgtgaactcctcttacggtttggttgtgttcggcaactgtaacggcattgctatggtcgattacctccaaaaagcagtgcttctcaacctggggacgatcgaactctacggttctaacgacccataccgacgggagccccgctccccgcggaagagtcggcagccctctggagccggtctctgtgacatatctgagggaacagtcgtgccagaggacagatgtaagtcaccgacctcagggtcatcctcccctcacaattctgacgacgaacagaagatgaacaatttcattgagaaagcaaagatgtcccgcaagctgagtctgcctactgaccttaagccagatctggacgtgaaggacaattcttttagcagaagtaggtcgtccagcgtgacctccattgataaggagtcaagagaagctatttccgccctacatttttgtgaaacatttacccgtaagactgactcgagcccttcaccgtgcctttgggtgggaaccacgctcgggaccgtcctagtgattgcgctcaatctccctcctggaggcgaacaacggttgctacagccggttattgtgtctccctccggcacaatattgaggctgaagggtgcaattcttcgcatggcgttcctcgataccactgggtgtcttatacccccggcgtacgaaccttggcgagaacataacgtccccgaggagaaggatgagaaggaaaagctgaagaaacgccggcccgtgtcagtgtcgccttctagcagtcaggagatctctgaaaatcagtacgctgtgatatgctcggagaaacaggccaaggtgatcagtctgcccacccagaattgcgcatacaagcagaacataaccgagacttcctttgtccttcgaggagacatcgtcgccttatccaactccatttgtctggcctgtttttgcgccaacgggcacatcatgaccttttcccttccctccctgcggcccctgctcgatgtctactaccttcctcttaccaacatgcggattgctaggaccttttgctttaccaataacggccaggctctgtacctggtttccccaacagagatccagcgactgacctattcccaggaaacttgcgagaatctgcaggaaatgctgggagaactgtttacacccgtggaaacaccagaagcacccaacaggggcttctttaaaggtctcttcgggggaggcgctcagtctcttgaccgcgaagagttgttcggggagtcgagttctggaaaagcgtctcgctcgctcgcccaacatatacccggccccggtggcatcgagggcgtgaagggcgccgcaagcggcgtggtgggggagctggcccgcgctcgccttgcactcgatgagcggggccagaagctaggagatttagaggaacgcacagccgccatgctgtcgtcagcagaaagtttctctaagcacgcacacgaaataatgctgaagtataaggacaagaaatggtaccagttttag

SEQ ID NO: 329895 - DNA, 525 bp, Artificial Sequence
  derived and/or modified sequence
tgaaaggccgtgctgctgaacctgggcaccatcgagctgtacggctccaatgatccctaccggcgcgagcccagaagcccccgaaagtcccgtcagccatccggagcgggattatgcgacatttcagaagggacagttgtgccagaagatcggtgcaagtctccaaccagcggcagttcctcaccccataactctgacgacgaacagaaaatgaacaacttcattgaaaaggccaaaatgagcaggaagttatccctgccaacggatctcaagccagatcttgatgttaaggataacagtttttctaggtcacgtagcagtagtgtgacctctattgataaagagtctagggaggctatctccgcgctccacttttgcgaaacttttactaggaagactgactcgtcaccctcgccttgcctgtgggtaggaaccacactcggtacagtgttggtgatagctctaaacctccccccgggtggcgaacaaaggttgctccaaccggtgatcgtgtctcccagttag

SEQ ID NO: 329896 - DNA, 2421 bp, Artificial Sequence
  derived and/or modified sequence
atgcatgggaagtccaccgctgttctggagatggactacagcatcgtggacttcctgacactgtgcgaaaccccatatcccaacgactttcaggagccatatgccgtagttgtgttactggagaaggacctagttctgatcgacctcgcccagaatggatatccaatcttcgagaatccttatcctttatcaatccatgaatcccccgtgacctgttgcgagtatttcgctgattgcccggtggatctgattcccgcactctatagcgtgggggctcggcagaagcgccagggctacagcaagaaagagtggccgattaacggcggtaactggggcctgggcgcacaatcataccccgagatcataataactgggcatgccgacggctcggtcaagttctgggacgcgagcgccatcacgcttcaggtgttatataagcttaaaacttccaaagtttttgagaaaagccgcaacaaggacgacaggccaaatacagacattgtggatgaggatccctatgccattcagatcatctcatggtgccctgagtctcggatgctctgcatagcgggagtgtcagcccatgtgatcatttatagattttctaaacaagaggtgataaccgaagtgatccctatgctcgaagtgcgcctcctttacgaaataaacgatgttgagacacccgagggcgaacagccaccacctttaccgactcctgtgggtggctctaatccacaacctatcccgcctcagagccatcctagcacttctagctcgagcagtgatggactcagagacaatgtaccatgccttaaagtgaagaacagtcctttaaaacagagcccaggttaccagacagagttggtgatacagctcgtctgggtcggcggagaacctccccagcagatcaccagcctggcggtgaatagctcttatgggctcgtggtgttcgggaactgcaacggaattgccatggttgactacctgcagaaggccgtgctgttaaacctgggtactattgagctgtacggttctaatgacccttaccgcagagaacccagatctcccagaaagagccgccagccctccggtgcaggcctatgtgatattagtgaggggactgtcgtgcccgaagatagatgcaagtcccccacttccgggtcatcatctccacataactcagatgatgaacagaaaatgaataatttcattgagaaagctaagatgtcccgcaagcttagtctgcctacagacctgaaacctgacctcgatgtgaaagataactctttttctcgctcccgttcatcaagcgtcactagcattgacaaggagagtcgagaggccatcagtgcccttcacttttgtgaaacattcacccgtaaaactgacagctccccatctccgtgtttgtgggttggtacgacattgggaacagtgctggtgatcgcattgaacctaccacccggtggggagcagcgcctcctccaacctgttattgtatccccctctgggactatccttcggctcaaaggtgccatcctaaggatggcgttcctcgacaccacaggatgccttattccacctgcttacgaaccgtggagagaacacaatgttccagaagagaaagatgagaaagagaagctgaagaagagacgtccggtcagcgtgagcccgtcatcttcacaagagatttccgagaaccagtacgctgtgatctgctctgagaagcaggcgaaggtgatatctcttccgacccagaactgcgcttacaagcaaaatattacagaaacctcatttgttctacgcggagatatcgtggccctcagcaatagcatctgtctcgcgtgcttctgcgccaacggacacatcatgacttttagtctgcctagcctcagacccttgctcgacgtgtattatctccccctcaccaatatgcgcatcgcgcgtaccttttgtttcactaacaacgggcaggcgctttatctggtcagtcctactgaaattcagagacttacctactcacaggaaacatgcgagaacttgcaggagatgctgggcgaattattcactcctgtggagacacccgaagcacccaatcgcggtttcttcaagggattgtttgggggaggtgctcagtcccttgatcgcgaagagttgttcggtgaatccagctccggtaaggccagtaggagcttggcccaacatatccctggcccagggggaatagagggtgtgaagggtgcagccagtggggtagtgggcgaacttgccagggcgagactggcattagatgaaaggggacagaaactgggagaccttgaagaaagaacggcggctatgctatcttcggcagagagcttcagcaaacacgctcacgagattatgttgaaatacaaggacaagaaatggtaccaattctag

SEQ ID NO: 329897 - DNA, 525 bp, Artificial Sequence
  derived and/or modified sequence
taaaaggccgtgttgttgaatctgggtaccattgagctgtacgggtccaatgatccgtataggagagaaccgaggtctcccaggaagtctagacagcctagtggggctgggttatgcgacattagtgaggggaccgtggtgccagaggatcgatgcaaatccccaacatccgggtcttcttcaccccataattctgatgacgagcagaaaatgaataacttcatagagaaagccaagatgtcccgcaagctaagtcttcctaccgatttgaagcctgacctggatgttaaggataacagcttttctcgctctcgatcgagttccgttacatctatcgacaaagagtctcgggaagcaatctctgccctgcatttctgcgagacatttacccgcaagacagacagcagcccaagcccatgcctgtgggtcggaaccactctggggacagttttagttattgccttaaatttgcctcctgggggtgagcagcgtctcttgcagcccgttatcgtgagtccatcgtag

SEQ ID NO: 329898 - DNA, 521 bp, Artificial Sequence
  derived and/or modified sequence
gaaagcagtgctgctcaacctgggcactattgaattatatggctctaatgatccttatcggagagaaccccgatctcctcgtaaatctcgacagccttcaggagccggtctgtgtgatattagtgaagggactgttgttccagaggatcgctgcaaatctccaacctctggttcttcatcaccacacaattcagatgatgaacaaaaaatgaataattttatagaaaaggcaaagatgtcaaggaagttaagcttacctactgacctaaagcctgatttagatgtaaaggataactcctttagccgatcacggagttcaagtgtaacaagcattgacaaagaatcccgagaagcgatctccgctcttcatttctgtgaaacgtttactcgaaagacggactcgtccccttccccttgtctatgggttggaacaacgctaggaacagtgcttgtcattgcactgaaccttcccccagggggagagcaaagacttcttcagccagtaattgtgtctccaagtg

SEQ ID NO: 329899 - DNA, 375 bp, Artificial Sequence
  derived and/or modified sequence
atggtgagggctacgcgaggctactgggaagcgaagggaaagtggcagacatggttacgatttcgtaagaagtctagcaagtgcagagaggcccgtaccttcccctccttcaaatttctcaaaggaagccagtcttcgtttagctctctccttcagatgcctttgcagtcatttactgcagctcacacgtatagaaggcgcaattcaccatcccagaaggacgatcgcgctctcggcgctggagtccccctggtactcgctgaaagccttgacgcgtgtgaagtcaaacccgacctgggcaaggccgctctatggactctcctggccgttcctcacactcagctgggcttcctcaggaagcagcatagactgtag

SEQ ID NO: 329900 - DNA, 927 bp, Artificial Sequence
  derived and/or modified sequence
atgagaaagttcaacatcagaaaggtgctggacggcctgaccgccggcagcagcagcgccagccagcagcagcagcagcagcacccccccggcaacagagagcccgagatccaggagaccctgcagagcgagcacttccagctgtgcaagaccgtgagacacggcttcccctaccagcccagcgccctggccttcgaccccgtgcagaagatcctggccgtgggcacccagaccggcgccctgagactgttcggcagacccggcgtggagtgctactgccagcacgacagcggcgccgccgtgatccagctgcagttcctgatcaacgagggcgccctggtgagcgccctggccgacgacaccctgcacctgtggaacctgagacagaagagacccgccatcctgcacagcctgaagttctgcagagagagagtgaccttctgccacctgcccttccagagcaagtggctgtacgtgggcaccgagagaggcaacatccacatcgtgaacgtggagagcttcaccctgagcggctacgtgatcatgtggaacaaggccatcgagctgagcagcaagagccaccccggccccgtggtgcacatcagcgacaaccccatggacgagggcaagctgctgatcggcttcgagagcggcaccgtggtgctgtgggacctgaagagcaagaaggccgactacagatacacctacgacgaggccatccacagcgtggcctggcaccacgagggcaagcagttcatctgcagccacagcgacggcaccctgaccatctggaacgtgagaagccccgccaagcccgtgcagaccatcaccccccacggcaagcagctgaaggacggcaagaagcccgagccctgcaagcccatcctgaaggtggagttcaagaccaccagaagcggcgtgtgctag

SEQ ID NO: 329901 - DNA, 927 bp, Artificial Sequence
  derived and/or modified sequence
atgagaaagttcaacatacggaaagtactggacggccttaccgctggtagcagtagcgcttcccagcagcaacagcagcagcaccctccagggaatagggaacctgagatacaggagacgctgcagtccgagcacttccagctttgtaaaacagtgcgtcacggcttcccctatcagccgagtgcactcgcttttgaccccgttcagaaaattctggctgtcggcactcagaccggcgccttgaggttgttcggccgacctggcgtagagtgctactgtcagcacgattctggagcagctgtgatccagctgcagtttctgattaatgaaggggcactggtgtcagccctggcagacgacacactccacctatggaacctgcggcagaagcgccccgccattctccacagccttaaattttgtagggaaagagtgaccttctgtcacctaccctttcagtctaaatggttgtacgtgggaaccgagcgcggtaatattcatatcgtcaacgttgaaagtttcacgctgtccggctacgtcattatgtggaataaagccatcgagctgtcgtctaagtctcaccccggccccgtcgtacacattagcgataaccctatggacgaagggaagttacttatcgggtttgagtccggtactgtggttctgtgggacctcaagagtaaaaaagcagactatcgctacacttatgacgaggccattcatagcgtggcctggcatcatgaaggaaagcagtttatctgcagtcattccgacggcacactgaccatttggaatgtccgctcccctgctaagccagtgcagacaattaccccacacggtaaacaattaaaggacggcaagaagcccgaaccctgtaaacctatcttaaaggtcgaattcaaaaccacaaggagcggcgtctgttag

SEQ ID NO: 329902 - DNA, 927 bp, Artificial Sequence
  derived and/or modified sequence
atgaggaagttcaacatcaggaaggtgctggatggcctgacagctggcagcagcagcgccagccagcagcagcagcagcagcaccccccaggcaaccgggagcctgagatccaggagaccctgcagagcgagcacttccagctgtgcaagacagtgcgccacggcttcccctaccagcccagcgccctggcctttgatcctgtgcagaagatcctggccgtgggcacccagacaggagccctgcggctgtttggccggcctggggtggagtgctactgccagcatgattctggagctgctgtgatccagctgcagttcctgatcaatgaaggagccctggtgtctgccctggctgatgacaccctgcacctgtggaacctgcggcagaagaggcctgccatcctgcacagcctgaagttctgccgggagcgggtgaccttctgccacctgcccttccagagcaagtggctgtatgtgggcacagagcggggcaacatccacatcgtgaatgtggagagcttcaccctgagcggctacgtgatcatgtggaacaaggccatcgagctgagcagcaagagccaccctggccctgtggtgcacatcagtgacaaccccatggatgagggcaagctgctgattggatttgaaagtggcaccgtggtgctgtgggacctgaagagcaagaaggctgactaccgctacacctatgatgaggccatccacagcgtggcctggcaccacgagggcaagcagttcatctgcagccacagtgatggcaccctgaccatctggaatgtgcgcagccctgccaagcctgtgcagaccatcacccctcatggcaagcagctgaaggatggcaagaagccagagccctgcaagcccatcctgaaggtggagttcaagaccaccaggtctggagtgtgctag

SEQ ID NO: 329903 - DNA, 927 bp, Artificial Sequence
  derived and/or modified sequence
atgcggaagttcaacatccggaaggtgctggacggcctgaccgccgggagctcttccgcatcacagcaacagcagcagcagcacccacccggtaacagggaacccgaaatccaggagacactccagtccgagcattttcaattgtgcaagacagtcaggcatggctttccataccagcccagcgccctcgccttcgacccagttcagaagatcctcgccgtggggacccagaccggagcgctgcggctgttcgggcgacctggagtggagtgctactgccagcatgattcaggagccgccgtgattcaattacagttcctgatcaacgaaggggcgttagtatccgcattggctgacgataccctgcacctgtggaatttacggcagaaaagacccgccatactacactctctgaagttctgccgagagagagttacgttctgccacctgccattccagtccaagtggctgtatgttgggacagaacgcggaaatatccacatcgtgaatgtggaatctttcactctgtctggctatgttatcatgtggaataaagccattgagctatcatctaagtcccaccctggccctgtggtacatatatccgataatccgatggacgaaggaaagctactgatcggctttgaatcagggacagtcgtgctttgggaccttaagtctaaaaaagcagattacagatatacttatgacgaagccatacattccgtagcctggcatcatgaagggaaacaatttatttgcagtcactccgacggaacgctaactatttggaatgtgcgcagccctgcgaagcccgtccaaacaatcactcctcacggcaagcagttgaaggacgggaagaaacccgagccctgtaaaccgatcctgaaggtggagttcaaaaccacacgctccggcgtttgttag

SEQ ID NO: 329904 - DNA, 927 bp, Artificial Sequence
  derived and/or modified sequence
atgcggaagtttaatatcagaaaggttctcgacggcctcacagccggtagctccagtgctagccagcaacaacaacagcagcacccaccaggaaatcgagaaccagagattcaggagacactgcagtccgaacacttccagctatgcaagactgtcagacacgggttcccttatcagccctccgcccttgctttcgatccggtgcagaaaatcttagccgtgggcacacagacaggcgctctgaggttgtttggtcgccctggggtagaatgctactgccaacacgactctggagcggctgttattcaactgcagttcctgatcaacgaaggagccctagtgtcagcattggctgatgacactttgcatctgtggaatctccggcaaaagagacctgccattctgcactcactcaagttctgcagagaacgtgtgacattctgccatttgccctttcagagtaagtggttgtatgtgggtaccgaaaggggcaatattcatattgtgaatgtcgagtcctttaccctcagtggctacgttatcatgtggaacaaggcaatcgaactctccagtaaaagccatcctggtcccgtggtacatatctccgacaatcccatggatgagggcaaattattgatcggattcgagagcggaacagtcgtgctctgggacttgaaaagtaagaaagccgactacagatatacgtacgacgaagccatacacagtgtcgcttggcatcatgagggcaaacagttcatatgctctcactctgacggaacactgacaatttggaatgtccgttcacccgctaaacccgtgcagacgattacacctcacgggaagcagctcaaggatgggaagaaaccagaaccatgtaagccgattctgaaggtcgaattcaaaacgaccaggagtggcgtctgctag

SEQ ID NO: 329905 - DNA, 2160 bp, Artificial Sequence
  derived and/or modified sequence
actcctccgtttccgcggtcgaagctgccttcggccccgggtggtctcccccgcccggggaccccctgtgcctcccctcccgggctgcgggggagcccctccgagaccatgaggaaattcaacatcaggaaggtgctggacggcctgaccgccggctcgtcctcggcgtcgcagcagcaacagcagcagcatccgcctgggaaccgggagccggagatccaggaaacgctccagtccgagcactttcagctctgcaagactgttcgccatggatttccctatcaaccctcagccctggcctttgatcctgtacagaagatcctggcagtgggaactcagactggtgctttaaggctctttggtcgtccaggagtagaatgttattgccagcatgacagtggagctgcagtaatccagctccagttcctgattaatgagggagcgcttgtgagtgccttggctgatgacaccttacacttatggaatttacgtcagaagaggcctgccatactacattcgcttaaattttgcagagaaagggttacattttgccatctgcctttccagagtaagtggctctatgtgggcactgaacgaggtaatatacatattgtcaatgtggagtccttcacactctcaggctacgtcattatgtggaataaagccattgaactgtcatctaaatctcacccaggacctgtggtccatataagtgataatccaatggacgagggaaagcttttgattggctttgaatctggaacagtagttttatgggacctcaaatcaaagaaagccgactacagatacacatatgatgaggctatccactctgttgcttggcatcatgaaggaaaacaatttatttgcagtcattcagatggcaccttgactatatggaatgtaaggtcccctgctaaaccagtacagacaatcactccacatggaaaacagttaaaggatgggaagaagccagaaccatgcaaacctatcctcaaggtggaattcaaaacgactagatctggggtttgttgagatccaacagatatattccaacaatagctatattccaacaatagattaaatgaactctaagaggtgtatcatctgtttgactcttgcatccttcattgtgtgacctgtagcatagttatctgacttctttgtggttcattttcctcacttatgacatagatggataaaatgtcagacattagttgtttaattgagatgataatgtatgtaaaacatttcaagcagtttctggtatataataaactctataaatgattgagaagccatttttttaaggaaatcccctgccaccaattgatttttatttgttacatttgtcctatggcaaaggaattaaaataggaaaagcatggtagcaaagaaagaaaaacaggaagaaaatctgaaaaaaaaaatctatgattataatacaaaatgaattggctaaatatttaaattaatagtgactaattaggttctattcttatctagttattttaacaaatattgactggcaacaaaggcagcagttcagggaagattttttcctctgtgcttcacctgttccagtttttactcctaaataatgttaatatttatgagttcaggtttcttcaagatggcagtaatacttttcctttcatagaattagaaatgaaaatttaaaatgttgctcttttgtaggcatttgtaaatacagtcatccactacctaatagcatcatgatcagtggtggactgtatatacaatgacggtcccaataaattataatattgtactttactgtaccttttctatgtttatatacacaaatacttaccattgtgttacagttgcctacaatacttagtacagtaatatgctatataggtttgtaacctaggagtaataggctatacaatatagcctagatatgtagtatatcatcgagatttgtgtaagttacactctatgatgttcatacaatgacaaaattgtccaatgatgcattcctcagaaggtatcctttgttgttaaatgacgtagttatactgttaactggatcagtaagatcaccattttgtaacagtgttctctactttctcaatttcttttgtcacctaagatgggaaattcagtaaattcaacatattcttcttttctctc

SEQ ID NO: 329906 - protein, 942 aa, Artificial Sequence
  derived and/or modified sequence
MDTKEEKKERKQSYFARLKKKKQAKQNAETASAVATRTHTGKEDNNTVVLEPDKCNIAVEEEYMTDEKKKRKSNQLKEIRRTELKRYYSIDDNQNKTHDKKEKKMVVQKPHGTMEYTAGNQDTLNSIALKFNITPNKLVELNKLFTHTIVPGQVLFVPDANSPSSTLRLSSSSPGATVSPSSSDAEYDKLPDADLARKALKPIERVLSSTSEEDEPGVVKFLKMNCRYFTDGKGVVGGVMIVTPNNIMFDPHKSDPLVIENGCEEYGLICPMEEVVSIALYNDISHMKIKDALPSDLPQDLCPLYRPGEWEDLASEKDINPFSKFKSINKEKRQQNGEKIMTSDSRPIVPLEKSTGHTPTKPSGSSVSEKLKKLDSSRETSHGSPTVTKLSKEPSDTSSAFESTAKENFLGEDDDFVDLEELSSQTGGGMHKKDTLKECLSLDPEERKKAESQINNSAVEMQVQSALAFLGTENDVELKGALDLETCEKQDIMPEVDKQSGSPESRVENTLNIHEDLDKVKLIEYYLTKNKEGPQVSENLQKTELSDGKSIEPGGIDITLSSSLSQAGDPITEGNKEPDKTWVKKGEPLPVKLNSSTEANVIKEALDSSLESTLDNSCQGAQMDNKSEVQLWLLKRIQVPIEDILPSKEEKSKTPPMFLCIKVGKPMRKSFATHTAAMVQQYGKRRKQPEYWFAVPRERVDHLYTFFVQWSPDVYGKDAKEQGFVVVEKEELNMIDNFFSEPTTKSWEIITVEEAKRRKSTCSYYEDEDEEVLPVLRPHSALLENMHIEQLARRLPARVQGYPWRLAYSTLEHGTSLKTLYRKSASLDSPVLLVIKDMDNQIFGAYATHPFKFSDHYYGTGETFLYTFSPHFKVFKWSGENSYFINGDISSLELGGGGGRFGLWLDADLYHGRSNSCSTFNNDILSKKEDFIVQDLEVWAFD

SEQ ID NO: 329907 - DNA, 2829 bp, Artificial Sequence
  derived and/or modified sequence
atggatacaaaagaagaaaagaaagaaagaaaacaaagctattttgccagactgaaaaaaaagaagcaagctaagcagaacgctgagacagcatcggccgtggcaacgcgcacgcacaccggaaaggaggataacaataccgtcgtgctcgaaccagacaaatgtaacatcgcggtagaagaagagtacatgaccgacgaaaaaaagaaacggaagtcaaatcagttaaaggagatccgtcggactgaactaaaacggtattatagcatcgatgacaatcagaacaagactcacgataaaaaagaaaagaagatggtggtgcagaagccacatggcacgatggagtacacagctgggaatcaagatacactcaacagcattgccttgaaattcaatatcactccaaataaactggtggagctgaataagctgtttacgcacaccattgttccagggcaggttctgtttgttcccgatgcgaactctccgtcttctacccttaggctatccagctcgtcacccggagctacagtcagcccctcttcctcagatgccgaatacgacaagttgccagacgcagatttggcaaggaaagcactgaagccaattgaacgagttctctcatccacgagtgaggaggacgagccaggcgtggtgaagtttctgaagatgaactgcaggtactttacagacgggaaaggggtggtcgggggagtgatgatagtgacaccaaacaatataatgtttgacccacacaagtcagacccacttgttattgaaaacggatgcgaggaatacggcctgatatgcccaatggaggaggtcgtgtcaatagctctgtataatgatatctcccacatgaagatcaaggatgccttgccctccgacctgccgcaggacctatgtcctctctataggcctggcgagtgggaggaccttgcctctgagaaggacattaacccgttttccaaattcaagtccatcaacaaggaaaagcgacagcagaacggggaaaagattatgacatccgattccagaccaatcgttcctctggaaaagtctacaggccatacacccactaagcccagcgggagcagcgtgagcgaaaaactcaagaaactggatagcagcagggaaaccagccacggatccccaacagtaacaaaactgagcaaggagccttccgatacttcgtccgcttttgagtccaccgctaaagagaatttcctgggcgaggacgacgatttcgtcgatcttgaggagctatcttctcaaactggggggggaatgcataagaaagataccttgaaagagtgtttgtcacttgatccagaagagcgcaagaaagccgaatctcagatcaacaatagtgcagtcgaaatgcaggtacagagtgccttagcttttcttgggaccgagaatgatgttgagctcaaaggagcccttgatttagagacctgcgagaagcaggacattatgccagaagtcgacaagcagagcggcagtccagaatccagagtagaaaacacactcaatatccacgaggacctcgataaggtcaagttgatcgaatactacctgacaaagaacaaggagggtccacaagtaagcgagaacctgcaaaagacagagctgtcagacggtaagagcatcgagcccggaggcattgatatcacactctcttcctcgctgagccaggctggtgacccaataacggagggtaacaaggaaccagacaagacttgggtgaagaagggcgaacccctcccagtgaaattgaacagttccacagaagctaatgtgattaaagaagctctagactctagcctggagtcgactctggacaactcttgccagggcgctcagatggacaacaaaagtgaagtgcagttgtggctcctgaagagaatacaagtgccaattgaagatattctacctagtaaagaggaaaaatcaaaaacaccccccatgtttctctgtattaaggtaggcaagcccatgcggaaatcattcgccactcacaccgctgcaatggtccaacaatacggcaagcggcggaagcagcccgagtactggttcgcagtcccaagggaaagagtggatcacttatacacgttttttgttcagtggagtccagacgtatatggcaaagatgcaaaggagcagggattcgtcgtggttgagaaagaggaactgaacatgattgacaactttttttctgagccgaccaccaagtcctgggagatcatcacagtcgaagaggcaaagcgacgcaagtcaacatgttcctattatgaggacgaagacgaggaggttctccccgtgctgcggcctcactctgctctgctggaaaatatgcatatcgaacagctggctagacggctgcctgcgcgggtgcaaggttatccctggaggttagcttacagcaccttagaacatggcacttccttgaagacgctttaccgtaagtcagctagcttagatagccctgttctgctggtcattaaggacatggataaccaaattttcggtgcctatgcaactcacccctttaagttctctgatcattactacggaaccggcgaaactttcctgtacacattctctccacatttcaaagtgtttaagtggtctggcgaaaatagctattttattaatggggatatctccagcctggaactgggaggtggcggcggacgctttggcctgtggctcgacgctgatttgtatcatggacgctccaactcgtgcagtacattcaacaatgatattctttctaaaaaggaagactttatcgttcaagatctagaggtatgggcatttgattag

SEQ ID NO: 329908 - DNA, 2829 bp, Artificial Sequence
  derived and/or modified sequence
atggacactaaggaggaaaagaaagagaggaaacagtcctacttcgcgaggctgaaaaagaaaaagcaggctaagcagaacgcagaaacagctagtgcagtggctaccagaacccataccggtaaagaggataacaacacggtggtgctggagccagacaagtgcaacatcgcagttgaggaagaatatatgaccgatgagaagaaaaaaaggaagagtaaccaactgaaggagattcgcagaacagagcttaagagatattactcaattgatgacaatcaaaacaaaactcacgacaagaaagagaaaaaaatggttgtgcaaaagccccacggaacaatggaatacaccgctggaaatcaagacactttgaactccatcgccctgaaattcaacattacacctaataaattagtggagttaaataaattattcacccacacaattgttccaggacaggtcctgtttgtgcccgacgctaactccccctctagtaccctgcgactgtcctcttcttctccaggggcaactgtgagcccatcatccagtgacgctgaatacgacaagctccctgatgcggacctggcgcgcaaagctctaaagccaatcgaacgtgtgctatcatcaacttcagaggaggatgagcctggagtagtcaaattcctgaagatgaactgtcgatacttcactgatggtaagggcgtggtgggcggggtgatgatcgtgactcccaacaacattatgtttgacccccacaagtccgacccgctggtgattgaaaatggctgtgaggagtatgggttgatatgccccatggaggaagtggtgagcatagctctatataacgatatctcccacatgaagataaaggacgccttgccgtcagacctgccccaagacctatgtccgctctaccgaccgggagagtgggaggacctggcctcagagaaggatataaacccatttagcaagtttaagagtattaacaaggaaaagcgccagcagaatggcgagaagattatgactagtgattctcggccaatagtgcctctggaaaagtccacaggccatacacctacaaagccctccggctcctccgtcagtgagaaactgaagaaactagactcgagtagagaaacctcccacgggagcccgaccgtgacaaagctttcaaaagagcccagcgatacatcttcggccttcgagtcaacagcaaaagagaatttccttggagaagacgacgacttcgtggacttagaggagctgagctcacagacgggcggtggaatgcacaaaaaagacacactgaaggagtgtctgtccctggatccagaagagaggaagaaagctgagtcacaaatcaataattccgccgttgagatgcaggtccagtcggcacttgcatttttggggaccgagaacgatgtggagctgaaaggcgcactcgacctagaaacatgcgaaaagcaagatatcatgcccgaagtggacaaacagtcaggcagcccagaaagccgagttgaaaatactctgaacattcatgaggacctcgacaaagtcaaacttatcgagtactacctcacgaagaacaaagagggaccacaggtctccgaaaatctgcaaaaaactgagctgtctgatgggaaaagtattgaaccagggggtatcgacattactttatcaagtagcttgtcccaggccggggaccctataacagagggaaacaaggagcctgataagacctgggtcaagaagggggaacctctacccgtgaagttgaactcctcaactgaggcaaacgtcataaaagaagcattggactcctcccttgagtcaactcttgataactcatgccagggagcgcagatggacaacaaatccgaggtccagttatggttgcttaagcgcatccaggtcccgattgaggacatactcccctccaaagaagagaagtcgaagacgccgcccatgtttctctgcatcaaagttgggaaacctatgcgaaaatcattcgcaacccacacagctgccatggtgcagcagtacggcaagcgccgtaaacagcctgagtattggttcgcagtgccccgggagagggttgatcacctgtatactttcttcgtgcaatggagtcctgacgtgtatgggaaagacgccaaggagcagggttttgtggtcgtggagaaggaggaattgaatatgatcgataactttttctcagaaccaaccactaagagttgggagatcattaccgtcgaggaggcaaagcgccggaaaagcacctgcagctattacgaggatgaggacgaagaggtgctcccagttctcaggcctcactccgcactcttagagaacatgcatatcgaacagctcgctcgcaggctccccgccagagtgcaaggctacccatggcggctggcttattccacactcgaacacggaacatccctcaagactttgtatcgcaagtcagcaagcctggactcccctgtactgctggtaataaaggatatggataatcagatctttggagcctatgccactcatcccttcaagttttccgaccactactatggaaccggagaaacatttctgtataccttcagcccgcactttaaagtctttaagtggtctggcgaaaatagctactttattaacggagatatatcatcattggagctgggcgggggaggggggcgcttcggcctgtggcttgatgccgacctgtaccacggccgaagtaacagttgctcaactttcaacaatgacatcctctcaaagaaggaagacttcatcgtgcaggatctcgaagtgtgggcgttcgattag

SEQ ID NO: 329909 - DNA, 2829 bp, Artificial Sequence
  derived and/or modified sequence
atggacaccaaggaggagaagaaggagaggaagcagagctactttgcccggctgaagaagaagaagcaggccaagcagaatgctgagacagccagcgctgtggccaccaggacccacacaggcaaggaggacaacaacacagtggtgctggagccagacaagtgcaacattgctgtggaggaggagtacatgacagatgagaagaagaagaggaagagcaaccagctgaaggagatccggaggacagagctgaagcgctactacagcattgatgacaaccagaacaagacccatgacaagaaggagaagaagatggtggtgcagaagccccacggcaccatggagtacacagctggcaaccaggacaccctgaacagcatcgccctgaagttcaacatcacccccaacaagctggtggagctgaacaagctgttcacccacaccatcgtgcccggccaggtgctgtttgtgcctgatgccaacagccccagcagcaccctgcggctgagcagcagcagccctggggccaccgtgagccccagcagcagtgatgctgaatatgacaagctgcctgatgctgacctggccaggaaggccctgaagcccatcgagcgggtgctgagcagcaccagtgaagaagatgagcccggggtggtgaagttcctgaagatgaactgccgctacttcacagatggaaaaggagtggtgggcggcgtgatgattgtgacccccaacaacatcatgtttgacccccacaagagtgaccccctggtgattgaaaatggctgtgaggagtatggcctcatctgccccatggaggaggtggtgtccatcgccctgtacaatgacatcagccacatgaagatcaaggatgccctgcccagcgacctgccccaggacctgtgccccctgtacagacctggagagtgggaggacctggccagcgagaaggacatcaaccccttcagcaagttcaagagcatcaacaaggagaagaggcagcagaatggagagaagatcatgaccagtgacagccggcccatcgtgcccctggagaagagcacaggccacacccccaccaagcccagcggcagctctgtgtctgagaagctgaagaagctggacagcagccgggagaccagccacggcagccccaccgtgaccaagctgagcaaggagcccagcgacaccagcagcgcctttgagagcacagccaaggagaacttcctgggggaggatgatgactttgtggacctggaggagctgagcagccagacaggaggcggcatgcacaagaaggacaccctgaaggagtgcctgagcctggaccctgaggagaggaagaaggccgagagccagatcaacaacagcgctgtggagatgcaggtgcagagcgccctggccttcctgggcacagaaaatgatgtggagctgaagggggccctggacctggagacctgtgagaagcaggacatcatgcctgaggtggacaagcagagcggcagccctgagagccgggtggagaacaccctgaacatccacgaggacctggacaaggtgaagctgattgagtactacctgaccaagaacaaggagggcccccaggtgtctgagaacctgcagaagacagagctgagtgatggcaagagcattgagcccggcggcatcgacatcaccctgagcagcagcctgagccaggccggggaccccatcacagagggcaacaaggagccagacaagacctgggtgaagaagggggagcccctgcctgtgaagctgaacagcagcacagaggccaacgtcatcaaggaggccctggacagcagcctggagagcaccctggacaacagctgccagggcgcccagatggacaacaagtctgaggtgcagctgtggctgctgaagaggatccaggtgcccatcgaggacatcctgcccagcaaggaggagaagagcaagaccccacccatgttcctgtgcatcaaggtgggcaagcccatgaggaagagctttgccacccacacagctgccatggtgcagcagtatggcaagaggaggaagcagcctgagtactggtttgctgtgccccgggagcgggtggaccacctgtacaccttctttgtgcagtggagcccagatgtgtatggcaaggatgccaaggagcagggctttgtggtggtggagaaggaggagctgaacatgattgacaacttcttcagcgagcccaccaccaagtcctgggagatcatcaccgtggaggaggccaagaggaggaagagcacctgcagctactatgaagatgaagatgaggaggtgctgcctgtgctgcggccccacagcgccctgctggagaacatgcacatcgagcagctggcccggcggctgcctgcccgggtgcagggctacccctggaggctggcctacagcaccctggagcacggcaccagcctgaagaccctgtacaggaagagcgccagcctggacagccctgtgctgctggtgatcaaggacatggacaaccagatctttggagcctatgccacccaccccttcaagttcagtgaccactactacggcaccggggagaccttcctgtacaccttcagcccccacttcaaggtgttcaagtggagcggggagaacagctacttcatcaacggggacatcagcagcctggagctgggcggcggcggcggccgcttcggcctgtggctggatgctgacctgtaccacggccgcagcaacagctgcagcaccttcaacaatgacatcctgagcaagaaggaggacttcatcgtgcaggacctggaggtgtgggcctttgattag

SEQ ID NO: 329910 - DNA, 2829 bp, Artificial Sequence
  derived and/or modified sequence
atggacaccaaggaggagaagaaggagcggaagcagagctacttcgcacgactgaaaaagaaaaagcaagcaaagcagaacgctgagaccgccagcgctgtggccacgaggactcatactggtaaggaggataacaataccgtggttctagagcccgacaagtgcaacatcgccgtggaggaagagtatatgacagacgagaaaaagaagcggaagagtaaccagctgaaggagatcaggaggactgagttgaagagatactattccattgacgacaaccagaacaaaacacatgacaagaaggaaaagaagatggtcgtccagaagccacacggcaccatggaatatacggcaggtaatcaggatacactgaacagcattgcgctgaagtttaatataactcccaataaactggtggagttgaataaactgttcacacacactatagttcccggccaagtgctttttgtcccagacgccaacagcccctcttctactctgaggctctcttcctcctcccctggtgccaccgtctcccctagcagctcggacgcagagtatgataaactacccgatgctgatctggctcgtaaggccctgaagcctatcgaaagagtcctttcctccaccagcgaagaagatgagcctggggtggttaagtttctgaaaatgaattgcagatacttcacagacggaaagggagtggtgggaggggtaatgatagtgactcccaacaatattatgttcgaccctcacaaatctgatccgctggtgatagaaaatggatgcgaagagtacggactgatctgtcccatggaagaggtggttagtatagccctgtacaatgacatttctcatatgaagattaaagacgccctcccctccgacctaccacaggatctgtgtccactttaccgcccaggggaatgggaggatctggctagcgagaaggatattaaccccttctcgaagttcaaaagcatcaataaggagaaacgtcaacagaatggggaaaagatcatgacgtctgacagccgacccattgtaccactcgaaaagagtaccgggcacactccgactaagcctagcgggtcctccgtgagcgagaagttgaaaaaactagattctagccgagagaccagtcatgggagtcctacagtgactaagctctccaaagagccatctgatacgagtagcgcttttgagtccaccgctaaggagaacttcctaggagaagatgatgatttcgtggatttggaggaattaagttctcagacaggcggtgggatgcacaagaaggacactctcaaggaatgcctctcgctggacccagaggaacgcaaaaaggcggaatctcagatcaacaacagcgccgtggagatgcaggtgcagtcagccctagctttcctgggtacagagaatgacgttgagttaaaaggcgccttggacctggagacttgtgagaagcaggatatcatgcctgaggtggataagcagtcaggctccccagagtctagggtggaaaatacactcaatatccacgaagatttggataaggtcaagctgattgaatactacctcaccaagaataaggaagggccccaggtatccgagaacctgcagaagacagagctcagtgacggaaaatcaatcgaaccgggtgggatagacatcactctctcaagctctctgtctcaggctggagatccaatcacggagggtaacaaggaacctgacaagacttgggttaagaagggcgagcctctccccgtgaaactaaacagcagcactgaggccaatgtcatcaaagaagcacttgactcatcactcgagagtaccctcgataactcctgccaaggtgctcagatggataataagtccgaggtacagctctggctgctgaagcgcatccaagtccccattgaagatatcctgcctagcaaagaggaaaaaagcaaaaccccgccaatgttcctatgcatcaaggtgggaaagcccatgagaaaaagttttgctacccacacggctgccatggttcaacagtatgggaagcgccggaagcagcctgaatattggtttgccgtaccccgtgagagagtggaccatttgtacacgttcttcgtgcagtggtccccagatgtctacggcaaggatgccaaagaacaggggttcgtggtggttgagaaggaggagctgaatatgattgacaactttttctccgaacccaccaccaagtcatgggagataatcaccgtggaggaggccaagcggcgaaaatccacctgctcctactatgaggatgaggatgaagaggtgcttccagtccttcgacctcactctgcattattggaaaacatgcacatcgagcagctggcacggcggttgcctgctcgtgttcagggatatccatggaggctggcttactctacactggagcacggcacaagcctcaagaccttgtacagaaaaagtgcaagtctcgattcccccgtcttgttggtgattaaagatatggataaccagatttttggcgcatatgccactcacccattcaagtttagtgatcactactatggcactggcgaaacattcctgtatacgttctctccgcacttcaaagtgtttaagtggtctggggaaaactcgtactttataaatggtgacatttcctcgttggagttgggaggtggcggcggaagattcggcctttggctcgacgcggatctataccatggccgatccaatagttgcagcacctttaacaatgacatcctgagcaaaaaagaggactttatcgtacaggacctcgaagtttgggctttcgattag

SEQ ID NO: 329911 - DNA, 2829 bp, Artificial Sequence
  derived and/or modified sequence
atggacaccaaggaggagaagaaggagcggaagcagagctacttcgcccggctcaagaagaagaagcaggcgaagcagaacgcggagacagcatctgcggtggcgacccgcacacatactggcaaggaagacaacaacaccgtcgtcttggagcctgataaatgtaatatcgcagtagaggaagaatacatgaccgacgagaaaaagaagcgaaagtctaaccagctcaaggaaatcagacgaaccgaacttaagagatactacagtatagacgacaatcagaataaaactcatgacaaaaaggaaaaaaaaatggtcgtacagaaaccacacggcactatggagtacactgctggcaaccaggacaccctgaactccatcgcacttaaattcaacataacccctaacaaactggtggaactgaataagctttttactcacacaattgtacccgggcaagtcctgttcgttccagacgccaatagcccctcctccactctgcgcctgagcagctcatccccaggcgccacagtgtctcctagctctagtgacgcggagtatgacaaactcccagatgccgacctcgcccgaaaagcgctcaagcctatcgagcgggtactatcgagtacctcagaggaagacgagcctggtgtagtgaagttcctgaaaatgaactgtcgctacttcactgatgggaagggagtcgtaggcggagtgatgatagtcacccctaataacattatgttcgatccccacaagtcagacccactcgttatagaaaatggatgtgaagaatacggcctgatctgcccaatggaggaagttgtgtccattgctttgtacaacgacatttctcacatgaaaatcaaagacgcactgccgagcgacctccctcaggatctgtgtccactctacagacccggcgagtgggaggaccttgctagtgagaaggacatcaatcctttcagcaagtttaaatctatcaataaagagaagcgacagcagaatggagagaaaataatgactagcgactcgcggccaatcgtaccccttgaaaaaagcacaggacatacacctacaaagcctagtgggtcctcagtctcagaaaagttaaaaaaactggatagttcccgggagacttcccatgggtcacctactgtgactaagctgtccaaagagccctctgacacatctagcgcctttgagtccacggccaaggaaaattttctgggtgaggacgatgacttcgttgacttagaagagttgtcatcccaaacaggaggcgggatgcataagaaagacactttaaaggagtgtctgtctttggatcccgaagaacgaaagaaagcagagtcccagatcaataatagtgcagttgagatgcaggtccaatccgcccttgctttcctgggcaccgagaatgacgttgaacttaaaggcgcgctcgatttagaaacttgcgagaaacaggacatcatgccagaagtagacaagcaatcaggttcacctgagagtcgagtcgagaacaccctaaatatccatgaagacctcgacaaggtcaaattgattgagtactacctgacaaagaacaaagaaggcccgcaggtatcagagaatctccagaagaccgagctgtccgacggcaagagcatcgagcctggcggaatcgatatcactctgtcttcctccctaagccaagcgggagaccccatcaccgaagggaataaggagccagataaaacctgggtgaaaaagggggagcccctgccagttaaactgaactcttccaccgaagcgaatgtgattaaagaggcgctggattcatctctggaatccacccttgataattcctgtcaaggtgcccagatggataacaaatctgaggttcaattatggttactgaagcgcatccaggtaccgatcgaggacattctgccatctaaagaggaaaagagcaagacccccccaatgttcctttgtatcaaggtgggtaagccaatgagaaaaagcttcgccacgcacaccgcagcgatggtgcagcagtatggaaagaggagaaagcagccggagtactggttcgctgtcccaagagaaagagtggaccatctctataccttttttgtccagtggtctccggatgtgtatgggaaagacgccaaggaacagggattcgtggttgtcgagaaagaggagctgaacatgatcgacaactttttcagcgagccaactacgaagtcttgggagattattactgtggaagaggccaagcgacgtaaatccacttgcagctactacgaggacgaggatgaagaggtactacccgtgctcaggcctcatagtgcccttctcgaaaatatgcacatcgaacagttagctcggcgccttccagctcgtgtgcagggctatccctggcgcttggcttactccacgttggaacacgggacttctcttaagaccctgtacagaaaaagcgcctccctcgattcccccgtcctgctcgtgattaaggacatggacaaccagatcttcggcgcctatgcaacacacccttttaagttttcggatcattactacggcaccggtgaaacatttctgtacaccttttccccacacttcaaggtattcaagtggtcaggggagaactcgtactttataaacggggatataagctctctagaattggggggaggcggtggtcgctttgggttgtggcttgacgcagacctctatcatgggaggtctaatagttgctcgacttttaataacgatattctctccaagaaggaagatttcatcgtgcaggacctagaggtatgggccttcgactag

SEQ ID NO: 329912 - DNA, 5521 bp, Artificial Sequence
  derived and/or modified sequence
agaaaccctcataaagtagatgcagagggcagtaagatataactcaactttgaaaatgtcagccgttatagttgaagaaatctgacccaagagacttcgctccgctgcaagatggaaggaagcttaagtaagacataaatttgtaatgaacttgctcacaacatccgccgccactgtgacttgcagtcatcatccattaccacaaaattagttgcaggatggctactcgtatccctccacacatgatcatcagtatttgcctcctgtgtcccaaccggcctgagtcaaggttacgactcactgattaaaaagagggactttttcaaatactttgcacttttgattgtgtattatggataccaaggaagagaagaaggaacggaaacaaagttattttgctcgactgaaaaagaaaaaacaagccaaacaaaatgcagagacagcctcagctgtagctacaaggactcatactgggaaggaagataataatacagtagttttagagccagacaagtgcaacattgctgtggaagaggaatatatgactgatgagaaaaaaaagagaaaaagtaatcagttaaaggagatcaggcgtacagaactaaagagatattatagtattgatgacaatcaaaacaaaacacatgataaaaaagagaagaagatggtggttcagaagccccatgggactatggaatacactgctggaaaccaggacaccctaaactccatagcactgaaatttaacatcactcccaataaattggtggaactgaataaacttttcacacatactattgttccaggccaggtcctttttgtgccagatgccaactctccttccagtaccttaaggctatcatcatccagtcctggtgctactgtctctccttcatcatcagatgcagaatatgataaattgcctgatgctgacttagcacgaaaggccttgaaacccattgaaagagtcttatcgtctacttctgaagaagatgagccaggtgtggtgaaatttttaaaaatgaattgtcgatacttcaccgatggaaagggtgtggttggcggtgttatgatagtgactcctaacaacatcatgtttgaccctcataaatctgatcctctggttattgaaaatgggtgtgaggagtatggtctcatctgccccatggaagaggttgtttccattgcgctctacaatgacatttctcacatgaagatcaaagatgccttgccatctgacctacctcaggatctttgtcctctgtacaggcctggagaatgggaagacctggcttcagaaaaggatatcaacccattcagtaagttcaaatctatcaacaaggaaaaacgacagcagaatggagagaaaattatgacttcggattccagaccaatagtacctttggagaagtccacaggacatacacctacaaagccctcaggcagctctgtgtcagagaaattaaagaaactggactcctctagggagacatcccatggttctcccacagtgactaagctcagcaaggaaccttccgacacttcttctgcatttgaatctacagccaaagaaaactttctaggggaagatgatgattttgttgacttggaagaactttcttctcaaactggtggtggaatgcacaaaaaagacaccttgaaggagtgcctttctcttgacccagaggaacgaaagaaagctgagtcacaaataaacaattctgccgtggaaatgcaggtgcagtcagccctagcctttttgggaacagagaatgatgttgaactgaagggggcgctagatttagaaacctgtgagaagcaagatataatgccagaagtggacaagcagtctggttcgccagaaagccgagtagaaaacacactgaacatacatgaagatttagataaagttaaactcattgaatattacctgactaagaacaaagaagggccacaggtatctgaaaatttgcagaaaacagaattaagtgatggaaaaagtattgaaccagggggaatagacattacccttagtagttctctttcccaggcgggtgatcccataactgagggcaataaagagccagataagacctgggtgaaaaagggagagcccctcccggtaaaactgaactcttctacagaagcaaatgtgattaaagaggctctagactcctctttggaatctactctggacaacagctgtcaaggtgcacaaatggataataaatctgaagttcagttgtggctgttaaagagaattcaggtacccattgaagatatacttccttcaaaagaagaaaaaagcaagaccccacccatgttcctgtgcatcaaagtgggaaaaccaatgagaaaatcctttgccactcacactgcagccatggtccagcagtacggcaaacggagaaagcagccagagtactggtttgctgttcctcgggagagggtggatcatttgtacacattctttgttcagtggtctcccgatgtctatggaaaagatgccaaagagcaaggctttgtggtggtggagaaggaagaactgaacatgattgacaacttcttcagtgagccaacaaccaagagctgggagatcatcactgttgaagaggcaaagcgcaggaagagcacatgcagctactatgaagacgaggacgaagaggtgctgcctgtcctacggccccacagcgcgctcctggagaatatgcacatcgagcagctggcccgacgccttcctgcaagggtgcaagggtatccatggagactggcctatagcacgttagagcacgggaccagcttaaagacgctctaccggaaatcggcatcactagacagtcctgtcctattggtcatcaaagatatggataatcagatttttggagcatatgcaactcatcctttcaagttcagtgaccactattatggcacaggcgaaacttttctctacacattcagccctcattttaaggtctttaagtggagtggagaaaattcatactttatcaatggagacataagttctttagaacttggtggtggagggggacgatttggtttatggctagatgctgatttataccacggacgaagcaactcttgcagcactttcaataatgatattctttccaaaaaggaagacttcatagttcaggatctggaggtgtgggcatttgattgaaattcagactgccttaaaatataacattaaaaagactgggttcgatcagccctcctaaagctggctggaaaaagaagccccagcccagcctgcctcatcccaccccaatgcttcctttctgccatcatctcagagcatgatcacattgcagaaagattctggaaggtccatgtagagggcagacattgaagaaagaaacttaaaatccaggttgttgaaaagactttgtactcccacttcctccaaatccatacagtgaggaatcagagtgtttatagatatatgagttgaatgcaatttttatttttggtaactgtgaaaaataagatactgtggatatatacatgccttgtgtatttatcagcataattttcattaccaaaatgtacagctattatttgccatggaaaaggttagtctcatttagaaaaatcgaaagtgcacagcacttaaagggaatatatgaggtttttttttttttaaaaaaaaacttttatttattatttgtagtatattgtctgaaatgtgtcggcagttttttttcttttaatgtgtcaaatcttgaaatattaaatgtatacattttgtgctatgttttgggaacaaatctgtttgatttatatagttttatattgaattttttttgccctgattgtttagggtgataggtcttaagcagcatatatctatatatctgtatgtgggtatatagagatatatgtgtgtgtgtatgtatatgtacatatacatatatatgagtgtataattctaaatttctaaaaactcattatgaatgttcatcaatttgactattataggccagctttccatttagtcaataaaagcgtacatttttagttacttaccttgaacatattcgtgtgaaaaagaatacatcatttctcacagtcttaagttgatatttatagaaatgaatacctttgtgaacctagacttagaacaaatcctgcttttgaaaaaaaatgttttgcttcttacaaaatcatttgtgttaataacaaaaactttattttcggagtgttctttgtataacttttccaagcttttacattaacgagcaggcctctgtcttaaaagggactcagtatattaatttctgcattttttaaatcaaatgaaaaacgtcaaattggaccaattgtcttggtttcttgattcatttatttgagaaaaaaacaatacaaagaaatgcattcatatcaaaattggaatagaaaggaaaacctatttttaagatatcaacctattttcacatcataaaacatctattacataaaataaaggtccaggcatagtggctcttgcctgtaatcccagcactttgggaggccgaggcaggtggatcactcaaggtcacaagtttgagaccagtctggccaacatggtgaaaccccatctctactaaaagtacaaatattagccgactatgtggcgggcacctgtaatcccacctactcgggaggctgaggcaggagaattgcttgaatccgggaagcagaggttgtagtgagccaagatcgtgccactgcactctatcctgggtaacagcgagactctgtcttaaaaataataacaataataataataataaagacttacttaaccaatattattgattaccagacttttatgaaagccaaagactgcttgctagtaggaaaaaatttcaaataataaccaaagctgaaaaatggtctgtcataaattatttccccggtaatttttgaaaggaaaaatgtataacaagtactatttacatatctgcatttaaaaaagcaattcttagaatacttcctttacattattctcctattttagacattttgtgaaagagaacaaattgtccagtggcctcctgtcagatcaacaattattatactccttaattccatgcaaatttaaatgaatgctataaaattttaaatctgtagcctgggtgtacgtttcactcaagttctcctactgaggactcttgactaacagcatactggcagtttcaccttaacctgctcgttaaataatgtgttggtgtgagatatcaggaatgtctcatgatatcacgtttaccatttacaccatctgcaaccatatgctattaataaaatggaaaaaaacaaaatggtcattttgcatatacttcactctgacctagtttagtccatgatactataattgtgagagcatatccagatgctgtgttctctatgtaaaacagtattgtccattcagaaatgtgtgacccttcatttatggatattgactatatgtaatgcagtgctatcccaatattttcaataaaggactttatgcattcagtga

SEQ ID NO: 329913 - DNA, 5455 bp, Artificial Sequence
  derived and/or modified sequence
cgatccggacgcggggccccgcgggcgcgcgcctcggagctcccgcctcctcctcttgctcctcctcggcgtacggtcctcccctgacccctccttccacccgccgagaggatgcgctccccggcgcccagcagcagaggccaccgctcccagaaatgcatgcgaccgatccccttctcccggaccccaggagccggcgcccccgccctgtagggttacgactcactgattaaaaagagggactttttcaaatactttgcacttttgattgtgtattatggataccaaggaagagaagaaggaacggaaacaaagttattttgctcgactgaaaaagaaaaaacaagccaaacaaaatgcagagacagcctcagctgtagctacaaggactcatactgggaaggaagataataatacagtagttttagagccagacaagtgcaacattgctgtggaagaggaatatatgactgatgagaaaaaaaagagaaaaagtaatcagttaaaggagatcaggcgtacagaactaaagagatattatagtattgatgacaatcaaaacaaaacacatgataaaaaagagaagaagatggtggttcagaagccccatgggactatggaatacactgctggaaaccaggacaccctaaactccatagcactgaaatttaacatcactcccaataaattggtggaactgaataaacttttcacacatactattgttccaggccaggtcctttttgtgccagatgccaactctccttccagtaccttaaggctatcatcatccagtcctggtgctactgtctctccttcatcatcagatgcagaatatgataaattgcctgatgctgacttagcacgaaaggccttgaaacccattgaaagagtcttatcgtctacttctgaagaagatgagccaggtgtggtgaaatttttaaaaatgaattgtcgatacttcaccgatggaaagggtgtggttggcggtgttatgatagtgactcctaacaacatcatgtttgaccctcataaatctgatcctctggttattgaaaatgggtgtgaggagtatggtctcatctgccccatggaagaggttgtttccattgcgctctacaatgacatttctcacatgaagatcaaagatgccttgccatctgacctacctcaggatctttgtcctctgtacaggcctggagaatgggaagacctggcttcagaaaaggatatcaacccattcagtaagttcaaatctatcaacaaggaaaaacgacagcagaatggagagaaaattatgacttcggattccagaccaatagtacctttggagaagtccacaggacatacacctacaaagccctcaggcagctctgtgtcagagaaattaaagaaactggactcctctagggagacatcccatggttctcccacagtgactaagctcagcaaggaaccttccgacacttcttctgcatttgaatctacagccaaagaaaactttctaggggaagatgatgattttgttgacttggaagaactttcttctcaaactggtggtggaatgcacaaaaaagacaccttgaaggagtgcctttctcttgacccagaggaacgaaagaaagctgagtcacaaataaacaattctgccgtggaaatgcaggtgcagtcagccctagcctttttgggaacagagaatgatgttgaactgaagggggcgctagatttagaaacctgtgagaagcaagatataatgccagaagtggacaagcagtctggttcgccagaaagccgagtagaaaacacactgaacatacatgaagatttagataaagttaaactcattgaatattacctgactaagaacaaagaagggccacaggtatctgaaaatttgcagaaaacagaattaagtgatggaaaaagtattgaaccagggggaatagacattacccttagtagttctctttcccaggcgggtgatcccataactgagggcaataaagagccagataagacctgggtgaaaaagggagagcccctcccggtaaaactgaactcttctacagaagcaaatgtgattaaagaggctctagactcctctttggaatctactctggacaacagctgtcaaggtgcacaaatggataataaatctgaagttcagttgtggctgttaaagagaattcaggtacccattgaagatatacttccttcaaaagaagaaaaaagcaagaccccacccatgttcctgtgcatcaaagtgggaaaaccaatgagaaaatcctttgccactcacactgcagccatggtccagcagtacggcaaacggagaaagcagccagagtactggtttgctgttcctcgggagagggtggatcatttgtacacattctttgttcagtggtctcccgatgtctatggaaaagatgccaaagagcaaggctttgtggtggtggagaaggaagaactgaacatgattgacaacttcttcagtgagccaacaaccaagagctgggagatcatcactgttgaagaggcaaagcgcaggaagagcacatgcagctactatgaagacgaggacgaagaggtgctgcctgtcctacggccccacagcgcgctcctggagaatatgcacatcgagcagctggcccgacgccttcctgcaagggtgcaagggtatccatggagactggcctatagcacgttagagcacgggaccagcttaaagacgctctaccggaaatcggcatcactagacagtcctgtcctattggtcatcaaagatatggataatcagatttttggagcatatgcaactcatcctttcaagttcagtgaccactattatggcacaggcgaaacttttctctacacattcagccctcattttaaggtctttaagtggagtggagaaaattcatactttatcaatggagacataagttctttagaacttggtggtggagggggacgatttggtttatggctagatgctgatttataccacggacgaagcaactcttgcagcactttcaataatgatattctttccaaaaaggaagacttcatagttcaggatctggaggtgtgggcatttgattgaaattcagactgccttaaaatataacattaaaaagactgggttcgatcagccctcctaaagctggctggaaaaagaagccccagcccagcctgcctcatcccaccccaatgcttcctttctgccatcatctcagagcatgatcacattgcagaaagattctggaaggtccatgtagagggcagacattgaagaaagaaacttaaaatccaggttgttgaaaagactttgtactcccacttcctccaaatccatacagtgaggaatcagagtgtttatagatatatgagttgaatgcaatttttatttttggtaactgtgaaaaataagatactgtggatatatacatgccttgtgtatttatcagcataattttcattaccaaaatgtacagctattatttgccatggaaaaggttagtctcatttagaaaaatcgaaagtgcacagcacttaaagggaatatatgaggtttttttttttttaaaaaaaaacttttatttattatttgtagtatattgtctgaaatgtgtcggcagttttttttcttttaatgtgtcaaatcttgaaatattaaatgtatacattttgtgctatgttttgggaacaaatctgtttgatttatatagttttatattgaattttttttgccctgattgtttagggtgataggtcttaagcagcatatatctatatatctgtatgtgggtatatagagatatatgtgtgtgtgtatgtatatgtacatatacatatatatgagtgtataattctaaatttctaaaaactcattatgaatgttcatcaatttgactattataggccagctttccatttagtcaataaaagcgtacatttttagttacttaccttgaacatattcgtgtgaaaaagaatacatcatttctcacagtcttaagttgatatttatagaaatgaatacctttgtgaacctagacttagaacaaatcctgcttttgaaaaaaaatgttttgcttcttacaaaatcatttgtgttaataacaaaaactttattttcggagtgttctttgtataacttttccaagcttttacattaacgagcaggcctctgtcttaaaagggactcagtatattaatttctgcattttttaaatcaaatgaaaaacgtcaaattggaccaattgtcttggtttcttgattcatttatttgagaaaaaaacaatacaaagaaatgcattcatatcaaaattggaatagaaaggaaaacctatttttaagatatcaacctattttcacatcataaaacatctattacataaaataaaggtccaggcatagtggctcttgcctgtaatcccagcactttgggaggccgaggcaggtggatcactcaaggtcacaagtttgagaccagtctggccaacatggtgaaaccccatctctactaaaagtacaaatattagccgactatgtggcgggcacctgtaatcccacctactcgggaggctgaggcaggagaattgcttgaatccgggaagcagaggttgtagtgagccaagatcgtgccactgcactctatcctgggtaacagcgagactctgtcttaaaaataataacaataataataataataaagacttacttaaccaatattattgattaccagacttttatgaaagccaaagactgcttgctagtaggaaaaaatttcaaataataaccaaagctgaaaaatggtctgtcataaattatttccccggtaatttttgaaaggaaaaatgtataacaagtactatttacatatctgcatttaaaaaagcaattcttagaatacttcctttacattattctcctattttagacattttgtgaaagagaacaaattgtccagtggcctcctgtcagatcaacaattattatactccttaattccatgcaaatttaaatgaatgctataaaattttaaatctgtagcctgggtgtacgtttcactcaagttctcctactgaggactcttgactaacagcatactggcagtttcaccttaacctgctcgttaaataatgtgttggtgtgagatatcaggaatgtctcatgatatcacgtttaccatttacaccatctgcaaccatatgctattaataaaatggaaaaaaacaaaatggtcattttgcatatacttcactctgacctagtttagtccatgatactataattgtgagagcatatccagatgctgtgttctctatgtaaaacagtattgtccattcagaaatgtgtgacccttcatttatggatattgactatatgtaatgcagtgctatcccaatattttcaataaaggactttatgcattcagtgattttctttc

SEQ ID NO: 329914 - DNA, 2271 bp, Artificial Sequence
  derived and/or modified sequence
gcagagggcagtaagatataactcaactttgaaaatgtcagccgttatagttgaagaaatctgacccaagagacttcgctccgctgcaagatggaaggaagcttaagtaagacataaatttgtaatgaacttgctcacaacatccgccgccactgtgacttgcagtcatcatccattaccacaaaattagttgcaggatggctactcgtatccctccacacatgatcatcagtatttgcctcctgtgtcccaaccggcctgagtcaaggttacgactcactgattaaaaagagggactttttcaaatactttgcacttttgattgtgtattatggataccaaggaagagaagaaggaacggaaacaaagttattttgctcgactgaaaaagaaaaaacaagccaaacaaaatgcagagacagcctcagctgtagctacaaggactcatactgggaaggaagataataatacagtagttttagagccagacaagtgcaacattgctgtggaagaggaatatatgactgatgagaaaaaaaagagaaaaagtaatcagttaaaggagatcaggcgtacagaactaaagagatattatagtattgatgacaatcaaaacaaaacacatgataaaaaagagaagaagatggtggttcagaagccccatgggactatggaatacactgctggaaaccaggacaccctaaactccatagcactgaaatttaacatcactcccaataaattggtggaactgaataaacttttcacacatactattgttccaggccaggtcctttttgtgccagatgccaactctccttccagtaccttaaggctatcatcatccagtcctggtgctactgtctctccttcatcatcagatgcagaatatgataaattgcctgatgctgacttagcacgaaaggccttgaaacccattgaaagagtcttatcgtctacttctgaagaagatgagccaggtgtggtgaaatttttaaaaatgaattgtcgatacttcaccgatggaaagggtgtggttggcggtgttatgatagtgactcctaacaacatcatgtttgaccctcataaatctgatcctctggttattgaaaatgggtgtgaggagtatggtctcatctgccccatggaagaggttgtttccattgcgctctacaatgacatttctcacatgaagatcaaagatgccttgccatctgacctacctcaggatctttgtcctctgtacaggcctggagaatgggaagacctggcttcagaaaaggatatcaacccattcagtaagttcaaatctatcaacaaggaaaaacgacagcagaatggagagaaaattatgacttcggattccagaccaatagtacctttggagaagtccacaggacatacacctacaaagccctcaggcagctctgtgtcagagaaattaaagaaactggactcctctagggagacatcccatggttctcccacagtgactaagctcagcaaggaaccttccgacacttcttctgcatttgaatctacagccaaagaaaactttctaggggaagatgatgattttgttgacttggaagaactttcttctcaaactggtggtggaatgcacaaaaaagacaccttgaaggagtgcctttctcttgacccagaggaacgaaagaaagctgagtcacaaataaacaattctgccgtggaaatgcaggtgcagtcagccctagcctttttgggaacagagaatgatgttgaactgaagggggcgctagatttagaaacctgtgagaagcaagatataatgccagaagtggacaagcagtctggttcgccagaaagccgagtagaaaacacactgaacatacatgaagatttagataaagttaaactcattgaatattacctgactaagaacaaagaagggccacaggtatctgaaaatttgcagaaaacagaattaagtgatggaaaaagtattgaaccagggggaatagacattacccttagtagttctctttcccaggcgggtgatcccataactgagggcaataaagagccagataagacctgggtgaaaaagggagagcccctcccggtaaaactgaactcttctacagaagcaaatgtgattaaagaggctctagactcctctttggaatctactctggacaacagctgtcaaggtgcacaaatggataataaatctgaagttcagttgtggctgttaaagagaattcaggtacccattgaagatatacttccttc

SEQ ID NO: 329915 - DNA, 2829 bp, Artificial Sequence
  derived and/or modified sequence
atggataccaaggaggagaaaaaggagaggaagcagtcatacttcgctcgcttgaagaagaagaaacaggccaagcaaaacgccgaaacagccagcgctgtggctacacgcactcacaccggcaaagaagataacaacacagtagtattggagcccgataagtgcaatatagctgtggaggaagaatatatgacagacgagaaaaaaaagcggaaaagcaatcagctgaaagagattcgccgaacagaactgaagaggtattattccattgacgacaaccagaacaagactcacgataaaaaggaaaagaaaatggtagtgcagaaaccccacgggacaatggagtacacggcaggcaaccaggacaccctgaactcaatcgctctcaaatttaatattacacctaacaaactcgttgaactgaacaagctgtttactcacactatcgtccctggacaggtcctattcgtccccgatgcaaatagtccgagttctacgttaagactctcatcttcgtctccaggggctactgtgtcaccttcatcttctgatgcagagtatgataaattacccgatgctgatttagcccgaaaagcactgaagcccattgaacgggtgctgtcaagtactagcgaggaggacgagcccggtgtggttaagtttctcaagatgaattgtcgctactttactgacgggaaaggcgtggtaggtggtgtgatgatcgtcactccaaataacataatgtttgatccacacaagagcgaccctctcgtgatcgagaatggctgcgaggaatacggcctgatctgccccatggaggaggtggtgtctatcgccctgtacaatgacatttctcacatgaaaatcaaggatgcgcttccctctgaccttccgcaagacttgtgcccactttatagacccggagaatgggaggacctcgcaagcgaaaaggacattaaccccttctctaagtttaaatctatcaacaaggaaaagcgccagcagaatggagagaagattatgacttcagatagcaggcctatcgtccccctggaaaaaagtacgggtcacacccctaccaaaccgagcggttctagtgtctccgaaaaattaaaaaaattggatagctcaagagagactagccacggaagtcccacggttacaaagctctcaaaggagcccagtgacacttcaagtgcctttgaatcaaccgctaaggaaaatttcctgggtgaggacgacgatttcgttgatctagaagaactctccagtcagacaggaggcggtatgcacaagaaagacacattaaaggagtgcctctcactggaccctgaggagcgaaagaaagccgaatcacagatcaacaattccgctgtggagatgcaagtccagtctgctttagcgtttctgggaactgaaaacgatgtggagcttaagggcgcactggatctcgaaacttgcgagaaacaggacattatgcctgaagtggacaaacaatccggtagcccagagtcacgggtcgagaacacgctgaatatacatgaagaccttgacaaggtgaaactgatcgaatactatctgacaaagaacaaagaggggccacaggtctccgaaaatctccaaaagacggaactttctgatggcaagtctattgagcccggtggcattgatatcactttgtcctccagcctttcccaggctggcgacccaatcactgaagggaataaagaaccagataaaacatgggttaagaaaggcgaacctctgcccgttaaattgaactcgtccacagaggctaacgtcattaaggaagccttggattccagcctggaaagcacccttgacaactcctgtcaaggtgcccagatggataacaagagcgaggttcagttgtggctgttaaagagaattcaagtacccatagaggacattttaccaagtaaggaagaaaaatcgaagacccctccaatgtttctgtgtattaaggtggggaaaccaatgcggaaatcgtttgctacgcacacggcggctatggttcagcagtacgggaagcgcagaaagcagcccgagtattggttcgccgtgccacgagagagggtcgatcatctgtatactttctttgttcaatggtcacctgatgtttacggcaaagacgcaaaagagcagggctttgtcgtggtggaaaaagaggaactgaatatgatcgacaacttcttctcggaacccaccaccaaatcatgggagatcattactgtggaagaggcgaagcgcaggaagagtacatgctcatattacgaggacgaggacgaggaggtgcttccggtgcttcgccctcactcggcactcctggaaaacatgcacattgagcagctcgcccgtaggttgcccgcacgcgtgcagggatacccctggaggctggcatatagcactctcgagcatggcacttccctcaaaaccctctaccgcaagagcgcgagccttgattcccccgtcctcctcgtaatcaaggacatggacaatcagatctttggtgcctacgccacccatcccttcaagttctctgaccactattatgggacaggggagaccttcttgtacacatttagccctcacttcaaggtttttaagtggtcaggtgagaacagttacttcattaacggagacatttcgtccctggaactcggcggaggaggtggcagatttggactatggttggatgcggacctatatcatggtcgcagcaacagctgtagtacctttaacaacgatattctgagcaagaaagaagacttcatagtgcaggatttggaggtgtgggctttcgattag

SEQ ID NO: 329916 - DNA, 2829 bp, Artificial Sequence
  derived and/or modified sequence
atggatactaaggaggagaagaaagagagaaaacaatcctatttcgctagactcaaaaagaaaaaacaagccaaacagaacgccgaaactgcctcggctgtggcaaccagaacacataccggcaaggaagataataacacagtggtgcttgagcccgacaaatgtaatattgcagtggaagaggaatacatgaccgatgaaaagaaaaagcgcaaaagcaaccagctcaaggaaattcgcagaaccgagctgaaacgttactatagtatcgacgataatcagaataaaacccatgataaaaaggaaaaaaagatggttgtacagaagccccacggcaccatggagtatacagcagggaatcaggatacacttaacagtatcgctctgaaatttaacattacccccaataagctggttgagttgaataaattgttcacccacaccatcgttcccggacaagtgctattcgtcccagatgccaacagtccgtcatctacactgcgattatccagtagcagccctggagcaacagtcagtccctcatcttccgacgccgagtacgataaactccctgacgccgacctggcacggaaagccttaaagcccatcgagagggtcctttcctcaacctctgaagaagatgagcctggcgtggtaaaattcctcaaaatgaattgtaggtattttactgatggaaagggagtggtgggaggcgtgatgatcgtgacccccaacaacataatgtttgatcctcataagagcgacccacttgtgatcgaaaatggatgtgaagaatacggcctcatctgccctatggaagaagtcgtaagtatcgcgctctataatgatataagccacatgaaaattaaagacgccctgccgtccgatctgccacaggacctgtgtccactgtacaggcctggtgagtgggaggatttggcatcagagaaagacattaacccatttagcaaattcaagtctatcaacaaagagaaacgccagcagaacggagagaagatcatgacttcagacagccgccctattgtcccactcgaaaaatccaccggacacacccctacaaagccctccggttcttccgtgagcgagaaactgaagaagcttgacagcagcagggaaacgtcacacggcagtcctacggtgacaaagcttagcaaagagccaagcgatacgtccagcgcgtttgagagtacggccaaggagaactttctgggcgaggacgacgatttcgtggatctcgaagaattgtctagccagaccggcggtggaatgcataagaaggatacgctgaaggagtgcctgagcctggatcctgaagaacgtaaaaaggcagaaagccagatcaacaactccgccgtggaaatgcaggtacagtccgcccttgccttcctcggcactgagaatgacgtggagctcaaaggtgcactggacctggaaacttgcgaaaagcaggatataatgccagaggtagacaaacagtcaggaagccccgagtcaagggtggagaatacactgaacatccacgaagacctggataaagtgaaactcatcgagtattacctgactaaaaacaaagaaggtcctcaggtgagcgaaaaccttcaaaaaacagaactgagcgatggtaaatcaatcgagccaggaggaatcgacattacgctctcttctagcctgtcccaggctggggatccgataacggagggcaataaggaaccagacaaaacatgggtgaagaagggcgagccgctgcccgttaagctaaacagctctacggaagccaatgtaatcaaagaggccttagactctagtctggaaagtactctagacaattcctgtcagggggctcagatggacaataaatcagaggtgcagctttggctgcttaagaggattcaggtaccaatagaagacattctgccttccaaggaggaaaaatccaaaactccccctatgttcttgtgtattaaggtgggaaagcctatgagaaaaagctttgcgactcacactgccgcaatggttcaacagtacggaaaaagaagaaagcagcccgagtactggttcgctgttcccagggagagagttgatcatctctatacttttttcgtgcaatggtcaccagacgtttacggtaaagacgctaaggagcaggggtttgtggttgtggagaaagaagagttgaatatgattgataacttcttttctgaacctactacaaagagctgggagataattaccgtcgaagaggcaaaaagaagaaagtcaacttgcagttactacgaagatgaagatgaggaagtcctgcctgtgctccggccacatagcgccctgcttgaaaacatgcatattgagcagcttgctcggcgactgccagcccgtgtacagggctacccctggaggctcgcctacagtacgctcgagcatgggacatcccttaagacactttatcggaagtctgccagcttagactctcctgtcctactggtaattaaagatatggataatcagatttttggtgcttacgcaacgcaccccttcaagttcagcgatcattattatgggaccggggagacgtttttgtatacgttctcccctcattttaaggtcttcaagtggtccggtgaaaattcatatttcattaatggagacattagctctcttgagctcggaggaggcggtggcagattcggactctggctggatgctgatttataccacggcaggtcgaactcctgctctacatttaacaacgacatcttaagtaagaaggaggacttcattgttcaggatttggaggtgtgggcttttgactag

SEQ ID NO: 329917 - DNA, 2829 bp, Artificial Sequence
  derived and/or modified sequence
atggacaccaaggaggagaagaaggagagaaagcagagctacttcgccagactgaagaagaagaagcaggccaagcagaacgccgagaccgccagcgccgtggccaccagaacccacaccggcaaggaggacaacaacaccgtggtgctggagcccgacaagtgcaacatcgccgtggaggaggagtacatgaccgacgagaagaagaagagaaagagcaaccagctgaaggagatcagaagaaccgagctgaagagatactacagcatcgacgacaaccagaacaagacccacgacaagaaggagaagaagatggtggtgcagaagccccacggcaccatggagtacaccgccggcaaccaggacaccctgaacagcatcgccctgaagttcaacatcacccccaacaagctggtggagctgaacaagctgttcacccacaccatcgtgcccggccaggtgctgttcgtgcccgacgccaacagccccagcagcaccctgagactgagcagcagcagccccggcgccaccgtgagccccagcagcagcgacgccgagtacgacaagctgcccgacgccgacctggccagaaaggccctgaagcccatcgagagagtgctgagcagcaccagcgaggaggacgagcccggcgtggtgaagttcctgaagatgaactgcagatacttcaccgacggcaagggcgtggtgggcggcgtgatgatcgtgacccccaacaacatcatgttcgacccccacaagagcgaccccctggtgatcgagaacggctgcgaggagtacggcctgatctgccccatggaggaggtggtgagcatcgccctgtacaacgacatcagccacatgaagatcaaggacgccctgcccagcgacctgccccaggacctgtgccccctgtacagacccggcgagtgggaggacctggccagcgagaaggacatcaaccccttcagcaagttcaagagcatcaacaaggagaagagacagcagaacggcgagaagatcatgaccagcgacagcagacccatcgtgcccctggagaagagcaccggccacacccccaccaagcccagcggcagcagcgtgagcgagaagctgaagaagctggacagcagcagagagaccagccacggcagccccaccgtgaccaagctgagcaaggagcccagcgacaccagcagcgccttcgagagcaccgccaaggagaacttcctgggcgaggacgacgacttcgtggacctggaggagctgagcagccagaccggcggcggcatgcacaagaaggacaccctgaaggagtgcctgagcctggaccccgaggagagaaagaaggccgagagccagatcaacaacagcgccgtggagatgcaggtgcagagcgccctggccttcctgggcaccgagaacgacgtggagctgaagggcgccctggacctggagacctgcgagaagcaggacatcatgcccgaggtggacaagcagagcggcagccccgagagcagagtggagaacaccctgaacatccacgaggacctggacaaggtgaagctgatcgagtactacctgaccaagaacaaggagggcccccaggtgagcgagaacctgcagaagaccgagctgagcgacggcaagagcatcgagcccggcggcatcgacatcaccctgagcagcagcctgagccaggccggcgaccccatcaccgagggcaacaaggagcccgacaagacctgggtgaagaagggcgagcccctgcccgtgaagctgaacagcagcaccgaggccaacgtgatcaaggaggccctggacagcagcctggagagcaccctggacaacagctgccagggcgcccagatggacaacaagagcgaggtgcagctgtggctgctgaagagaatccaggtgcccatcgaggacatcctgcccagcaaggaggagaagagcaagaccccccccatgttcctgtgcatcaaggtgggcaagcccatgagaaagagcttcgccacccacaccgccgccatggtgcagcagtacggcaagagaagaaagcagcccgagtactggttcgccgtgcccagagagagagtggaccacctgtacaccttcttcgtgcagtggagccccgacgtgtacggcaaggacgccaaggagcagggcttcgtggtggtggagaaggaggagctgaacatgatcgacaacttcttcagcgagcccaccaccaagagctgggagatcatcaccgtggaggaggccaagagaagaaagagcacctgcagctactacgaggacgaggacgaggaggtgctgcccgtgctgagaccccacagcgccctgctggagaacatgcacatcgagcagctggccagaagactgcccgccagagtgcagggctacccctggagactggcctacagcaccctggagcacggcaccagcctgaagaccctgtacagaaagagcgccagcctggacagccccgtgctgctggtgatcaaggacatggacaaccagatcttcggcgcctacgccacccaccccttcaagttcagcgaccactactacggcaccggcgagaccttcctgtacaccttcagcccccacttcaaggtgttcaagtggagcggcgagaacagctacttcatcaacggcgacatcagcagcctggagctgggcggcggcggcggcagattcggcctgtggctggacgccgacctgtaccacggcagaagcaacagctgcagcaccttcaacaacgacatcctgagcaagaaggaggacttcatcgtgcaggacctggaggtgtgggccttcgactag

SEQ ID NO: 329918 - protein, 80 aa, Artificial Sequence
  derived and/or modified sequence
MRRISLTSSPVRLLLFLLLLLIALEIMVGGHSLCFNFTIKSLSRPGQPWCEAQVFLNKNLFLQYNSDNNMVKPLGLLGKK

SEQ ID NO: 329919 - protein, 117 aa, Artificial Sequence
  derived and/or modified sequence
MRRISLTSSPVRLLLFLLLLLIALEIMVGGHSLCFNFTIKSLSRPGQPWCEAQVFLNKNLFLQYNSDNNMVKPLGLLGKKILPLCKSRCFVNVKQNGALVHPGSSPPMERNPSSLTQ

SEQ ID NO: 329920 - protein, 212 aa, Artificial Sequence
  derived and/or modified sequence
MRRISLTSSPVRLLLFLLLLLIALEIMVGGHSLCFNFTIKSLSRPGQPWCEAQVFLNKNLFLQYNSDNNMVKPLGLLGKKVYATSTWGELTQTLGEVGRDLRMLLCDIKPQIKTSDPSTLQVEMFCQREAERCTGASWQFATNGEKSLLFDAMNMTWTVINHEASKIKETWKKDRGLEKYFRKLSKGDCDHWLREFLGHWEAMPEPTGRRST

SEQ ID NO: 329921 - DNA, 639 bp, Artificial Sequence
  derived and/or modified sequence
atgagaagaatcagcctgaccagcagccccgtgagactgctgctgttcctgctgctgctgctgatcgccctggagatcatggtgggcggccacagcctgtgcttcaacttcaccatcaagagcctgagcagacccggccagccctggtgcgaggcccaggtgttcctgaacaagaacctgttcctgcagtacaacagcgacaacaacatggtgaagcccctgggcctgctgggcaagaaggtgtacgccaccagcacctggggcgagctgacccagaccctgggcgaggtgggcagagacctgagaatgctgctgtgcgacatcaagccccagatcaagaccagcgaccccagcaccctgcaggtggagatgttctgccagagagaggccgagagatgcaccggcgccagctggcagttcgccaccaacggcgagaagagcctgctgttcgacgccatgaacatgacctggaccgtgatcaaccacgaggccagcaagatcaaggagacctggaagaaggacagaggcctggagaagtacttcagaaagctgagcaagggcgactgcgaccactggctgagagagttcctgggccactgggaggccatgcccgagcccaccggcagaagaagcacctag

SEQ ID NO: 329922 - DNA, 639 bp, Artificial Sequence
  derived and/or modified sequence
atgcggaggataagcctcacttccagcccggtgcggctcttgcttttcctgctcctccttttgattgccctggaaattatggtcggcggtcatagcctttgtttcaatttcacgatcaaaagccttagcagaccaggccagccatggtgcgaggctcaggtgttcctgaataaaaatctgtttttacaatacaacagtgataacaatatggtgaagccactaggactgctcggtaagaaggtctatgcaacgtccacttggggggagttaactcaaacactgggcgaagttggaagagatttaaggatgcttctgtgtgacatcaaacctcagatcaaaacaagcgaccctagcactttacaagtggagatgttttgtcaaagggaagctgagcggtgcacaggagcatcatggcagttcgccacaaacggagagaagtcactgttattcgacgcaatgaatatgacctggacagtcatcaaccacgaggcatccaaaatcaaggagacatggaagaaggataggggcttggagaaatacttccggaaacttagtaagggagattgcgatcattggctcagggaattcctgggtcactgggaggcaatgccagagcccacgggtcggcgcagcacctag

SEQ ID NO: 329923 - DNA, 639 bp, Artificial Sequence
  derived and/or modified sequence
atgaggcgcatcagcctgaccagcagccctgtgcggctgctgctcttcctgctgctgctgctgattgccctggagatcatggtgggcggccacagcctgtgcttcaacttcaccatcaagagcctgagcaggcctggccagccctggtgtgaggcccaggtgttcctgaacaagaacctcttcctgcagtacaacagcgacaacaacatggtgaagcccctgggcctgctgggcaagaaggtgtatgccaccagcacctggggcgagctgacccagaccctgggggaggtgggccgggacctgaggatgctgctgtgtgacatcaagccccagatcaagaccagtgaccccagcaccctgcaggtggagatgttctgccagcgggaggccgagcgctgcaccggggcctcctggcagtttgccaccaatggagagaagagcctgctgtttgatgccatgaacatgacctggacagtcatcaaccacgaggccagcaagatcaaggagacctggaagaaggaccggggcctggagaagtacttcaggaagctgagcaagggggactgtgaccactggctgcgggagttcctgggccactgggaggccatgcctgagcccactggaagaagaagcacctag

SEQ ID NO: 329924 - DNA, 639 bp, Artificial Sequence
  derived and/or modified sequence
atgcggcggatcagcctgaccagcagccccgtgcggctgctgctgttcctgttgctgcttttgatagccctggagattatggtcggcgggcatagtctctgcttcaattttacaattaaatccctctcacgccccgggcagccctggtgcgaggcccaagtttttctcaataagaatctgttccttcagtacaactcggataataacatggtgaagcctttaggtctgcttggcaagaaggtgtacgccacaagcacatggggggagctcacccagactctcggcgaggtgggaagagaccttcggatgttgctatgtgatatcaaaccgcaaattaaaacctcggatccttcaactctgcaggtggagatgttctgtcagagagaagctgaaaggtgcactggtgccagctggcagtttgcaactaacggggaaaagtcattgcttttcgacgcaatgaatatgacatggaccgtgatcaatcacgaggcaagtaagattaaagaaacttggaaaaaagatcgtgggcttgagaaatactttaggaagctttctaagggagactgtgaccactggctgagagagttcctgggacattgggaagctatgcccgaaccaacgggtcgcaggtctacctag

SEQ ID NO: 329925 - DNA, 639 bp, Artificial Sequence
  derived and/or modified sequence
atgaggaggatatctttaacatccagcccagtacggttactcttgtttctattgctcctgctgattgctctggagattatggtgggtggacactccctctgcttcaatttcacaatcaagtctctgagtagaccaggccagccttggtgtgaggcgcaggtatttttaaacaagaatctctttctgcagtataattccgataataatatggtaaagcccctggggctccttgggaaaaaagtatacgctacaagcacgtggggggaattaacccagactttaggtgaggtgggacgggatctgaggatgttgctgtgtgacattaaaccccagattaagacatcagatccatccacgcttcaggtggaaatgttctgtcaacgagaggcagagcgttgcacaggcgctagctggcagttcgcgaccaacggtgagaagagcctgttattcgacgccatgaatatgacatggactgtgattaaccacgaggccagcaagattaaggagacgtggaaaaaagatcgcggattagaaaagtatttcaggaaactcagcaagggagattgcgaccactggcttcgcgagtttttggggcactgggaagctatgcctgaacccaccggaagacgtagtacatag

SEQ ID NO: 329926 - DNA, 2099 bp, Artificial Sequence
  derived and/or modified sequence
cctaattctcaaggtgatgctatttaggaagtcataactcatgtgagtggagccatgtgggattaagaagtgataggagagcttgctgtctgtctctgctctccactgtgtgaggatacaacaggaagacagccatctggtgaggaagagagggccctcgccagataccggacctgctgacaccttgatcttggacttcccatcttccaggaaggcctgacctcagttgttccagggtaaagaatttgggcagtgcccacacccacgctgttggataacatttcttcaccataccagtgagggtgaatgtgtacacgcccagcttcctgcctgttactctccacagtatgcgaagaatatccctgacttctagccctgtgcgccttcttttgtttctgctgttgctactaatagccttggagatcatggttggtggtcactctctttgcttcaacttcactataaaatcattgtccagacctggacagccctggtgtgaagcgcaggtcttcttgaataaaaatcttttccttcagtacaacagtgacaacaacatggtcaaacctctgggcctcctggggaagaaggtatatgccaccagcacttggggagaattgacccaaacgctgggagaagtggggcgagacctcaggatgctcctttgtgacatcaaaccccagataaagaccagtgatccttccactctgcaagtcgagatgttttgtcaacgtgaagcagaacggtgcactggtgcatcctggcagttcgccaccaatggagagaaatccctcctctttgacgcaatgaacatgacctggacagtaattaatcatgaagccagtaagatcaaggagacatggaagaaagacagagggctggaaaagtatttcaggaagctctcaaagggagactgcgatcactggctcagggaattcttagggcactgggaggcaatgccagaaccgacaggcagaagatccacctagaggtgataccacggcggcgcagagttgttcacctgtggtcctcgatcgctgacagccttggctcccactgctgtgtgttccctgagtcaagtggaggcggagcctgcaatgagcggagatcgcgcctctgcattccagtcttggcaacagagcaagactccgtctcaaaaaaaaaaaattttttttcagtacatattttttaaaagatagggctgggcacagcagctcacatctataatcccaacactttgggaggcctaggcaggaggatcacttgagcccaggaatctgaagctgcagtgagcctttgctcgtgagattgtggacctatgatcctaccaccagcccacctggttctaacaccccctcctctatgtgtgagagggagagaagaaaagtgagggagaaaagagagataagcaaagaacagagaggaaaaatggaaaataagaggaaattgggggaattaaacagaggggagggcatggatccccgggagttagaagagtagcagcttgtggattactacgcagtggaggaagaagagttgttggaaattatttgagaggtagtataatcatttgtgaggcagttttctgcattcaccatttctcacagactaagttactcataagcaaacgtgcaattcacattacactgaaattcttccctaatacatcatttgcattggaataaagtacggttttcaaacaacctgatatagcagaactgactgtataaattatgtgagcacagtgcaagtaattctttgtttgtttgtttgtttttttgagacagagtctcactctatctcccaggctggagtgtagtggtgcgatcccggctcactgcaacctcgatctcccaggctcaagcgattcccctgcctcagcctcctgagtagctgggattacaggcatgagccaccacgcccggctaatttttgtatttttagtagagacggggtttcaccctgttggccaggctggtctcgaactacggacctcaggtgatctgcccccctcagcctctcaaagtgctgggattatagcatgagccactgagcccagacacaagtagttctttctgataaacactttaacactgaatgca

SEQ ID NO: 329927 - protein, 179 aa, Artificial Sequence [sequence omitted]

SEQ ID NO: 329928 - DNA, 579 bp, Artificial Sequence
  derived and/or modified sequence
atgagccagtgcgcctgcctggaggaggtgcacctgcccaacatcaagcccggcgagggcctgggcatgtacatcaagagcacctacgacggcctgcacgtgatcaccggcaccaccgagaacgtgggctggcagctgaagaacctggtgaagaagctgagagagaaccccaccggcgtggtgctgctgctgaagaagagacccaccggcagcttcaacttcacccccgcccccctgaagaacctgagatggaagccccccctggtgcagaccagccccccccccgccaccacccagagccccgagagcaccatggacaccagcctgaagaaggagaagagcgccatcctggacctgtacatcccccccccccccgccgtgccctacagccccagagacgagaacggcagcttcgtgtacggcggcagcagcaagtgcaagcagcccctgcccggccccaagggcagcgagagccccaacagcttcctggaccaggagagcagaagaagaagattcaccatcgccgacagcgaccagctgcccggctacagcgtggagaccaacatcctgcccacctag

SEQ ID NO: 329929 - DNA, 540 bp, Artificial Sequence
  derived and/or modified sequence
aacatcaagcccggcgagggcctgggcatgtacatcaagagcacctacgacggcctgcacgtgatcaccggcaccaccgagaacgtgggctggcagctgaagaacctggtgaagaagctgagagagaaccccaccggcgtggtgctgctgctgaagaagagacccaccggcagcttcaacttcacccccgcccccctgaagaacctgagatggaagccccccctggtgcagaccagccccccccccgccaccacccagagccccgagagcaccatggacaccagcctgaagaaggagaagagcgccatcctggacctgtacatcccccccccccccgccgtgccctacagccccagagacgagaacggcagcttcgtgtacggcggcagcagcaagtgcaagcagcccctgcccggccccaagggcagcgagagccccaacagcttcctggaccaggagagcagaagaagaagattcaccatcgccgacagcgaccagctgcccggctacagcgtggagaccaacatcctgcccacctag

SEQ ID NO: 329930 - DNA, 579 bp, Artificial Sequence
  derived and/or modified sequence
atgagtcagtgcgcctgccttgaggaggtgcacctgccaaatatcaaaccgggcgagggacttggcatgtacattaagtccacgtacgatggactgcacgtgattactggcacaaccgagaacgtgggatggcagctgaagaatctcgtgaagaagttgcgcgagaaccccaccggcgtggtgctcctgctcaagaaaaggcctaccggttctttcaactttactcccgcacctctcaagaacttgagatggaagccacctcttgtacagactagccccccccccgctaccactcagtcaccagagagtacaatggacacaagtttgaaaaaggagaagagtgcgattcttgacctgtacatcccccccccaccagcagtaccttactctcctagagatgaaaacggttcctttgtctacggggggagctctaagtgcaaacagcctctacctgggcctaaggggagcgagagccccaacagttttcttgatcaggagtcgcgcagacgcagatttactatagctgactccgaccaattgccagggtactcagtcgagactaacatcctcccaacatag

SEQ ID NO: 329931 - DNA, 540 bp, Artificial Sequence
  derived and/or modified sequence
aacatcaagccaggagaggggctgggaatgtacatcaaatccacctatgatggattgcacgtgatcaccggcaccactgagaatgtcgggtggcagctgaagaacctcgttaagaaactccgcgagaatcccacaggggtggtactcttgttgaaaaaaagaccgacaggcagtttcaacttcactcccgccccactgaaaaatctgcggtggaagccccctctggtacagacgtctcccccccccgctaccactcagagccctgagagcactatggataccagtcttaagaaggaaaaatccgccattcttgatctttatattccaccaccacccgccgtcccttattctcctagggacgagaatggatctttcgtgtatggaggctcctctaaatgcaagcaacctctcccaggcccaaaaggcagcgaatccccaaatagcttcctggatcaggagagtaggagaaggcgattcaccatcgcagactccgaccaacttcctggatactcagttgagacaaatatactccctacctag

SEQ ID NO: 329932 - DNA, 579 bp, Artificial Sequence
  derived and/or modified sequence
atgagccagtgtgcctgcctggaggaggtgcacctgcccaacatcaagccaggagagggcctgggcatgtacatcaagagcacctatgatggcctgcacgtgatcaccggcaccacagaaaatgtgggctggcagctgaagaacctggtgaagaagctgcgggagaaccccaccggggtggtgctgctgctgaagaagaggcccaccggcagcttcaacttcaccccagcccccctgaagaacctgcgctggaagccacccctggtgcagaccagccccccaccagccaccacccagagccctgagagcaccatggacaccagcctgaagaaggagaagagcgccatcctggacctgtacatccccccacctcctgctgtgccctacagccccagagatgaaaatggcagctttgtgtatggaggcagcagcaagtgcaagcagcccctgcccggccccaagggcagcgagagccccaacagcttcctggaccaggagagcagaagaagacgcttcaccatcgctgacagcgaccagctgcccggctacagcgtggagaccaacatcctgcccacctag

SEQ ID NO: 329933 - DNA, 540 bp, Artificial Sequence
  derived and/or modified sequence
aacatcaagccaggagagggcctgggcatgtacatcaagagcacctatgatggcctgcacgtgatcaccggcaccacagaaaatgtgggctggcagctgaagaacctggtgaagaagctgcgggagaaccccactggagtggtgctgctgctgaagaagaggcccaccggcagcttcaacttcaccccagcccccctgaagaacctgcgctggaagccacccctggtgcagaccagccccccaccagccaccacccagagccctgagagcaccatggacaccagcctgaagaaggagaagagcgccatcctggacctgtacatccccccacctcctgctgtgccctacagccccagagatgaaaatggcagctttgtgtatggaggcagcagcaagtgcaagcagcccctgcccggccccaagggcagcgagagccccaacagcttcctggaccaggagagcagaagaagacgcttcaccatcgctgacagcgaccagctgcccggctacagcgtggagaccaacatcctgcccacctag

SEQ ID NO: 329934 - DNA, 579 bp, Artificial Sequence
  derived and/or modified sequence
atgagccagtgcgcctgcctggaggaggtgcacctgcccaacatcaagcccggagagggcttaggaatgtacatcaaatcaacatacgacggccttcacgtgatcaccgggaccaccgaaaatgtgggctggcaactgaaaaacctggttaaaaagttgcgggagaatccaacaggcgtggtgctactactgaaaaagcggcccacgggttctttcaatttcacccccgctcctctgaaaaacctcaggtggaaaccacctttggtgcagacatcaccccccccagcaacgacacagagccctgagtctacaatggatacttccctgaagaaagaaaagagtgctatcctggacctgtacatccctccacctcccgctgtgccctactcacctagggatgagaacgggtctttcgtgtatggagggtcaagtaaatgcaaacaaccactgcctggaccgaaaggtagcgaatcaccgaactcttttctcgatcaagaatctcggagaagacggttcacaattgcagattctgaccagctgccaggttattcggtggaaacaaatatcctgcccacctag

SEQ ID NO: 329935 - DNA, 540 bp, Artificial Sequence
  derived and/or modified sequence
aacatcaagcccggcgagggcctgggcatgtacatcaagagcacctatgacggcctgcatgtgatcacagggacgaccgagaatgtgggctggcaactgaagaacctggtaaagaagctacgtgagaatccaactggagttgttttgctgctgaagaaacggcctactgggtccttcaacttcacccccgctcctctgaagaaccttaggtggaaaccccccctggtgcagacgagcccaccccctgctacaacccagtctcctgaaagtacaatggacacttccttaaagaaagagaagtcggccatcctggacctttacatccctcccccgcctgcagttccttactcaccccgcgacgagaacgggtcatttgtgtatggggggagctccaaatgcaagcagccactacctgggccgaaaggaagcgagagccccaatagcttcctggatcaagagtcacgcagaaggcgtttcacaatagctgattctgatcagctgcccggctatagtgttgagactaacatactgccaacctag

SEQ ID NO: 329936 - DNA, 579 bp, Artificial Sequence
  derived and/or modified sequence
atgtcccagtgcgcgtgcctcgaggaggtccatctccccaatatcaaaccaggcgaaggccttggcatgtacatcaaatcaacatacgatggcctacatgttattacaggcaccacagagaatgttggatggcagttgaaaaatctggtcaagaagctaagagagaatcccactggagtcgtgctgctgctgaaaaaacggccaaccggttccttcaactttacccccgcaccgctcaagaacctgcgctggaaaccccctctcgtgcagacgagtccaccaccagctaccacacagtcacccgagtcgacgatggacacatctctgaagaaagagaaaagtgctatcttagacctgtatatcccaccacctcctgctgttccatattcccccagagacgaaaacgggtcattcgtatacggtggttccagcaaatgcaagcaacctttgcctgggcctaagggcagcgagagcccaaattcattcttggatcaagagagtcgccgacgtaggtttaccatagcagatagtgaccagcttcccggatacagcgtggagaccaacatcctgccaacgtag

SEQ ID NO: 329937 - DNA, 536 bp, Artificial Sequence
  derived and/or modified sequence
aacattaaacctggggaaggcctgggcatgtacatcaaatcaacctatgatgggttacacgtgattactggaaccacagaaaatgtgggatggcagctgaaaaatctggtgaagaaattgagagagaatcccaccggagttgtgttactgcttaagaagcgccccaccgggtctttcaactttactcctgctcccctgaaaaacctacggtggaagccacctcttgtacagacctcacctccacccgcgacaacccagtcccctgaaagcactatggatacctcactgaagaaggagaagtcagccatcctggatctttatattcctcctccgcctgctgttccctactctccccgggatgagaatggcagttttgtttatggagggtccagtaagtgcaaacaaccattgcctggtcctaagggttcagagtccccgaattccttcttggaccaggaaagccggagacgaagattcaccattgcagactcggatcagttgcctgggtactcggtggaaaccaacattctgcccac

SEQ ID NO: 329938 - DNA, 540 bp, Artificial Sequence
  derived and/or modified sequence
aatatcaagcccggtgagggcctgggcatgtacatcaagagtacctacgacggcctgcatgtcataacaggaacgacagagaacgtggggtggcagttgaagaatttggtgaagaagctaagggagaaccctactggtgtggtgctcctactcaaaaaaagaccaaccgggtcctttaattttacccctgcgcctctcaagaatctgagatggaagccaccactggtgcagactagcccccctccagccacgacccagtccccagagagcacaatggatacctctcttaagaaagaaaagtctgccatcctggacttgtacatccctccccctccggcagtgccttacagccccagagacgaaaacggcagtttcgtatatggcggatcctctaagtgcaaacaaccactgcccggtccaaagggcagtgaatctcccaactctttcctggatcaggagtctcgtaggaggaggtttacaatagcggattcagaccagctgccaggctactcggtcgaaaccaatattctaccaacttag

SEQ ID NO: 329939 - protein, 462 aa, Artificial Sequence
  derived and/or modified sequence
MGKEKTHINIVVIGHVDSGKSTTTGHLIYKCGGIDKRTIEKFEKEAAEMGKGSFKYAWVLDKLKAERERGITIDISLWKFETSKYYVTIIDAPGHRDFIKNMITGTSQADCAVLIVAAGVGEFEAGISKNGQTREHALLAYTLGVKQLIVGVNKMDSTEPPYSQKRYEEIVKEVSTYIKKIGYNPDTVAFVPISGWNGDNMLEPSANMPWFKGWKVTRKDGNASGTTLLEALDCILPPTRPTDKPLRLPLQDVYKIGGIGTVPVGRVETGVLKPGMVVTFAPVNVTTEVKSVEMHHEALSEALPGDNVGFNVKNVSVKDVRRGNVAGDSKNDPPMEAAGFTAQVIILNHPGQISAGYAPVLDCHTAHIACKFAELKEKIDRRSGKKLEDGPKFLKSGDAAIVDMVPGKPMCVESFSDYPPLGRFAVRDMRQTVAVGVIKAVDKKAAGAGKVTKSAQKAQKAK

SEQ ID NO: 329940 - protein, 145 aa, Artificial Sequence
  derived and/or modified sequence
MGKEKTHINIVVIGHVDSGKSTTTGHLIYKCGGIDKRTIEKFEKEAAEMGKGSFKYAWVLDKLKAERERGITIDISLWKFETSKYYVTIIDAPGHRDFIKNMITGTSQADCAVLIVAAGVGEFEAGISKNGQTREHALLAYTLGV

SEQ ID NO: 329941 - protein, 426 aa, Artificial Sequence
  derived and/or modified sequence
MGKEKTHINIVVIGHVDSGKSTTTGHLIYKCGGIDKRTIEKFEKEAAEMGKGSFKYAWVLDKLKAERERGITIDISLWKFETSKYYVTIIDAPGHRDFIKNMITGTSQADCAVLIVAAGVGEFEAGISKNGQTREHALLAYTLGVKQLIVGVNKMDSTEPPYSQKRYEEIVKEVSTYIKKIGYNPDTVAFVPISGWNGDNMLEPSANMPWFKGWKVTRKDGNASGTTLLEALDCILPPTRPTDKPLRLPLQDVYKIGGIGTVPVPSGDWCSPGMVVTFAPVNVTTEVKSVEMHHEALSEALPGDNVGFNVKNVSVKDVRRGNVAGDSKNDPPMEAAGFTAQVIILNHPGQISAGYAPVLDCHTAHIACKFAELKEKIDRRSGKKLEDGPKFLKSGDAAIVDMVPGKPMCVESFSDYPPLGKSLCCS

SEQ ID NO: 329942 - protein, 441 aa, Artificial Sequence
  derived and/or modified sequence
MGKEKTHINIVVIGHVDSGKSTTTGHLIYKCGGIDKRTIEKFEKEAAEMGKGSFKYAWVLDKLKAERERGITIDISLWKFETSKYYVTIIDAPGHRDFIKNMITGTSQADCAVLIVAAGVGEFEAGISKNGQTREHALLAYSQKRYEEIVKEVSTYIKKIGYNPDTVAFVPISGWNGDNMLEPSANMPWFKGWKVTRKDGNASGTTLLEALDCILPPTRPTDKPLRLPLQDVYKIGGIGTVPVGRVETGVLKPGMVVTFAPVNVTTEVKSVEMHHEALSEALPGDNVGFNVKNVSVKDVRRGNVAGDSKNDPPMEAAGFTAQVIILNHPGQISAGYAPVLDCHTAHIACKFAELKEKIDRRSGKKLEDGPKFLKSGDAAIVDMVPGKPMCVESFSDYPPLGRFAVRDMRQTVAVGVIKAVDKKAAGAGKVTKSAQKAQKAK

SEQ ID NO: 329943 - protein, 107 aa, Artificial Sequence
  derived and/or modified sequence
MGKEKTHINIVVIGHVDSGKSTTTGHLIYKCGGIDKRTIEKFEKEAAEMGKGSFKYAWVLDKLKAERERGITIDISLWKFETSKYYVTIIDAPGHRDFIKNMITGTS

SEQ ID NO: 329944 - DNA, 1389 bp, Artificial Sequence
  derived and/or modified sequence
atggggaaggaaaaaactcatataaatatagtagtcattgggcacgtggattcaggaaaaagcaccactacgggtcatttaatatataagtgcggcgggattgacaagagaaccatcgaaaagttcgagaaggaggcggcagaaatggggaaaggctcttttaaatacgcttgggtgcttgataagctgaaagctgagcgagagcggggaatcacaattgacatctctttgtggaaattcgagacctccaagtactatgtaactatcatcgatgctcctgggcatcgcgatttcattaagaacatgataacagggacatctcaggccgattgcgccgtactcatcgtggccgccggtgtgggagaatttgaggccggcatatcaaagaatggtcagacacgggaacacgccctgctggcctatactttaggcgtaaagcagctgattgtgggagtaaataagatggactctacggaacccccatatagccagaagcgctacgaggagatcgtgaaagaagtgtccacatacataaaaaagatcggctacaaccctgatacggtggcgttcgtgccaatcagtggatggaatggagacaacatgctggaaccctcggccaacatgccttggtttaaggggtggaaggtaactaggaaagacggcaatgcaagtggaactacactgctggaagcccttgattgtattctgcctccaacccggcctacggataagcccctgagacttccgctccaggatgtgtacaaaattggcggaattgggactgtgcccgtaggtcgtgtcgagacaggtgtcctcaagcctggtatggttgtcactttcgcccctgtcaatgtaactaccgaagttaaatccgtggaaatgcatcatgaagccttatctgaggccttgccgggcgataacgtcgggttcaacgtgaagaacgtgagtgtgaaagatgttagaaggggaaacgtggctggagactccaaaaacgatccacctatggaagcagcaggcttcactgctcaggtcatcatcctaaatcaccccggacagatttccgccggttacgcccctgttctggattgccatacagcacacatcgcttgcaaatttgcagagctgaaggagaagatagatagacgctccgggaaaaaactagaggatgggccgaagttcttaaaatccggagatgcagcgattgtcgacatggtcccggggaagccgatgtgcgtggagtcctttagtgactacccccccctggggcgctttgctgtacgggacatgagacaaacagtggcggtgggagtcattaaggctgtggacaaaaaagctgccggcgccggtaaagtgaccaaaagtgcccagaaagcccagaaggcaaaatag

SEQ ID NO: 329945 - DNA, 1389 bp, Artificial Sequence
  derived and/or modified sequence
atggggaaagagaagacgcacatcaatattgttgtgatcggacacgtggacagcggcaaatccacgaccacagggcacctgatttataaatgcggcgggattgataaaagaactattgaaaagttcgaaaaagaggccgccgaaatgggcaaaggcagtttcaagtacgcctgggttcttgataagttaaaggccgaaagagagcggggaatcaccatcgacatttccctgtggaagttcgagaccagcaaatactatgttacaatcattgacgcccccggtcaccgcgattttattaagaacatgatcactggaactagtcaggctgactgcgctgtcctgattgtcgccgctggtgttggagaattcgaagctggcatttccaagaatggccagactagagagcacgccctgcttgcctacaccctgggggtgaaacagctcatagtgggggtaaataagatggactctacagaaccaccctactcccagaaaaggtacgaggaaatcgtgaaagaagtttctacatatattaagaaaattgggtataaccctgatactgtcgctttcgtgccaatctccggctggaacggcgacaacatgctcgaaccctccgccaatatgccctggtttaaagggtggaaggtgacccgcaaagatgggaatgcctccggcactactctgctcgaggctctggattgcatactgcccccaacgcggcccacagataaaccattaagacttcctctgcaggacgtctataagattggagggattggcacagtgccagtgggaagagtggagacaggagttcttaagcccgggatggtcgtcacgttcgctcccgtgaatgtgactactgaagtgaagtctgtggagatgcaccacgaggctttgtcggaggccttacctggggacaacgtgggatttaatgtaaagaacgtgtcagtgaaagatgtcaggaggggaaacgttgctggtgacagcaagaatgacccacctatggaggcggcaggctttacagcacaggtcataattctgaaccatcctgggcagatctcagctggctatgctcccgtgctggactgccacactgctcacattgcctgtaaatttgccgagctcaaagagaagattgacaggaggtcagggaaaaagctggaggacggtcctaagtttcttaaatctggagatgctgctatcgtggatatggtacccggtaaacctatgtgcgtggagagtttttcagactatccacctctggggcggtttgcagtcagggacatgcggcagacagtcgctgtcggcgtgatcaaggctgttgataagaaggcagctggtgccggtaaagtgacaaagtcagctcaaaaggcccagaaggctaaatag

SEQ ID NO: 329946 - DNA, 1389 bp, Artificial Sequence
  derived and/or modified sequence
atgggtaaggagaaaacacacattaatatcgtggttatcgggcatgtggacagcggtaaatcaacaaccacaggccatctcatctataagtgcggaggaattgataagcgcacaatcgaaaagttcgaaaaggaggcagccgagatgggaaagggctccttcaagtatgcttgggttctcgacaagcttaaagctgaaagagagcgtggcatcactatagacatctccttatggaaatttgaaacctctaaatactacgtgactatcatcgatgcacctggacatcgggatttcattaaaaatatgatcactggcacaagccaggctgattgcgctgtgctgatcgttgccgctggagtgggagagttcgaggctgggatctcaaaaaacggccagacgcgggagcacgctctgttggcatacacactgggagtgaaacagctgatagtcggagttaacaaaatggactcaacggagcctccctacagtcagaaaagatacgaagaaatcgtgaaggaagtgagcacatacatcaaaaaaataggctacaatcccgacacagttgcgtttgtccccatctccgggtggaatggggataatatgctggagccaagcgcaaacatgccatggtttaaagggtggaaggttacacggaaagatggcaatgcctccggaactactctcctcgaggcactggactgcatcctcccgccaacgcggcctaccgataaacctctgagattaccactgcaggatgtgtacaagatcggcggaattggcaccgtgcctgtaggaagggtggagacaggggtactgaaacctggaatggtggtcacttttgctcccgtcaacgtgacaactgaggtaaagtctgttgagatgcatcacgaggccctgtcagaagcactcccgggtgacaatgtgggattcaatgtaaaaaatgttagcgttaaagacgtgcgcagggggaacgttgctggagactccaagaacgaccctcctatggaagctgccggttttactgcccaggtgatcattctgaatcaccctgggcagatttccgcaggctacgccccagtactagattgccacaccgcccacatcgcctgtaaattcgctgaactgaaggagaaaattgatcgtagatccggcaagaaactcgaagacgggccgaagtttctgaagtccggcgacgccgcaatagttgacatggtgccaggtaagccaatgtgcgttgagtccttcagcgactatccgccactggggagatttgccgtaagagacatgaggcaaaccgtggccgtcggcgtgatcaaggccgtggacaaaaaggcggctggtgccgggaaggtcaccaaaagtgcacagaaagcccagaaagctaagtag

SEQ ID NO: 329947 - DNA, 438 bp, Artificial Sequence
  derived and/or modified sequence
atggggaaagagaaaactcatataaacatcgtggttattggacacgtggatagcggtaaatcaacaacaactgggcacttgatctacaagtgcggcggaatcgataagcgaacgatcgaaaagtttgagaaggaggcggcagaaatgggtaagggctccttcaaatacgcctgggttctcgacaaactcaaagccgagagggagcgcggaatcaccattgatatcagcttgtggaaattcgagacctccaagtactacgttacaatcatcgatgctcccggtcatcgggatttcatcaagaatatgattacaggcaccagccaggccgactgcgctgtactcatagtagccgcaggggtcggcgagtttgaagcgggaatcagcaagaatggccagacccgagaacacgccctgcttgcctatacgctgggagtctag

SEQ ID NO: 329948 - DNA, 1281 bp, Artificial Sequence
  derived and/or modified sequence
atgggaaaagaaaagacacacattaacatcgtggtgatcgggcacgtagactctgggaagtctactacaactggtcacttgatatacaaatgcggaggcatcgataaaagaaccattgagaagtttgaaaaggaagcggccgagatgggcaaaggaagcttcaaatatgcatgggtgctcgataagttgaaggccgagcgggagagggggattacaatcgacattagtctatggaaattcgagacctctaaatactatgtgacgatcatagacgcaccagggcaccgagattttattaaaaacatgatcacagggacctcacaggcggactgcgcggtacttattgtcgccgcaggcgtgggagagtttgaagcgggcatttccaaaaacggacagacccgtgaacatgcactgttagcgtacaccctcggcgtaaagcaattaatcgttggtgtcaataagatggattctacggagccaccttacagtcagaagcggtacgaggagatagtgaaggaggtgtcaacatacatcaagaagattggttacaatcctgataccgtggcattcgtgccaatttctgggtggaacggcgataacatgctggagccctcagccaacatgccctggtttaagggatggaaagtgaccaggaaggatggcaacgctagtggtacaacactgctcgaggctctcgattgtattctccctccaaccagaccaacggacaagccgctgagactgccgcttcaggatgtttacaagattgggggcatcggtactgtgcccgttccctcgggtgactggtgctcacctggcatggtggtaacgtttgctcccgttaatgtcaccacggaggtgaaatcagttgaaatgcaccatgaggcattgagcgaagcactacccggagacaacgtgggatttaacgttaagaacgttagtgtaaaggacgtgagaaggggaaatgtggccggagactcgaagaacgatcccccgatggaggccgctggctttacagctcaggttatcattctgaatcacccaggccaaatttctgctggatatgcgccagtccttgactgtcacactgcccacatcgcctgcaagtttgccgaactgaaagaaaagattgaccggcgcagtggcaagaaactggaagacggcccaaagtttctcaagagtggtgatgctgcgatcgtggacatggttcccggtaaaccaatgtgcgtggagagctttagcgattaccctcccctgggcaaaagtctctgctgttcctag

SEQ ID NO: 329949 - DNA, 1326 bp, Artificial Sequence
  derived and/or modified sequence
atgggaaaggagaagacacacatcaatattgtggtaatcggacatgtggactcgggtaaaagtacaaccacagggcacttaatttacaagtgtggcggcattgataaacggaccatcgagaagttcgagaaggaggcagctgagatggggaaaggctcctttaagtacgcgtgggtcctcgataagctgaaagccgagcgagagaggggaatcaccattgatatatccctgtggaaattcgaaacatccaaatactacgtgaccattatcgacgcccccggtcacagagatttcatcaagaatatgattactggaacctcgcaggccgactgcgccgtgttaatagttgcagccggagtgggggagttcgaggccggaatctccaagaatgggcagaccagggaacacgccctgcttgcatattctcagaaacgatacgaggaaatcgtgaaagaggtgtccacatacatcaagaaaatcggttacaaccctgacactgttgctttcgtgcctataagcgggtggaatggtgacaacatgttggaacctagtgccaatatgccatggtttaagggatggaaggttacccgcaaggatggcaacgcctcaggaactactctgctggaggcattagactgcatcttgccacccactagaccaactgataagccactccgcctgcccttgcaagatgtttacaagatcggtgggatcggaacagtgcccgtgggccgggtggagactggtgtgctgaagcccggaatggtggtcacttttgcccccgttaacgttactacggaagtgaagtcggtagagatgcatcacgaggctctgtcagaagccttgccgggagacaacgtggggtttaacgtgaagaatgtgagtgtgaaagatgtcagacgaggaaacgtggctggcgattccaagaacgacccccccatggaagctgcaggcttcactgctcaggttatcatcttgaatcatcctgggcagatttcagccggctatgcccccgtcctggattgccatacagctcacatagcttgcaaattcgccgaactaaaggagaagatagatagaaggtcagggaaaaagctagaagatggtccgaagttcctgaaatccggggatgcagccattgtggatatggtccccggaaaacctatgtgcgtcgagtcattcagcgactacccgcctctgggccggttcgccgtgagggacatgcggcaaacagttgccgtgggtgtgataaaagcagtggataagaaggcggccggcgcagggaaagtcaccaaaagtgcacagaaagcacagaaggcaaagtag

SEQ ID NO: 329950 - DNA, 324 bp, Artificial Sequence
  derived and/or modified sequence
atggggaaggaaaagacacacattaacatagtggtgattggtcacgtagattccggtaaatctaccaccaccggccatctcatttacaagtgtggcggcattgacaagcgtacgattgaaaagtttgagaaagaagccgcagagatggggaaaggctccttcaagtacgcatgggtgttggataagctgaaagctgagagggagcgcggcattacgattgatatttccctctggaagttcgaaacgtccaagtactacgtgaccatcatagacgcccctggtcatagagactttataaaaaacatgataaccggaaccagctag

SEQ ID NO: 329951 - DNA, 1389 bp, Artificial Sequence
  derived and/or modified sequence
atgggcaaggagaagacccacatcaacatcgtggtgattggacatgtggacagcggcaagagcaccaccaccggccacctgatctacaagtgtggcggcatcgacaagaggaccatcgagaagtttgagaaggaggccgctgagatgggcaagggcagcttcaagtatgcctgggtgctggacaagctgaaggccgagcgggagcggggcatcaccatcgacatcagcctgtggaagtttgagaccagcaagtactacgtgaccatcattgatgcccctggccaccgggacttcatcaagaacatgatcaccggcaccagccaggccgactgtgctgtgctgattgtggccgccggcgtgggggagtttgaagctggcatcagcaagaatggccagacccgggagcacgccctgctggcctacaccctgggcgtgaagcagctgattgtgggcgtgaacaagatggacagcacagagcccccctacagccagaagagatatgaggagatcgtgaaggaggtgtccacctacatcaagaagattggctacaacccagacacagtggcctttgtgcccatcagcggctggaatggagacaacatgctggagcccagcgccaacatgccctggttcaagggctggaaggtgaccaggaaggatggaaatgccagcggcaccaccctgctggaggccctggactgcatcctgccccccacccggcccacagacaagcccctgcggctgcccctgcaggatgtgtacaagattggaggcattggaacagtgcctgtgggccgggtggagactggagtgctgaagccaggcatggtggtgacctttgcccctgtgaatgtgaccacagaggtgaagtctgtggagatgcaccacgaggccctgtctgaggccctgcccggggacaacgtgggcttcaacgtgaagaatgtgtctgtgaaggatgtgagaagaggaaatgtggccggggacagcaagaatgacccccccatggaggccgccggcttcaccgcccaggtgatcatcctgaaccaccctggccagatctctgctggctacgcccctgtgctggactgccacacagcccacatcgcctgcaagtttgctgagctgaaggagaagattgacagaagaagtggcaagaagctggaggatggccccaagttcctgaagtctggagatgctgccatcgtggacatggtgcctgggaagcccatgtgtgtggagagcttcagtgactacccacccctgggccgctttgctgtgcgggacatgaggcagacagtggccgtgggcgtcatcaaggctgtggacaagaaggccgccggggccggcaaggtgaccaagagcgcccagaaggcccagaaggccaagtag

SEQ ID NO: 329952 - DNA, 438 bp, Artificial Sequence
  derived and/or modified sequence
atgggcaaggagaagacccacatcaacatcgtggtgattggacatgtggacagcggcaagagcaccaccaccggccacctgatctacaagtgtggcggcatcgacaagaggaccatcgagaagtttgagaaggaggccgctgagatgggcaagggcagcttcaagtatgcctgggtgctggacaagctgaaggccgagcgggagcggggcatcaccatcgacatcagcctgtggaagtttgagaccagcaagtactacgtgaccatcattgatgcccctggccaccgggacttcatcaagaacatgatcaccggcaccagccaggccgactgtgctgtgctgattgtggccgccggcgtgggggagtttgaagctggcatcagcaagaatggccagacccgggagcacgccctgctggcctacaccctgggcgtgtag

SEQ ID NO: 329953 - DNA, 1281 bp, Artificial Sequence
  derived and/or modified sequence
atgggcaaggagaagacccacatcaacatcgtggtgattggacatgtggacagcggcaagagcaccaccaccggccacctgatctacaagtgtggcggcatcgacaagaggaccatcgagaagtttgagaaggaggccgctgagatgggcaagggcagcttcaagtatgcctgggtgctggacaagctgaaggccgagcgggagcggggcatcaccatcgacatcagcctgtggaagtttgagaccagcaagtactacgtgaccatcattgatgcccctggccaccgggacttcatcaagaacatgatcaccggcaccagccaggccgactgtgctgtgctgattgtggccgccggcgtgggggagtttgaagctggcatcagcaagaatggccagacccgggagcacgccctgctggcctacaccctgggcgtgaagcagctgattgtgggcgtgaacaagatggacagcacagagcccccctacagccagaagagatatgaggagatcgtgaaggaggtgtccacctacatcaagaagattggctacaacccagacacagtggcctttgtgcccatcagcggctggaatggagacaacatgctggagcccagcgccaacatgccctggttcaagggctggaaggtgaccaggaaggatggaaatgccagcggcaccaccctgctggaggccctggactgcatcctgccccccacccggcccacagacaagcccctgcggctgcccctgcaggatgtgtacaagattggaggcattggaacagtgcctgtgcccagcggggactggtgcagccctggcatggtggtgacctttgcccctgtgaatgtgaccacagaggtgaagtctgtggagatgcaccacgaggccctgtctgaggccctgcccggggacaacgtgggcttcaacgtgaagaatgtgtctgtgaaggatgtgagaagaggaaatgtggccggggacagcaagaatgacccccccatggaggccgccggcttcaccgcccaggtgatcatcctgaaccaccctggccagatctctgctggctacgcccctgtgctggactgccacacagcccacatcgcctgcaagtttgctgagctgaaggagaagattgacagaagaagtggcaagaagctggaggatggccccaagttcctgaagtctggagatgctgccatcgtggacatggtgcctgggaagcccatgtgtgtggagagcttcagtgactacccacccctgggcaagagcctgtgctgcagctag

SEQ ID NO: 329954 - DNA, 1326 bp, Artificial Sequence
  derived and/or modified sequence
atgggcaaggagaagacccacatcaacatcgtggtgattggacatgtggacagcggcaagagcaccaccaccggccacctgatctacaagtgtggcggcatcgacaagaggaccatcgagaagtttgagaaggaggccgctgagatgggcaagggcagcttcaagtatgcctgggtgctggacaagctgaaggccgagcgggagcggggcatcaccatcgacatcagcctgtggaagtttgagaccagcaagtactacgtgaccatcattgatgcccctggccaccgggacttcatcaagaacatgatcaccggcaccagccaggccgactgtgctgtgctgattgtggccgccggcgtgggggagtttgaagctggcatcagcaagaatggccagacccgggagcacgccctgctggcctacagccagaagagatatgaggagatcgtgaaggaggtgtccacctacatcaagaagattggctacaacccagacacagtggcctttgtgcccatcagcggctggaatggagacaacatgctggagcccagcgccaacatgccctggttcaagggctggaaggtgaccaggaaggatggaaatgccagcggcaccaccctgctggaggccctggactgcatcctgccccccacccggcccacagacaagcccctgcggctgcccctgcaggatgtgtacaagattggaggcatcggcaccgtgcctgtgggccgggtggagaccggggtgctgaagccaggcatggtggtgacctttgcccctgtgaatgtgaccacagaggtgaagtctgtggagatgcaccacgaggccctgtctgaggccctgcccggggacaacgtgggcttcaacgtgaagaatgtgtctgtgaaggatgtgagaagaggaaatgtggccggggacagcaagaatgacccccccatggaggccgccggcttcaccgcccaggtgatcatcctgaaccaccctggccagatctctgctggctacgcccctgtgctggactgccacacagcccacatcgcctgcaagtttgctgagctgaaggagaagattgaccggcgcagcggcaagaagctggaggatggccccaagttcctgaagtctggagatgctgccatcgtggacatggtgcctgggaagcccatgtgtgtggagagcttcagtgactacccacccctgggccgctttgctgtgcgggacatgaggcagacagtggccgtgggcgtcatcaaggctgtggacaagaaggctgctggagctgggaaggtgaccaagagcgcccagaaggcccagaaggccaagtag

SEQ ID NO: 329955 - DNA, 324 bp, Artificial Sequence
  derived and/or modified sequence
atgggcaaggagaagacccacatcaacatcgtggtgattggacatgtggacagcggcaagagcaccaccaccggccacctgatctacaagtgtggcggcatcgacaagaggaccatcgagaagtttgagaaggaggccgctgagatgggcaagggcagcttcaagtatgcctgggtgctggacaagctgaaggccgagcgggagcggggcatcaccatcgacatcagcctgtggaagtttgagaccagcaagtactacgtgaccatcattgatgcccctggccaccgggacttcatcaagaacatgatcaccggcaccagctag

SEQ ID NO: 329956 - DNA, 1389 bp, Artificial Sequence
  derived and/or modified sequence
atgggcaaggagaagacccacatcaacatcgtggtgatcggccacgtggactctggcaaatcaacaacaaccgggcatctgatttacaaatgcggtggcatcgataagagaacaatcgagaagtttgagaaggaagctgctgaaatgggcaagggctcgttcaaatacgcttgggtcctggacaaactcaaagccgagcgcgagaggggtatcacaatcgatatcagcctatggaagttcgagacgagcaaatactacgtgactattatcgatgcccccggacacagggatttcattaagaacatgattacaggcacatcccaggcagactgcgccgtcctgattgtggctgctggtgtaggggaatttgaggccgggatttcgaagaatgggcagacaagagagcacgctctcctggcctatacgctcggagttaagcaacttatcgtgggagtgaacaaaatggactcaacagaaccaccttactcgcaaaaaagatacgaggaaatcgtgaaggaggttagtacatacatcaagaagatcggctacaatccagacacggttgccttcgtccctatctctgggtggaacggggataacatgctcgagcccagcgctaacatgccttggttcaagggctggaaagtcacacggaaggatggaaacgcatctggtacaacattgctggaagcgctcgattgcatcctcccccccacacgcccaaccgacaagcccttaagattgccacttcaggacgtctacaaaatcggaggaattgggacagtgcctgttgggcgagtggagactggcgttcttaagccaggtatggttgtcaccttcgcaccagtaaacgtgaccacggaggtaaaaagcgttgagatgcatcatgaagcgctctctgaagccctaccaggcgataatgtcggattcaatgtgaaaaacgtatctgttaaagatgtaagacggggaaacgtggctggtgacagcaaaaatgaccctcctatggaagccgcaggattcacggctcaggtcatcatactgaatcatccaggccaaatttctgcaggctacgcgccagtgctcgattgccacacagcacatatcgcgtgcaagttcgctgaattgaaggagaaaatcgaccggaggtcgggaaaaaaactagaggatggcccgaagttcctaaaatccggcgatgccgccatagtggacatggttcctgggaagccaatgtgtgttgagagtttctccgattacccgccactggggcgattcgcggtgcgcgatatgagacagaccgttgctgtgggggtcattaaagccgtcgacaagaaagctgccggggcaggcaaagtcacaaagagtgcccagaaagcccagaaagcaaagtag

SEQ ID NO: 329957 - DNA, 1389 bp, Artificial Sequence
  derived and/or modified sequence
atgggcaaggagaagacccacatcaacatcgtggtgatcggccacgtcgattccgggaaatcaacaaccacagggcacctcatttataaatgcggcggaatagataagaggacaatcgagaagttcgagaaggaggcggctgagatgggtaaggggagctttaagtacgcctgggttttagataagctgaaggccgaacgggaacgcggcatcaccattgatatcagtctgtggaagttcgaaaccagtaagtattacgtcacaatcatcgacgctcctggccaccgggactttatcaagaatatgattacgggaacatcccaggccgattgcgcagtccttatcgtggccgccggtgttggtgagttcgaggccggcatctccaaaaacggacaaaccagagaacatgccttactggcctatacacttggggtgaagcagctgatcgtcggcgtgaacaagatggatagtaccgagcctccgtattctcagaaaaggtacgaagagatagtgaaagaagtatccacctacataaaaaagattggatataaccctgatacggtagcatttgtccctatttccgggtggaacggagacaacatgctggagccctctgctaatatgccttggttcaagggatggaaggtgacccgcaaagacggaaacgcatctgggactacccttctggaagccctagactgtatactgcctccgactaggcccacagataagcctctccggctgcctctccaggatgtttacaagatcggggggatcggcaccgttccagtggggagagtcgaaacaggcgtactaaaacctggaatggttgtcacattcgcaccagttaatgtgacgacggaagtgaagagtgtggagatgcaccacgaagccctttccgaggcactcccaggagataacgtgggatttaacgtgaagaatgtgtccgtgaaagatgtccggcgcggaaacgtcgccggagactccaaaaacgatccacctatggaggctgccggcttcactgcccaagtgatcattctcaatcatccaggccaaattagtgccgggtacgctcctgtgttagattgtcataccgcccacattgcctgcaaattcgctgagctcaaagagaaaattgatcggcgatctggaaaaaaactcgaggatggccctaaatttttgaagagcggggacgcagcaatcgtcgatatggtgccaggaaagcctatgtgcgtggagtctttcagtgattaccctcccttgggcagatttgctgtgagagacatgagacaaactgtagctgtcggagttataaaggcagtagacaaaaaggctgccggcgctggcaaagtcaccaaatcagcccagaaggctcaaaaggccaaatag

SEQ ID NO: 329958 - DNA, 1389 bp, Artificial Sequence
  derived and/or modified sequence
atgggcaaggagaagacccacatcaacatcgtggtgatcggccacgttgacagtgggaagagtactaccaccgggcacctgatttataaatgcggcggtatagacaagagaacaatcgaaaagtttgagaaggaggcagctgaaatgggcaaaggatctttcaagtatgcctgggtgctggataagttgaaggccgaacgcgaaaggggcatcacgatcgacatatccctgtggaagttcgaaacaagcaaatactatgtgaccatcatcgatgccccagggcaccgggattttatcaaaaatatgataacaggaacctcccaggccgattgcgcagttctgattgtcgccgcaggggtgggtgaattcgaggctggtataagcaagaatggacaaacccgggaacatgcactgctggcctacacactcggcgtgaaacagctgatagttggggtgaacaaaatggattctaccgagccaccctactcacagaagcggtacgaggagatcgtaaaggaagtaagtacatacatcaaaaaaataggctataacccggatacggtcgcgtttgtgcctatatccggatggaatggtgacaacatgctcgagccttccgctaatatgccttggttcaaaggttggaaggtcacccggaaagatggaaatgcttctggaacgacgttgttggaggccctggactgcatcctgcctccgactcggcctaccgataaacccctacgactgcccctccaggacgtctataaaatcggcggtatcggaaccgtgccggtcggccgcgttgagacaggcgtcttaaagccagggatggtggtgacctttgctcccgtgaacgtgacaacggaggtgaagtcagtggagatgcaccatgaggccctgagtgaggcgctccctggtgataacgtgggctttaatgttaagaatgtttctgtcaaggatgtccgccgtggcaacgtggccggagactccaaaaacgacccccccatggaagcagccggttttaccgcccaagtgatcatactaaatcaccccggtcaaattagcgcaggctacgctcctgttctggattgtcacacagcacacatagcttgtaagttcgcagagttaaaggagaaaattgaccgacgatcaggcaaaaagttagaggacggtccgaaattcctgaagagcggcgatgctgctattgttgatatggttcctgggaaaccaatgtgtgtagaaagctttagcgattaccctcccctgggtagattcgcggtcagagacatgcgtcagacggtggctgtgggggtgataaaagcagtggataagaaagccgcgggcgccggaaaggttaccaagtcagctcagaaagcccagaaggctaagtag

SEQ ID NO: 329959 - DNA, 438 bp, Artificial Sequence
  derived and/or modified sequence
atgggcaaggagaagacccacatcaacatcgtggtgatcggccacgtggatagcggtaaaagcacgacaacggggcatttgatctacaaatgtgggggtatcgataaacgcaccattgaaaagtttgagaaggaggcagccgagatggggaagggcagctttaaatacgcatgggtgctggataaactaaaggctgagagggagcgggggattaccattgatattagcttgtggaaattcgaaacatcaaagtactacgttaccattatcgatgcccccggccatagggacttcataaaaaacatgattaccggcacctcccaagcggactgtgctgtgttgatagtggccgcgggcgtgggagaattcgaggctgggatcagtaagaatggacaaacacgggagcatgccttgctggcatataccctgggcgtttag

SEQ ID NO: 329960 - DNA, 1281 bp, Artificial Sequence
  derived and/or modified sequence
atgggcaaggagaagacccacatcaacatcgtggtgatcggccacgttgattcaggaaagagcacgacaactgggcacctgatctacaagtgtggcggcattgataagcggacgattgagaaatttgagaaagaggccgcggagatgggaaaaggctctttcaagtacgcctgggttcttgataagcttaaagctgaaagagaacgaggcataaccattgacataagcttatggaaatttgagacatccaaatattacgttactatcatcgacgccccaggtcatagagatttcatcaaaaacatgattacaggcacatctcaggcagactgtgccgtcctcattgttgcagccggggtcggcgaatttgaggccgggatctcaaaaaacggacagacgagggaacacgctcttttggcatacacgttgggcgtgaaacagttaatcgtgggtgtgaacaaaatggacagcactgagcccccctattcccagaaacgatacgaagaaattgtgaaggaagtgtctacttatattaaaaaaattggatacaatcctgatacagtggctttcgtgcccatatctggttggaatggcgataatatgctggagccgagcgcaaacatgccttggttcaaaggctggaaggtcaccaggaaagatggtaacgcctctggcaccacactactggaggcgttagactgtatcctgccccctactcggcctactgataagccgctccgtctgcccctgcaggatgtgtataaaatcgggggcatcggtacagtgcccgtcccatcaggcgactggtgctctcctggcatggtagtgacattcgctcctgtgaatgttactaccgaagtgaaatcggtcgagatgcaccacgaagccctcagtgaggctctgccaggcgataacgttggttttaacgtcaaaaacgtgtccgtgaaagacgtgcggagaggcaatgtggctggggattcaaagaacgatccccccatggaggctgccggcttcaccgcgcaagtcattatactaaatcacccggggcaaatcagcgctggatacgctcccgtcctcgattgccacacagctcatatagcatgtaaatttgccgaactaaaggagaagatcgatcggagaagcgggaagaaactggaagacgggcccaaatttctgaaatcgggcgacgccgccatcgtggacatggtgccaggaaagccgatgtgcgtggagtcgttctccgactaccccccactaggtaagtcactctgttgctcatag

SEQ ID NO: 329961 - DNA, 1326 bp, Artificial Sequence
  derived and/or modified sequence
atgggcaaggagaagacccacatcaacatcgtggtgatcggccacgtggacagcgggaagtccaccaccacgggccacctgatttacaaatgcggcggtatcgacaaaaggactatcgagaagttcgagaaggaagctgccgagatgggtaaaggatccttcaaatatgcttgggtcttggacaagctcaaggctgagcgcgaaagaggaatcacaattgatattagcctctggaagttcgaaacaagcaaatattatgtgaccatcatagacgcccccggtcatcgagatttcatcaagaacatgataacagggacatctcaggcagattgtgccgtactgattgttgctgctggtgtgggagaatttgaagctgggatttccaagaacggccagacaagagagcacgctctgctggcatatagccaaaagagatacgaggagatagtaaaagaggtgtctacatatatcaagaagatcgggtataaccctgataccgtcgcattcgtcccaatctcaggctggaatggcgataacatgcttgaacccagtgccaatatgccgtggtttaagggttggaaagtgactcgcaaagatggaaacgctagtgggactacactgttggaagcccttgactgcattttgccgccaacccggcctacagataaacctctgaggctgcccctacaggatgtgtacaaaatcggagggataggtacagtgcccgtaggtcgcgtggaaacaggcgtgttaaagccaggtatggtggtcacattcgcccctgtcaacgtgaccactgaagtgaaatccgtggagatgcaccatgaagcgttgtcagaagctctccctggagacaacgtgggcttcaacgtcaagaacgtgagcgttaaagacgtgcgtcgcggaaacgtggcaggagactccaagaatgatccccctatggaggctgcaggttttactgcacaggtaatcattctgaaccacccgggccagatctccgcagggtatgctcccgtcctcgactgccacacggcccacatcgcttgtaaattcgcagagctgaaggaaaaaattgaccgccgatcgggaaagaaactggaggacggacccaaatttcttaagagcggggatgccgccatcgtggatatggtaccaggcaaacccatgtgcgtggaatcgttcagcgactatccacctcttgggcgtttcgccgtgcgggacatgaggcagaccgtggctgtgggcgtgatcaaggccgtggataagaaggcagctggcgcagggaaggtgaccaagtcagcacagaaagcccagaaagctaagtag

SEQ ID NO: 329962 - DNA, 324 bp, Artificial Sequence
  derived and/or modified sequence
atgggcaaggagaagacccacatcaacatcgtggtgatcggccacgttgactccggcaaatctacaaccaccggacacctcatctacaagtgtggtggaattgacaagcgaacgatagaaaagtttgagaaagaagcggccgaaatgggcaaaggaagttttaaatacgcttgggtactggataaactcaaagccgagcgtgagcggggcatcacaattgatatctcactgtggaaatttgagacatctaagtactacgttacaatcattgacgcacctggacatagggatttcatcaagaacatgattaccggaacgtcgtag

SEQ ID NO: 329963 - DNA, 1389 bp, Artificial Sequence
  derived and/or modified sequence
atgggaaaggaaaagacacacatcaatatcgtcgtcatcggccatgttgactcagggaagtcaaccactactgggcacctcatctacaaatgtgggggtatcgataaacgtaccattgaaaaattcgaaaaagaggccgctgaaatgggcaaaggcagctttaagtatgcctgggtgctggataaacttaaggctgagcgggagcggggaatcactattgacataagcctatggaagtttgagacttcgaagtattacgtcacgataattgatgcaccgggacacagggactttataaagaatatgataacaggaacttcccaggcagattgcgccgtgttaattgtggctgccggagtgggggaatttgaagctggcatctccaagaatggacagacgagagaacatgctctgctagcttataccctcggggtgaagcaactaatcgtcggggtgaacaagatggacagcactgaaccaccttatagccagaagaggtacgaagaaatcgtgaaagaagtgtctacttatatcaagaaaatcggatacaatccagacaccgtagcattcgttcccatctctggctggaatggggacaacatgctagaaccatcggccaacatgccttggtttaaagggtggaaagtgacacggaaggatgggaatgcttccggcacaactctccttgaggccctcgactgtatactacctccgaccagaccaacagataagccacttaggctccccctacaagacgtgtataagatcggtggaatcgggacagtccctgtaggccgtgtcgaaacaggggtcctgaagccaggaatggtcgtgacgtttgcccctgtgaacgtcactactgaagtgaagagtgtagagatgcaccacgaagctctgagtgaagccctccccggtgacaatgtaggctttaatgtgaagaatgtgtctgtaaaggacgtaaggcgcggtaacgttgcaggcgacagtaagaacgatccccctatggaagccgctgggttcactgcccaggtgatcatccttaatcatcccggacagatctccgccggttatgctcctgttctggattgtcatactgctcatatcgcatgtaagtttgctgagctcaaagagaagatcgaccgcagatcaggcaagaagttggaggacggccctaaattcttgaagtctggtgatgctgctattgtggacatggttcctgggaaaccaatgtgcgtcgaatcctttagcgattacccccctttagggcgatttgcagtccgcgacatgcgccagactgttgctgttggagttattaaagcagttgataagaaggcagccggtgcaggtaaagtgaccaagagcgcccaaaaggcacagaaggctaaatag

SEQ ID NO: 329964 - DNA, 1389 bp, Artificial Sequence
  derived and/or modified sequence
atgggtaaagaaaagacccatatcaacatcgtcgtaatcggacatgtcgatagcggtaagagcacgacaaccggtcacctgatatacaagtgtgggggaatcgataagaggacgattgagaaattcgaaaaggaggctgcagagatgggcaagggctcatttaaatacgcctgggtgctggataagctgaaggccgagcgggagcgcggtatcacaatcgacatctctctttggaaatttgaaacatccaagtactatgtgactatcatagatgcacccggacatagagacttcatcaagaacatgattaccggtacaagccaagctgactgtgcagtcttaatcgtagcagcaggtgttggagagttcgaggccggaataagtaagaatgggcagacaagagagcatgctctccttgcctacaccctgggtgttaaacagctcattgtgggtgtgaataagatggattcaacggagcccccttacagtcagaagaggtacgaggagatcgttaaagaagtgagtacttatataaaaaagataggctataatcccgacacagtggcatttgtgcccattagcggatggaatggggataacatgttagaaccttccgcgaacatgccttggttcaagggatggaaggtgaccagaaaggacggaaacgcatctggaactactctacttgaggccctggactgtatactcccacccaccagacccaccgacaagcccttacgtctccctctccaggatgtctacaaaattggtggaattggcaccgtaccagtgggtcgggtggaaactggtgtgctgaagcccggaatggtagtgacattcgctcctgtgaacgtcacaacagaggtgaagtccgtggaaatgcaccatgaggcgctgagcgaagctctgccaggggacaatgttggcttcaacgtcaagaatgtgagcgttaaggacgtgcgccgagggaacgttgctggcgattctaagaatgatcctcccatggaagcagctggctttaccgcccaggtcattatcctgaaccaccctggccaaattagcgcagggtatgcacccgtgttagattgccatacagcgcacatcgcctgtaagtttgctgagcttaaggagaaaatcgataggcggtccggcaaaaagctggaagatggacctaagttcttaaagtcgggagacgctgccatcgtggacatggtgcccggaaaaccaatgtgcgtggaatcattttccgactatcccccacttggtaggtttgcggtgagagatatgcgccagacggtcgcggtcggagtcatcaaagctgtcgataaaaaagctgccggagccggtaaggtgaccaagtctgcccagaaggcacaaaaagccaagtag

SEQ ID NO: 329965 - DNA, 1389 bp, Artificial Sequence
  derived and/or modified sequence
atgggaaaagaaaaaactcatatcaatattgtcgtaatcgggcatgttgattccggcaaaagcactactaccggtcacctaatatataaatgtggtggtatcgacaaaaggaccatcgaaaagttcgagaaagaagcggcagaaatgggcaagggttcttttaagtacgcctgggtactggataaattaaaagctgagagagaaaggggtattactatcgatatttcattatggaagttcgagacttctaagtattatgtgacaatcatagatgccccaggccaccgagatttcataaagaacatgatcaccggcacgagtcaggctgactgcgctgtgctgatagtcgccgcaggtgtcggcgaattcgaggctggcatcagcaagaatggccagacgagggaacacgccctcttggcatacacactgggcgtcaaacaactgatcgtgggcgtgaataaaatggattccacagagccaccctattcccagaaaagatacgaggagatcgtcaaggaagtatctacatacataaaaaagattggctacaaccctgatacagtggcatttgtgcctatctctgggtggaacggcgataacatgctggaaccttctgccaatatgccttggttcaaagggtggaaggtcactaggaaagacggaaacgcttctggaactacactgctcgaggcactggactgtatcctcccccctactaggccgacagataaacccttgcgcctccctttgcaggacgtgtataagatcgggggtattggaaccgtgcctgttggcagagttgagaccggcgtcctgaagcccggaatggtggtgacattcgcgcctgtcaacgtaactactgaggttaaatcagtggagatgcatcacgaggccctgtccgaggccctacctggtgacaatgtgggcttcaatgtgaagaacgtgtccgtcaaagatgtgcggagagggaacgtagccggagattcaaagaacgaccctccaatggaggccgctggatttaccgcccaggtgatcattttgaaccacccaggacaaatctccgccggttatgcccctgtacttgattgccatacagcccacatagcatgcaagtttgccgagcttaaagagaaaatagatagacggagcggtaagaaacttgaggatgggccaaagttcctcaaatcgggtgacgccgctatcgtagatatggtgcccggtaagcctatgtgcgttgaatccttttccgattatcctccactcggaaggtttgcagttagagatatgaggcaaaccgtagcagtcggggtcataaaagctgtggataagaaggctgcgggagcaggcaaggtgactaagagtgcacagaaagcacagaaggccaagtag

SEQ ID NO: 329966 - DNA, 438 bp, Artificial Sequence
  derived and/or modified sequence
atgggcaaagaaaaaacacatatcaatatcgtggttataggacatgtggacagcggcaagtctacaacgactggtcacttaatctataaatgcggtggtattgataagcgaaccatcgagaagttcgaaaaggaagctgccgagatgggcaaaggatcgttcaaatacgcatgggtcctggacaaactgaaagctgaaagggaacgagggatcactatcgacataagcctgtggaagtttgaaaccagcaaatactatgttaccattattgatgctcccggtcatagagacttcatcaagaatatgattactggaaccagccaggccgattgtgccgttctgatcgttgcggcaggagttggagagttcgaggcagggatttcgaagaacgggcagactcgcgagcacgcattgctagcctatactctgggggtctag

SEQ ID NO: 329967 - DNA, 1281 bp, Artificial Sequence
  derived and/or modified sequence
atgggtaaggagaagacacacatcaacattgtcgtgatcgggcatgtggatagtgggaagtcaacaacaacagggcacctcatatacaaatgtggcggaatcgataagaggacaatcgagaaattcgagaaagaagcggcagagatggggaagggaagctttaaatacgcctgggtattggacaagcttaaagccgaaagagagcgtggcatcacgattgacatttcgctctggaaatttgaaacgtcaaaatattatgtgaccatcatcgatgcccctgggcaccgtgactttatcaaaaacatgattaccggcaccagccaggccgactgcgcagtgcttatcgtagcagccggagtgggtgagttcgaagccggtatctcgaagaatggtcagacacgggagcatgcccttctggcatacaccctgggcgtgaaacagttaatcgtaggcgtgaataaaatggactcgactgagcccccatattctcagaagcggtatgaggagatcgtcaaggaggtctccacctatatcaaaaagatcggttacaacccagatactgtagccttcgtcccgatcagtggctggaacggagataatatgttagagcccagtgccaatatgccatggttcaaggggtggaaagtcactcggaaggacggaaatgcttctggaaccaccctgttggaggcattggactgcatattaccacctactcgccctacagacaaaccccttcgcctgccactgcaagatgtctacaagatagggggtattggaaccgtccccgtacctagcggagattggtgttcccctggaatggttgtgacgttcgcaccggttaatgtaaccactgaggtcaaatctgtggaaatgcaccacgaagctcttagtgaggccctcccaggcgataatgttggcttcaacgtcaagaatgtaagcgtgaaggatgtgagacgcggaaatgtagctggcgactctaagaatgacccccctatggaagccgcaggcttcactgcgcaggtgattatcctgaaccatccgggacagatatcagccggatatgctcccgtactggactgtcacaccgcccacatagcctgcaaattcgctgagttgaaggaaaagattgatcggagaagtggcaagaagctggaggatggcccaaagttccttaaatccggtgacgccgcaattgttgacatggtccccggaaagcccatgtgtgtggagagcttttccgattacccacctcttgggaaaagtttatgttgttcctag

SEQ ID NO: 329968 - DNA, 1326 bp, Artificial Sequence
  derived and/or modified sequence
atgggtaaagagaagactcacatcaacatcgtggtcatcggtcatgtggactctggcaagtctacgaccaccggccacttaatatacaagtgcggtggcatagataagcgcaccattgaaaagttcgaaaaggaagcggcagagatgggcaagggcagctttaagtacgcctgggttcttgataagttgaaggcagagcgtgaacggggtattactatcgatatatctctctggaaattcgaaacctccaaatattacgttaccattattgatgcccctggccacagggatttcataaagaacatgataaccggaactagccaggccgactgtgctgtattgatcgttgcagccggagtcggcgagtttgaggcagggatctcaaaaaatggtcagacgagggaacatgcgttactggcttatagccagaaacgttatgaagagatcgttaaggaggtttccacctacattaaaaaaattgggtataatcctgatactgtggcctttgtccccataagtggctggaacggtgacaatatgctcgagccaagcgccaacatgccctggttcaagggctggaaggtcacacgcaaggacggtaacgcatctggcaccacactacttgaggcgctggattgtattttacctcccactcgacctacagacaaaccgctgcgcctccctcttcaggatgtgtataagattggcggaattggcacagtgcccgttgggcgtgtggagaccggcgtactgaagcctggtatggtagtaaccttcgctcctgttaacgtgactacagaggtcaaatcagtggagatgcaccacgaggccctgtccgaggcgctccccggagacaatgtgggcttcaatgtgaaaaacgtcagtgttaaggatgttcgaagaggcaatgtggctggcgattccaagaacgacccacccatggaggctgcaggcttcactgcgcaggttattatcctcaatcatccgggacagatctcagcaggctacgccccagtgctggactgccacacggcccatatcgcctgcaaattcgctgagctgaaagagaaaattgaccggagatccgggaaaaaattagaagacggacctaagttcttgaagagcggtgacgccgcaatcgtcgatatggttccgggtaaaccaatgtgcgttgagtccttttccgactatccgcctttgggcagattcgcagtaagagatatgagacaaactgtggctgtaggagtgattaaggccgtcgacaagaaggccgctggggctggaaaggtgacaaagtctgcgcagaaggcacaaaaagcaaaatag

SEQ ID NO: 329969 - DNA, 324 bp, Artificial Sequence
  derived and/or modified sequence
atgggcaaggagaagactcacataaacatagtggtgatagggcacgtggatagtggcaagtccaccaccaccggtcacctaatatataaatgtgggggtatcgacaaaaggaccattgaaaagtttgaaaaggaggcagcggaaatggggaaaggatcctttaagtatgcctgggtcctggataagctgaaagccgaacgcgagcgtggtattacaatcgatatctcattatggaagtttgagacctctaaatactatgtcaccatcattgatgcgcctggacatcgcgacttcataaaaaatatgattactggcacgagctag

SEQ ID NO: 329970 - DNA, 1389 bp, Artificial Sequence
  derived and/or modified sequence
atgggcaaggagaagacccacatcaacatcgtggtgatcggccacgtggacagcggcaagagcaccaccaccggccacctgatctacaagtgcggcggcatcgacaagagaaccatcgagaagttcgagaaggaggccgccgagatgggcaagggcagcttcaagtacgcctgggtgctggacaagctgaaggccgagagagagagaggcatcaccatcgacatcagcctgtggaagttcgagaccagcaagtactacgtgaccatcatcgacgcccccggccacagagacttcatcaagaacatgatcaccggcaccagccaggccgactgcgccgtgctgatcgtggccgccggcgtgggcgagttcgaggccggcatcagcaagaacggccagaccagagagcacgccctgctggcctacaccctgggcgtgaagcagctgatcgtgggcgtgaacaagatggacagcaccgagcccccctacagccagaagagatacgaggagatcgtgaaggaggtgagcacctacatcaagaagatcggctacaaccccgacaccgtggccttcgtgcccatcagcggctggaacggcgacaacatgctggagcccagcgccaacatgccctggttcaagggctggaaggtgaccagaaaggacggcaacgccagcggcaccaccctgctggaggccctggactgcatcctgccccccaccagacccaccgacaagcccctgagactgcccctgcaggacgtgtacaagatcggcggcatcggcaccgtgcccgtgggcagagtggagaccggcgtgctgaagcccggcatggtggtgaccttcgcccccgtgaacgtgaccaccgaggtgaagagcgtggagatgcaccacgaggccctgagcgaggccctgcccggcgacaacgtgggcttcaacgtgaagaacgtgagcgtgaaggacgtgagaagaggcaacgtggccggcgacagcaagaacgacccccccatggaggccgccggcttcaccgcccaggtgatcatcctgaaccaccccggccagatcagcgccggctacgcccccgtgctggactgccacaccgcccacatcgcctgcaagttcgccgagctgaaggagaagatcgacagaagaagcggcaagaagctggaggacggccccaagttcctgaagagcggcgacgccgccatcgtggacatggtgcccggcaagcccatgtgcgtggagagcttcagcgactacccccccctgggcagattcgccgtgagagacatgagacagaccgtggccgtgggcgtgatcaaggccgtggacaagaaggccgccggcgccggcaaggtgaccaagagcgcccagaaggcccagaaggccaagtag

SEQ ID NO: 329971 - DNA, 438 bp, Artificial Sequence
  derived and/or modified sequence
atgggcaaggagaagacccacatcaacatcgtggtgatcggccacgtggacagcggcaagagcaccaccaccggccacctgatctacaagtgcggcggcatcgacaagagaaccatcgagaagttcgagaaggaggccgccgagatgggcaagggcagcttcaagtacgcctgggtgctggacaagctgaaggccgagagagagagaggcatcaccatcgacatcagcctgtggaagttcgagaccagcaagtactacgtgaccatcatcgacgcccccggccacagagacttcatcaagaacatgatcaccggcaccagccaggccgactgcgccgtgctgatcgtggccgccggcgtgggcgagttcgaggccggcatcagcaagaacggccagaccagagagcacgccctgctggcctacaccctgggcgtgtag

SEQ ID NO: 329972 - DNA, 1281 bp, Artificial Sequence
  derived and/or modified sequence
atgggcaaggagaagacccacatcaacatcgtggtgatcggccacgtggacagcggcaagagcaccaccaccggccacctgatctacaagtgcggcggcatcgacaagagaaccatcgagaagttcgagaaggaggccgccgagatgggcaagggcagcttcaagtacgcctgggtgctggacaagctgaaggccgagagagagagaggcatcaccatcgacatcagcctgtggaagttcgagaccagcaagtactacgtgaccatcatcgacgcccccggccacagagacttcatcaagaacatgatcaccggcaccagccaggccgactgcgccgtgctgatcgtggccgccggcgtgggcgagttcgaggccggcatcagcaagaacggccagaccagagagcacgccctgctggcctacaccctgggcgtgaagcagctgatcgtgggcgtgaacaagatggacagcaccgagcccccctacagccagaagagatacgaggagatcgtgaaggaggtgagcacctacatcaagaagatcggctacaaccccgacaccgtggccttcgtgcccatcagcggctggaacggcgacaacatgctggagcccagcgccaacatgccctggttcaagggctggaaggtgaccagaaaggacggcaacgccagcggcaccaccctgctggaggccctggactgcatcctgccccccaccagacccaccgacaagcccctgagactgcccctgcaggacgtgtacaagatcggcggcatcggcaccgtgcccgtgcccagcggcgactggtgcagccccggcatggtggtgaccttcgcccccgtgaacgtgaccaccgaggtgaagagcgtggagatgcaccacgaggccctgagcgaggccctgcccggcgacaacgtgggcttcaacgtgaagaacgtgagcgtgaaggacgtgagaagaggcaacgtggccggcgacagcaagaacgacccccccatggaggccgccggcttcaccgcccaggtgatcatcctgaaccaccccggccagatcagcgccggctacgcccccgtgctggactgccacaccgcccacatcgcctgcaagttcgccgagctgaaggagaagatcgacagaagaagcggcaagaagctggaggacggccccaagttcctgaagagcggcgacgccgccatcgtggacatggtgcccggcaagcccatgtgcgtggagagcttcagcgactacccccccctgggcaagagcctgtgctgcagctag

SEQ ID NO: 329973 - DNA, 1326 bp, Artificial Sequence
  derived and/or modified sequence
atgggcaaggagaagacccacatcaacatcgtggtgatcggccacgtggacagcggcaagagcaccaccaccggccacctgatctacaagtgcggcggcatcgacaagagaaccatcgagaagttcgagaaggaggccgccgagatgggcaagggcagcttcaagtacgcctgggtgctggacaagctgaaggccgagagagagagaggcatcaccatcgacatcagcctgtggaagttcgagaccagcaagtactacgtgaccatcatcgacgcccccggccacagagacttcatcaagaacatgatcaccggcaccagccaggccgactgcgccgtgctgatcgtggccgccggcgtgggcgagttcgaggccggcatcagcaagaacggccagaccagagagcacgccctgctggcctacagccagaagagatacgaggagatcgtgaaggaggtgagcacctacatcaagaagatcggctacaaccccgacaccgtggccttcgtgcccatcagcggctggaacggcgacaacatgctggagcccagcgccaacatgccctggttcaagggctggaaggtgaccagaaaggacggcaacgccagcggcaccaccctgctggaggccctggactgcatcctgccccccaccagacccaccgacaagcccctgagactgcccctgcaggacgtgtacaagatcggcggcatcggcaccgtgcccgtgggcagagtggagaccggcgtgctgaagcccggcatggtggtgaccttcgcccccgtgaacgtgaccaccgaggtgaagagcgtggagatgcaccacgaggccctgagcgaggccctgcccggcgacaacgtgggcttcaacgtgaagaacgtgagcgtgaaggacgtgagaagaggcaacgtggccggcgacagcaagaacgacccccccatggaggccgccggcttcaccgcccaggtgatcatcctgaaccaccccggccagatcagcgccggctacgcccccgtgctggactgccacaccgcccacatcgcctgcaagttcgccgagctgaaggagaagatcgacagaagaagcggcaagaagctggaggacggccccaagttcctgaagagcggcgacgccgccatcgtggacatggtgcccggcaagcccatgtgcgtggagagcttcagcgactacccccccctgggcagattcgccgtgagagacatgagacagaccgtggccgtgggcgtgatcaaggccgtggacaagaaggccgccggcgccggcaaggtgaccaagagcgcccagaaggcccagaaggccaagtag

SEQ ID NO: 329974 - DNA, 324 bp, Artificial Sequence
  derived and/or modified sequence
atgggcaaggagaagacccacatcaacatcgtggtgatcggccacgtggacagcggcaagagcaccaccaccggccacctgatctacaagtgcggcggcatcgacaagagaaccatcgagaagttcgagaaggaggccgccgagatgggcaagggcagcttcaagtacgcctgggtgctggacaagctgaaggccgagagagagagaggcatcaccatcgacatcagcctgtggaagttcgagaccagcaagtactacgtgaccatcatcgacgcccccggccacagagacttcatcaagaacatgatcaccggcaccagctag

SEQ ID NO: 329975 - DNA, 2303 bp, Artificial Sequence
  derived and/or modified sequence
cgcagaggaagacgctctagggatttgtcccggactagcgagatggcaaggctgaggacgggaggctgattgagaggcgaaggtacaccctaatctcaatacaacctttggagctaagccagcaatggtagagggaagattctgcacgtcccttccaggcggcctccccgtcaccaccccccccaacccgccccgaccggagctgagagtaattcatacaaaaggactcgcccctgccttggggaatcccagggaccgtcgttaaactcccactaacgtagaacccagagatcgctgcgttcccgccccctcacccgcccgctctcgtcatcactgaggtggagaagagcatgcgtgaggctccggtgcccgtcagtgggcagagcgcacatcgcccacagtccccgagaagttggggggaggggtcggcaattgaaccggtgcctagagaaggtggcgcggggtaaactgggaaagtgatgtcgtgtactggctccgcctttttcccgagggtgggggagaaccgtatataagtgcagtagtcgccgtgaacgttctttttcgcaacgggtttgccgccagaacacaggtgtcgtgaaaactacccctaaaagccaaaatgggaaaggaaaagactcatatcaacattgtcgtcattggacacgtagattcgggcaagtccaccactactggccatctgatctataaatgcggtggcatcgacaaaagaaccattgaaaaatttgagaaggaggctgctgagatgggaaagggctccttcaagtatgcctgggtcttggataaactgaaagctgagcgtgaacgtggtatcaccattgatatctccttgtggaaatttgagaccagcaagtactatgtgactatcattgatgccccaggacacagagactttatcaaaaacatgattacagggacatctcaggctgactgtgctgtcctgattgttgctgctggtgttggtgaatttgaagctggtatctccaagaatgggcagacccgagagcatgcccttctggcttacacactgggtgtgaaacaactaattgtcggtgttaacaaaatggattccactgagccaccctacagccagaagagatatgaggaaattgttaaggaagtcagcacttacattaagaaaattggctacaaccccgacacagtagcatttgtgccaatttctggttggaatggtgacaacatgctggagccaagtgctaacatgccttggttcaagggatggaaagtcacccgtaaggatggcaatgccagtggaaccacgctgcttgaggctctggactgcatcctaccaccaactcgtccaactgacaagcccttgcgcctgcctctccaggatgtctacaaaattggtggtattggtactgttcctgttggccgagtggagactggtgttctcaaacccggtatggtggtcacctttgctccagtcaacgttacaacggaagtaaaatctgtcgaaatgcaccatgaagctttgagtgaagctcttcctggggacaatgtgggcttcaatgtcaagaatgtgtctgtcaaggatgttcgtcgtggcaacgttgctggtgacagcaaaaatgacccaccaatggaagcagctggcttcactgctcaggtgattatcctgaaccatccaggccaaataagcgccggctatgcccctgtattggattgccacacggctcacattgcatgcaagtttgctgagctgaaggaaaagattgatcgccgttctggtaaaaagctggaagatggccctaaattcttgaagtctggtgatgctgccattgttgatatggttcctggcaagcccatgtgtgttgagagcttctcagactatccacctttgggtcgctttgctgttcgtgatatgagacagacagttgcggtgggtgtcatcaaagcagtggacaagaaggctgctggagctggcaaggtcaccaagtctgcccagaaagctcagaaggctaaatgaatattatccctaatacctgccaccccactcttaatcagtggtggaagaacggtctcagaactgtttgtttcaattggccatttaagtttagtagtaaaagactggttaatgataacaatgcatcgtaaaaccttcagaaggaaaggagaatgttttgtggaccactttggttttcttttttgcgtgtggcagttttaagttattagtttttaaaatcagtactttttaatggaaacaacttgaccaaaaatttgtcacagaattttgagacccattaaaaaagttaaatgagaaa

SEQ ID NO: 329976 - DNA, 4441 bp, Artificial Sequence
  derived and/or modified sequence
gtttgccgccagaacacaggtaagtgccgtgtgtggttcccgcgggcctggcctctttacgggttatggcccttgcgtgccttgaattacttccacgcccctggctgcagtacgtgattcttgatcccgagcttcgggttggaagtgggtgggagagttcgaggccttgcgcttaaggagccccttcgcctcgtgcttgagttgaggcctggcttgggcgctggggccgccgcgtgcgaatctggtggcaccttcgcgcctgtctcgctgctttcgataagtctctagccatttaaaatttttgatgacctgctgcgacgctttttttctggcaagatagtcttgtaaatgcgggccaagatctgcacactggtatttcggtttttggggccgcgggcggcgacggggcccgtgcgtcccagcgcacatgttcggcgaggcggggcctgcgagcgcggccaccgagaatcggacgggggtagtctcaagctggccggcctgctctggtgcctggcctcgcgccgccgtgtatcgccccgccctgggcggcaaggctggcccggtcggcaccagttgcgtgagcggaaagatggccgcttcccggccctgctgcagggagctcaaaatggaggacgcggcgctcgggagagcgggcgggtgagtcacccacacaaaggaaaagggcctttccgtcctcagccgtcgcttcatgtgactccacggagtaccgggcgccgtccaggcacctcgattagttctcgagcttttggagtacgtcgtctttaggttggggggaggggttttatgcgatggagtttccccacactgagtgggtggagactgaagttaggccagcttggcacttgatgtaattctccttggaatttgccctttttgagtttggatcttggttcattctcaagcctcagacagtggttcaaagtttttttcttccatttcaggtgtcgtgaaaactacccctaaaagccaaaatgggaaaggaaaagactcatatcaacattgtcgtcattggacacgtagattcgggcaagtccaccactactggccatctgatctataaatgcggtggcatcgacaaaagaaccattgaaaaatttgagaaggaggctgctgagatgggaaagggctccttcaagtatgcctgggtcttggataaactgaaagctgagcgtgaacgtggtatcaccattgatatctccttgtggaaatttgagaccagcaagtactatgtgactatcattgatgccccaggacacagagactttatcaaaaacatgattacagggacatctcaggctgactgtgctgtcctgattgttgctgctggtgttggtgaatttgaagctggtatctccaagaatgggcagacccgagagcatgcccttctggcttacacactgggtgtgaaacaactaattgtcggtgttaacaaaatggattccactgagccaccctacagccagaagagatatgaggaaattgttaaggaagtcagcacttacattaagaaaattggctacaaccccgacacagtagcatttgtgccaatttctggttggaatggtgacaacatgctggagccaagtgctaacatgccttggttcaagggatggaaagtcacccgtaaggatggcaatgccagtggaaccacgctgcttgaggctctggactgcatcctaccaccaactcgtccaactgacaagcccttgcgcctgcctctccaggatgtctacaaaattggtggtattggtactgttcctgttggccgagtggagactggtgttctcaaacccggtatggtggtcacctttgctccagtcaacgttacaacggaagtaaaatctgtcgaaatgcaccatgaagctttgagtgaagctcttcctggggacaatgtgggcttcaatgtcaagaatgtgtctgtcaaggatgttcgtcgtggcaacgttgctggtgacagcaaaaatgacccaccaatggaagcagctggcttcactgctcaggtgattatcctgaaccatccaggccaaataagcgccggctatgcccctgtattggattgccacacggctcacattgcatgcaagtttgctgagctgaaggaaaagattgatcgccgttctggtaaaaagctggaagatggccctaaattcttgaagtctggtgatgctgccattgttgatatggttcctggcaagcccatgtgtgttgagagcttctcagactatccacctttgggtcgctttgctgttcgtgatatgagacagacagttgcggtgggtgtcatcaaagcagtggacaagaaggctgctggagctggcaaggtcaccaagtctgcccagaaagctcagaaggctaaatgaatattatccctaatacctgccaccccactcttaatcagtggtggaagaacggtctcagaactgtttgtttcaattggccatttaagtttagtagtaaaagactggttaatgataacaatgcatcgtaaaaccttcagaaggaaaggagaatgttttgtggaccactttggttttcttttttgcgtgtggcagttttaagttattagtttttaaaatcagtactttttaatggaaacaacttgaccaaaaatttgtcacagaattttgagacccattaaaaaagttaaatgagaaacctgtgtgttcctttggtcaacaccgagacatttaggtgaaagacatctaattctggttttacgaatctggaaacttcttgaaaatgtaattcttgagttaacacttctgggtggagaatagggttgttttccccccacataattggaaggggaaggaatatcatttaaagctatgggagggttgctttgattacaacactggagagaaatgcagcatgttgctgattgcctgtcactaaaacaggccaaaaactgagtccttgtgttgcatagaaagcttcatgttgctaaaccaatgttaagtgaatctttggaaacaaaatgtttccaaattactgggatgtgcatgttgaaacgtgggttaaaatgactgggcagtgaaagttgactatttgccatgacataagaaataagtgtagtggctagtgtacaccctatgagtggaagggtccattttgaagtcagtggagtaagctttatgccagtttgatggtttcacaagttctattgagtgctattcagaataggaacaaggttctaatagaaaaagatggcaatttgaagtagctataaaattagactaatctacattgcttttctcctgcagagtctaataccttttatgctttgataattagcagtttgtctacttggtcactaggaatgaaactacatggtaataggcttaacaggtgtaatagcccacttactcctgaatctttaagcatttgtgcatttgaaaaatgcttttcgcgatcttcctgctgggattacaggcatgagccactgtgcctgacctcccatatgtaaaagtgtctaaaggtttttttttggttataaaaggaaaatttttgcttaagtttgaaggataggtaaaattaaaggacatgctttctgtttgtgtgatggtttttaaaaattttttttaagatggagttcttgttgcccaggctagaatgcaatggcaaaatctcactgcaatctcctcctcctgggttcaagcaattctcctacttcagcctcccaagtagctgggattacaggcatgtgctaatttggtgtttttaatagagatgaggtttttccatgttggtcaggctggtctcaaactcctgaccttaggtgatcgcctcggcctcctaaagtgctggaattacaggcatgagccaccatgcctggccaggacatgtgttcttaaggacatgctaagcaggagttaaagcagcccaagagataaggcctcttaaagtgactggcaatgtgtattgctcaagattcaaaggtacttgaattggccatagacaagtctgtaatgaagtgttatcgttttccctcatctgagtctgaattagataaaatgccttcccatcagccagtgctctgaggtatcaagtctaaattgaactagagatttttgtccttagtttctttgctatctaatgtttacacaagtaaatagtctaagatttgctggatgacagaaaaaacaggtaaggcctttaatagatggccaatagatgccctgataatgaaagttgacacctgtaagatttaccagtagagaattcttgacatgcaaggaagcaagatttaactgaaaaattgttcccactggaagcaggaatgagtcagtttacttgcatatactgagattgagattaacttcctgtgaaacccagtgtcttagacaactgtggcttgagcaccacctgctggtattcattacaaacttgctcactacaataaatgaattttaagctttaa

SEQ ID NO: 329977 - DNA, 1923 bp, Artificial Sequence
  derived and/or modified sequence
cgttaaggaggcccccagtcccgacccttcgccccaagcccctcggggtccccgggcctggtactccttgccacacgggaggggcgcggaagccggggcggaggaggagccaaccccgggctgggctgagacccgcagaggaagacgctctagggatttgtcccggactagcgagatggcaaggctgaggacgggaggctgattgagaggcgaaggtgtcgtgaaaactacccctaaaagccaaaatgggaaaggaaaagactcatatcaacattgtcgtcattggacacgtagattcgggcaagtccaccactactggccatctgatctataaatgcggtggcatcgacaaaagaaccattgaaaaatttgagaaggaggctgctgagatgggaaagggctccttcaagtatgcctgggtcttggataaactgaaagctgagcgtgaacgtggtatcaccattgatatctccttgtggaaatttgagaccagcaagtactatgtgactatcattgatgccccaggacacagagactttatcaaaaacatgattacagggacatctcaggctgactgtgctgtcctgattgttgctgctggtgttggtgaatttgaagctggtatctccaagaatgggcagacccgagagcatgcccttctggcttacacactgggtgtgaaacaactaattgtcggtgttaacaaaatggattccactgagccaccctacagccagaagagatatgaggaaattgttaaggaagtcagcacttacattaagaaaattggctacaaccccgacacagtagcatttgtgccaatttctggttggaatggtgacaacatgctggagccaagtgctaacatgccttggttcaagggatggaaagtcacccgtaaggatggcaatgccagtggaaccacgctgcttgaggctctggactgcatcctaccaccaactcgtccaactgacaagcccttgcgcctgcctctccaggatgtctacaaaattggtggtattggtactgttcctgttggccgagtggagactggtgttctcaaacccggtatggtggtcacctttgctccagtcaacgttacaacggaagtaaaatctgtcgaaatgcaccatgaagctttgagtgaagctcttcctggggacaatgtgggcttcaatgtcaagaatgtgtctgtcaaggatgttcgtcgtggcaacgttgctggtgacagcaaaaatgacccaccaatggaagcagctggcttcactgctcaggtgattatcctgaaccatccaggccaaataagcgccggctatgcccctgtattggattgccacacggctcacattgcatgcaagtttgctgagctgaaggaaaagattgatcgccgttctggtaaaaagctggaagatggccctaaattcttgaagtctggtgatgctgccattgttgatatggttcctggcaagcccatgtgtgttgagagcttctcagactatccacctttgggtcgctttgctgttcgtgatatgagacagacagttgcggtgggtgtcatcaaagcagtggacaagaaggctgctggagctggcaaggtcaccaagtctgcccagaaagctcagaaggctaaatgaatattatccctaatacctgccaccccactcttaatcagtggtggaagaacggtctcagaactgtttgtttcaattggccatttaagtttagtagtaaaagactggttaatgataacaatgcatcgtaaaaccttcagaaggaaaggagaatgttttgtggaccactttggttttcttttttgcgtgtggcagttttaagttattagtttttaaaatcagtactttttaatggaaacaacttgaccaaaaatttgtcacagaattttgagacccattaaaaaagttaaat

SEQ ID NO: 329978 - DNA, 635 bp, Artificial Sequence
  derived and/or modified sequence
gtaggactgagtctattctaaactgaaagcctggacatctggagtaccagggggagatgacgtgttacgggcttccataaaagcagctggctttgaatggaaggagccaagaggccagcacaggagcggattcgtcgctttcacggccatcgagccgaacctctcgcaagtgtcgtgaaaactacccctaaaagccaaaatgggaaaggaaaagactcatatcaacattgtcgtcattggacacgtagattcgggcaagtccaccactactggccatctgatctataaatgcggtggcatcgacaaaagaaccattgaaaaatttgagaaggaggctgctgagatgggaaagggctccttcaagtatgcctgggtcttggataaactgaaagctgagcgtgaacgtggtatcaccattgatatctccttgtggaaatttgagaccagcaagtactatgtgactatcattgatgccccaggacacagagactttatcaaaaacatgattacagggacatctcaggctgactgtgctgtcctgattgttgctgctggtgttggtgaatttgaagctggtatctccaagaatgggcagacccgagagcatgcccttctggcttacacactgggtgtga

SEQ ID NO: 329979 - DNA, 3459 bp, Artificial Sequence
  derived and/or modified sequence
ccctaaaagccaaaatgggaaaggaaaagactcatatcaacattgtcgtcattggacacgtagattcgggcaagtccaccactactggccatctgatctataaatgcggtggcatcgacaaaagaaccattgaaaaatttgagaaggaggctgctgagatgggaaagggctccttcaagtatgcctgggtcttggataaactgaaagctgagcgtgaacgtggtatcaccattgatatctccttgtggaaatttgagaccagcaagtactatgtgactatcattgatgccccaggacacagagactttatcaaaaacatgattacagggacatctcaggctgactgtgctgtcctgattgttgctgctggtgttggtgaatttgaagctggtatctccaagaatgggcagacccgagagcatgcccttctggcttacacactgggtgtgaaacaactaattgtcggtgttaacaaaatggattccactgagccaccctacagccagaagagatatgaggaaattgttaaggaagtcagcacttacattaagaaaattggctacaaccccgacacagtagcatttgtgccaatttctggttggaatggtgacaacatgctggagccaagtgctaacatgccttggttcaagggatggaaagtcacccgtaaggatggcaatgccagtggaaccacgctgcttgaggctctggactgcatcctaccaccaactcgtccaactgacaagcccttgcgcctgcctctccaggatgtctacaaaattggtggtattggtactgttcctgttccgagtggagactggtgttctcccggtatggtggtcacctttgctccagtcaacgttacaacggaagtaaaatctgtcgaaatgcaccatgaagctttgagtgaagctcttcctggggacaatgtgggcttcaatgtcaagaatgtgtctgtcaaggatgttcgtcgtggcaacgttgctggtgacagcaaaaatgacccaccaatggaagcagctggcttcactgctcaggtgattatcctgaaccatccaggccaaataagcgccggctatgcccctgtattggattgccacacggctcacattgcatgcaagtttgctgagctgaaggaaaagattgatcgccgttctggtaaaaagctggaagatggccctaaattcttgaagtctggtgatgctgccattgttgatatggttcctggcaagcccatgtgtgttgagagcttctcagactatccacctttgggtaagtcgctttgctgttcgtgatatgagacagacagttgcggtgggtgtcatcaaagcagtggacaagaaggctgctggagctggcaaggtcaccaagtctgcccagaaagctcagaaggctaaatgaatattatccctaatacctgccaccccactcttaatcagtggtggaagaacggtctcagaactgtttgtttcaattggccatttaagtttagtagtaaaagactggttaatgataacaatgcatcgtaaaaccttcagaaggaaaggagaatgttttgtggaccactttggttttcttttttgcgtgtggcagttttaagttattagtttttaaaatcagtactttttaatggaaacaacttgaccaaaaatttgtcacagaattttgagacccattaaaaaagttaaatgagaaacctgtgtgttcctttggtcaacaccgagacatttaggtgaaagacatctaattctggttttacgaatctggaaacttcttgaaaatgtaattcttgagttaacacttctgggtggagaatagggttgttttccccccacataattggaaggggaaggaatatcatttaaagctatgggagggttgctttgattacaacactggagagaaatgcagcatgttgctgattgcctgtcactaaaacaggccaaaaactgagtccttgtgttgcatagaaagcttcatgttgctaaaccaatgttaagtgaatctttggaaacaaaatgtttccaaattactgggatgtgcatgttgaaacgtgggttaaaatgactgggcagtgaaagttgactatttgccatgacataagaaataagtgtagtggctagtgtacaccctatgagtggaagggtccattttgaagtcagtggagtaagctttatgccagtttgatggtttcacaagttctattgagtgctattcagaataggaacaaggttctaatagaaaaagatggcaatttgaagtagctataaaattagactaatctacattgcttttctcctgcagagtctaataccttttatgctttgataattagcagtttgtctacttggtcactaggaatgaaactacatggtaataggcttaacaggtgtaatagcccacttactcctgaatctttaagcatttgtgcatttgaaaaatgcttttcgcgatcttcctgctgggattacaggcatgagccactgtgcctgacctcccatatgtaaaagtgtctaaaggtttttttttggttataaaaggaaaatttttgcttaagtttgaaggataggtaaaattaaaggacatgctttctgtttgtgtgatggtttttaaaaattttttttaagatggagttcttgttgcccaggctagaatgcaatggcaaaatctcactgcaatctcctcctcctgggttcaagcaattctcctacttcagcctcccaagtagctgggattacaggcatgtgctaatttggtgtttttaatagagatgaggtttttccatgttggtcaggctggtctcaaactcctgaccttaggtgatcgcctcggcctcctaaagtgctggaattacaggcatgagccaccatgcctggccaggacatgtgttcttaaggacatgctaagcaggagttaaagcagcccaagagataaggcctcttaaagtgactggcaatgtgtattgctcaagattcaaaggtacttgaattggccatagacaagtctgtaatgaagtgttatcgttttccctcatctgagtctgaattagataaaatgccttcccatcagccagtgctctgaggtatcaagtctaaattgaactagagatttttgtccttagtttctttgctatctaatgtttacacaagtaaatagtctaagatttgctggatgacagaaaaaacaggtaaggcctttaatagatggccaatagatgccctgataatgaaagttgacacctgtaagatttaccagtagagaattcttgacatgcaaggaagcaagatttaactgaaaaattgttcccactggaagcaggaatgagtcagtttacttgcatatactgagattgagattaacttcctgtgaaacccagtgtcttagacaactgtggcttgagcaccacctgctggtattcattacaaacttgctcactacaataaatgaattttaagcttt

SEQ ID NO: 329980 - DNA, 1635 bp, Artificial Sequence
  derived and/or modified sequence
caggtgtcgtgaaaactacccctaaaagccaaaatgggaaaggaaaagactcatatcaacattgtcgtcattggacacgtagattcgggcaagtccaccactactggccatctgatctataaatgcggtggcatcgacaaaagaaccattgaaaaatttgagaaggaggctgctgagatgggaaagggctccttcaagtatgcctgggtcttggataaactgaaagctgagcgtgaacgtggtatcaccattgatatctccttgtggaaatttgagaccagcaagtactatgtgactatcattgatgccccaggacacagagactttatcaaaaacatgattacagggacatctcaggctgactgtgctgtcctgattgttgctgctggtgttggtgaatttgaagctggtatctccaagaatgggcagacccgagagcatgcccttctggcctacagccagaagagatatgaggaaattgttaaggaagtcagcacttacattaagaaaattggctacaaccccgacacagtagcatttgtgccaatttctggttggaatggtgacaacatgctggagccaagtgctaacatgccttggttcaagggatggaaagtcacccgtaaggatggcaatgccagtggaaccacgctgcttgaggctctggactgcatcctaccaccaactcgtccaactgacaagcccttgcgcctgcctctccaggatgtctacaaaattggtggtattggtactgttcctgttggccgagtggagactggtgttctcaaacccggtatggtggtcacctttgctccagtcaacgttacaacggaagtaaaatctgtcgaaatgcaccatgaagctttgagtgaagctcttcctggggacaatgtgggcttcaatgtcaagaatgtgtctgtcaaggatgttcgtcgtggcaacgttgctggtgacagcaaaaatgacccaccaatggaagcagctggcttcactgctcaggtgattatcctgaaccatccaggccaaataagcgccggctatgcccctgtattggattgccacacggctcacattgcatgcaagtttgctgagctgaaggaaaagattgatcgccgttctggtaaaaagctggaagatggccctaaattcttgaagtctggtgatgctgccattgttgatatggttcctggcaagcccatgtgtgttgagagcttctcagactatccacctttgggtcgctttgctgttcgtgatatgagacagacagttgcggtgggtgtcatcaaagcagtggacaagaaggctgctggagctggcaaggtcaccaagtctgcccagaaagctcagaaggctaaatgaatattatccctaatacctgccaccccactcttaatcagtggtggaagaacggtctcagaactgtttgtttcaattggccatttaagtttagtagtaaaagactggttaatgataacaatgcatcgtaaaaccttcagaaggaaaggagaatgttttgtggaccactttggttttcttttttgcgtgtggcagttttaagttattagtttttaaaatcagtactttttaatggaaacaacttgaccaaaaatttgtcacagaattttgagacccatt

SEQ ID NO: 329981 - DNA, 701 bp, Artificial Sequence
  derived and/or modified sequence
ctgacgctgcggaggctcgagcggcgtatccataccacccagctgttcgccgcgggaacccgccggcccgcaggtgacccagcgctggaaaaacgccagcgacgtggcctggcgagctggcgcggggcaaggaccacccgcgcccgccttgccgccccagcctccctccctaggaagcagggtgcgccccggtgcgcgcggggcttccccggaccggcgttccagtccctctccggcttccggcccaccccggccccactgagagcagaaatgtgatctctgccctgagaaaatgctcgtggccagtgactacccctaacgcacaataatatggctccgatgggctcaaaggtgtcgtgaaaactacccctaaaagccaaaatgggaaaggaaaagactcatatcaacattgtcgtcattggacacgtagattcgggcaagtccaccactactggccatctgatctataaatgcggtggcatcgacaaaagaaccattgaaaaatttgagaaggaggctgctgagatgggaaagggctccttcaagtatgcctgggtcttggataaactgaaagctgagcgtgaacgtggtatcaccattgatatctccttgtggaaatttgagaccagcaagtactatgtgactatcattgatgccccaggacacagagactttatcaaaaacatgattacagggacatc

SEQ ID NO: 329982 - protein, 118 aa, Artificial Sequence
  derived and/or modified sequence
MTTEVGSVSEVKKDSSQLGTDATKEKPKEVAENQQNQSSDPEEEKGSQPPPAAESQSSLRRQKREKETSESRGISRFIPPWLKKQKSYTLVVAKDGGDKKEPTQAVVEEQVLDKEEPL

SEQ ID NO: 329983 - protein, 234 aa, Artificial Sequence
  derived and/or modified sequence
MESTPEPRPNEWEKRRITPLSLQTQGRKGDHLFKDILSVKEKYLMPTIWTVEEKAQETDKTRAPESEGPCTGARDAVKSSHETLNIVEEKKRAEVGKDERVITEEMNGKEISPGSGPGEIRKVEPVTQKDSTSLSSESSSSSSESEEEDVGEYRPHHRVTEGTIREEQEYEEEVEEEPRPAAKVVEREEAVPEASPVTQAGASVITVETVIQENVGAQKIPGEKSVHEGALKQD

SEQ ID NO: 329984 - protein, 380 aa, Artificial Sequence
  derived and/or modified sequence
  misc_feature (1)..(1): Xaa can be any naturally occurring amino acid
XLGSKFRYSGRTQAQTRQASTLIDRPAPHFERTSSKRVSRSLDGAPIGVMDQSLMKDFPGAAGEISAYGPGLVSIAVVQDGDGRREVRSPTKAPHLQLIEGKKNSLRVEGDNIYVRHSNLMLEELDKAQEDILKHQASISELKRNFMESTPEPRPNEWEKRRITPLSLQTQGRKGDHLFKDILSVKEKYLMPTIWTVEEKAQETDKTRAPESEGPCTGARDAVKSSHETLNIVEEKKRAEVGKDERVITEEMNGKEISPGSGPGEIRKVEPVTQKDSTSLSSESSSSSSESEEEDVGEYRPHHRVTEGTIREEQEYEEEVEEEPRPAAKVVEREEAVPEASPVTQAGASVITVETVIQENVGAQKIPGEKSVHEGALKQD

SEQ ID NO: 329985 - DNA, 705 bp, Artificial Sequence
  derived and/or modified sequence
atggagtcgacacctgagccgaggcccaacgagtgggagaagcgcagaattacgccactctccttacagacccagggtagaaaaggggaccacctcttcaaggacatcctgagcgtaaaggaaaagtacctgatgccaactatatggacagtcgaggagaaagcgcaagaaactgataaaactcgcgcacccgagtctgaaggcccctgtaccggagctagggacgcggtgaagtctagccacgagacgctgaatattgtggaggagaaaaagcgcgctgaggtgggaaaggacgaacgggtcatcactgaggagatgaatgggaaggaaataagtcccggctctgggccaggggagattcggaaagtggagcctgtgacacagaaggattccactagcttgtcatcggagtcttccagctcttcatcagaatctgaggaagaggacgtgggagaataccgaccgcaccaccgagtcacagaggggactattcgggaagaacaggagtacgaggaggaggtggaagaagagccacggccagccgccaaagttgtagagcgcgaagaagcggtacccgaggctagccccgttacgcaagccggcgctagtgtaatcaccgtagaaactgtaatccaggagaacgttggtgcccagaaaattcctggcgaaaagagtgtacatgaaggagcactgaaacaggactag

SEQ ID NO: 329986 - DNA, 1143 bp, Artificial Sequence
  derived and/or modified sequence
tgactggggtcaaaatttcgctactccggacggactcaggcgcagacgcggcaggctagtacactaatcgaccgtcccgctcctcacttcgagcggaccagctctaaacgggttagcagaagcctggacggggctcccatcggcgtcatggatcagtcgcttatgaaggacttcccgggggccgccggcgagataagcgcgtacggacccgggttagttagcatagccgtcgtccaggatggtgatggcaggcgagaagtgcgttcccccacgaaggctccccacctgcaactaatagagggcaagaagaactctctgcgagtcgagggcgataacatctatgtgaggcatagtaatcttatgctggaagagcttgacaaagcacaagaggatatcttaaagcaccaagcttctatctctgagttaaaacggaacttcatggaaagtacccctgaaccaagacctaacgaatgggaaaagaggaggattacaccactgtctcttcagacacagggccggaagggggaccatctctttaaggacattctgtctgtgaaagagaaatacctgatgcccaccatttggaccgttgaagaaaaagcacaggaaaccgataagacccgggctcccgagtcggaggggccgtgtaccggggcccgggatgcagtgaaaagtagtcacgagacacttaacattgtcgaggaaaagaaacgcgctgaagtgggcaaagacgaacgagtgatcaccgaggagatgaacggaaaagaaatttcaccagggtctggaccgggggagattcggaaggtggagccagtaacgcaaaaagatagcacaagcttgagtagtgaaagttcatcgagcagtagtgagagcgaagaggaggacgtgggggagtatagacctcaccatcgagtgactgaggggaccatccgggaggaacaggagtatgaagaggaagtggaggaggagcccagacctgccgctaaggtcgtagagagagaggaggccgtaccggaggcttctccagtgacacaagctggagctagcgttataaccgtcgaaaccgtaatccaggaaaacgttggggcacagaagatcccgggagagaagtcagtgcacgagggcgctctaaaacaagactag

SEQ ID NO: 329987 - DNA, 705 bp, Artificial Sequence
  derived and/or modified sequence
atggagagcaccccagagccccggcccaatgagtgggagaagaggcgcatcacccccctgagcctgcagacccagggcaggaagggggaccacctgttcaaggacatcctgtctgtgaaggagaagtacctgatgcccaccatctggacagtggaggagaaggcccaggagacagacaagacccgggcccctgagagcgagggcccctgcacaggagccagagatgctgtgaagagcagccatgagaccctgaacatcgtggaggagaagaagagagctgaggtgggcaaggatgagagggtcatcacagaggagatgaatggcaaggagatcagccctggcagcggccctggagagatcaggaaggtggagcctgtgacccagaaggacagcaccagcctgagcagcgagagcagcagcagcagcagcgagagcgaggaggaggatgtgggggagtaccggccccaccaccgggtgacagagggcaccatccgggaggagcaggagtatgaggaggaggtggaggaggagcccaggcctgctgccaaggtggtggagcgggaggaggccgtgcctgaggccagccctgtgacccaggccggggccagcgtcatcaccgtggagaccgtcatccaggagaatgtgggcgcccagaagatccctggagagaagtctgtgcatgaaggagccctgaagcaggactag

SEQ ID NO: 329988 - DNA, 1143 bp, Artificial Sequence
  derived and/or modified sequence
tgactgggcagcaagttccgctacagcggccgcacccaggcccagacccggcaggccagcaccctgattgacaggcctgccccccactttgagaggaccagcagcaagagggtgagccgcagcctggatggagcccccatcggcgtgatggaccagagcctgatgaaggacttccctggagctgctggggagatcagcgcctacggccctggcctggtgtccattgctgtggtgcaggatggagatggccggcgggaggtgcgcagccccaccaaggccccccacctgcagctgattgagggcaagaagaacagcctgcgggtggagggggacaacatctacgtgcgccacagcaacctgatgctggaggagctggacaaggcccaggaggacatcctgaagcaccaggccagcatcagcgagctgaagaggaacttcatggagagcaccccagagccccggcccaatgagtgggagaagaggcgcatcacccccctgagcctgcagacccagggcaggaagggggaccacctgttcaaggacatcctgtctgtgaaggagaagtacctgatgcccaccatctggacagtggaggagaaggcccaggagacagacaagacccgggcccctgagagcgagggcccctgcacaggagccagagatgctgtgaagagcagccatgagaccctgaacatcgtggaggagaagaagagagctgaggtgggcaaggatgagagggtcatcacagaggagatgaatggcaaggagatcagccctggcagcggccctggagagatcaggaaggtggagcctgtgacccagaaggacagcaccagcctgagcagcgagagcagcagcagcagcagcgagagcgaggaggaggatgtgggggagtaccggccccaccaccgggtgacagagggcaccatccgggaggagcaggagtatgaggaggaggtggaggaggagcccaggcctgctgccaaggtggtggagcgggaggaggccgtgcctgaggccagccctgtgacccaggccggggccagcgtcatcaccgtggagaccgtcatccaggagaatgtgggcgcccagaagatccctggagagaagtctgtgcatgaaggagccctgaagcaggactag

SEQ ID NO: 329989 - DNA, 705 bp, Artificial Sequence
  derived and/or modified sequence
atggagagcacccccgagccccggcccaacgagtgggagaagcggagaattaccccactgtctctgcagacacaagggcggaagggagaccatttgtttaaagacattttgagtgtgaaggaaaagtacctgatgcctactatttggactgtggaggagaaggcacaggagaccgataaaactagggctcctgagagtgaaggcccctgtacgggagcgagggatgcagtgaaatccagtcatgagacacttaatatcgtagaagagaaaaagagagctgaagtgggaaaagatgagcgggtcatcacggaggaaatgaatggcaaggaaatctcacctggtagcgggcctggggagatcaggaaggttgagcccgtaacacaaaaggattccacttctcttagcagcgagtcgagcagctcctcaagcgagtccgaagaggaggatgtgggcgaataccggccgcaccatcgggtgacggagggaactatacgcgaggagcaagaatatgaggaggaggttgaggaagagcctaggccagccgccaaggtggttgagagggaagaagcagtgcccgaggcgtctccggtgacccaagcaggcgcctcggtcattacagtggaaactgtgatacaagaaaacgtcggcgcgcagaaaattccaggcgaaaaatctgtccatgagggagccctgaagcaggactag

SEQ ID NO: 329990 - DNA, 1143 bp, Artificial Sequence
  derived and/or modified sequence
tgactgggcagcaagttccggtacagcggccggacccaggcccagaccagacaggcgtctacactgatagacagacctgccccacactttgaacggacgagtagtaaacgcgtgagcagaagcttagatggcgcgccaatcggcgtgatggaccagtcactaatgaaggattttcctggcgctgccggggagatctccgcttatggcccgggactggtgtcaattgccgtggtacaggatggtgacggccgcagggaggtgcgatcacccacgaaagcaccgcacctgcagctaatcgagggcaagaaaaactctcttcgagtcgaaggcgacaacatctatgtacgccattccaatctcatgctggaggaactggacaaggcccaggaggacatcttgaaacaccaggcatcgatttcagagctcaagcgcaatttcatggaatctacacctgaacctcggccaaacgaatgggagaaaagaaggattacaccgttgagcctgcagactcagggacgcaagggagaccatctgtttaaagacatactgtctgtgaaagagaagtacctgatgcccacaatttggactgtggaggagaaggctcaggagacggataagacacgggctccagagagcgaagggccgtgcacaggggcaagagacgcagtcaagtcctctcacgagacgctgaacatagtggaagaaaaaaaacgggccgaggtgggaaaagatgaaagggttataacagaggagatgaacggaaaggaaatttctcccgggtccggacctggcgagataagaaaggtggaacccgttacccagaaagactccacttcgctgagttccgagagctcttcttcttcctctgaaagcgaagaggaagacgtaggggaataccgaccgcatcacagagtgacagagggtaccatcagggaagagcaggagtacgaggaggaagtcgaagaagaaccccgccccgccgccaaagtagttgagcgggaggaggccgtacctgaagcaagcccagtgacccaggcaggcgcaagcgtgataaccgtggagaccgttatccaggaaaatgtaggtgctcagaaaattcctggggaaaaaagtgtgcatgaaggagcccttaaacaggactag

SEQ ID NO: 329991 - DNA, 705 bp, Artificial Sequence
  derived and/or modified sequence
atggagtccacacctgaaccgaggcccaatgagtgggagaaacggcgaattacacccttgagtctccagactcagggtcgtaaaggcgaccatctgttcaaggacattctgtctgttaaggagaagtatctgatgcctactatctggaccgtcgaagaaaaggctcaagagactgacaagacgagagcacctgaatctgaaggcccatgcaccggtgcgcgagatgctgtgaaaagttctcacgagactttgaacattgtggaggaaaagaaaagggccgaagtaggaaaggacgaacgcgtcatcacagaggagatgaacggaaaggagatctctccaggtagtggccctggtgagatccgcaaggtcgagcccgtcactcaaaaggacagcacgagtctgtcatcggagtcgtctagtagtagttccgagtctgaggaggaagacgtcggagaatacagaccccaccatcgcgtgacggagggcaccattcgagaggaacaggaatacgaagaggaggttgaagaggaacctcgacctgcagcgaaagttgttgagagagaagaggcagtgccagaagcctcaccagtgacccaggcgggtgcttctgtcattactgtcgaaactgtgatccaggagaacgtcggcgcacaaaagatccccggagagaagtccgtccacgagggggcactgaagcaggattag

SEQ ID NO: 329992 - DNA, 1143 bp, Artificial Sequence
  derived and/or modified sequence
taactggggagtaaatttaggtatagcggcaggactcaggctcagactcgccaggccagtaccctgatcgatagaccggctccccacttcgaaagaacaagttctaaacgcgtatctaggagtctcgatggagcacccatcggtgtgatggatcagtctttaatgaaagattttccgggagctgcaggagaaatctcagcctatggcccaggcttggtaagcatcgccgttgttcaggacggggacgggaggcgtgaggtccggtcacccactaaagctcctcacctgcagttaattgagggaaaaaagaattcccttagagttgagggagataatatatacgtgcgacacagcaacttgatgctcgaagagctggacaaggctcaagaggatatcctcaaacaccaggcatccatatcggagctcaaaaggaacttcatggagtctacccccgagcccagacccaacgagtgggagaaacggaggatcacaccattatccttacagactcagggtagaaagggcgaccacctgtttaaggatatcctctcggtaaaagaaaaatacctgatgcccaccatttggaccgtagaagaaaaggcccaggagacagacaagacccgagcccctgagagtgagggaccatgtaccggtgcacgggacgcggtaaagagcagccatgagaccttgaacattgtggaggagaagaagcgcgctgaggtgggcaaggatgaacgggtaattacagaagaaatgaacggcaaggagatttcaccaggatcggggccaggggaaatcaggaaagtggagcccgtgacacagaaagactctacttctctgtcaagtgagagttctagcagtagcagtgaatcagaggaagaagatgtaggggagtatcgtccccaccacagagtgacagagggcaccatcagagaggaacaagaatacgaagaagaagttgaagaggagcctagacctgccgcaaaggtggtcgagagagaagaagctgtgccggaggcgagcccagttacacaggcgggtgccagcgtgatcaccgtggagaccgtaatccaggagaacgtgggggctcaaaaaatcccaggagagaaatcggtgcacgaaggggctctgaagcaggactag

SEQ ID NO: 329993 - DNA, 705 bp, Artificial Sequence
  derived and/or modified sequence
atggagagcacccccgagcccagacccaacgagtgggagaagagaagaatcacccccctgagcctgcagacccagggcagaaagggcgaccacctgttcaaggacatcctgagcgtgaaggagaagtacctgatgcccaccatctggaccgtggaggagaaggcccaggagaccgacaagaccagagcccccgagagcgagggcccctgcaccggcgccagagacgccgtgaagagcagccacgagaccctgaacatcgtggaggagaagaagagagccgaggtgggcaaggacgagagagtgatcaccgaggagatgaacggcaaggagatcagccccggcagcggccccggcgagatcagaaaggtggagcccgtgacccagaaggacagcaccagcctgagcagcgagagcagcagcagcagcagcgagagcgaggaggaggacgtgggcgagtacagaccccaccacagagtgaccgagggcaccatcagagaggagcaggagtacgaggaggaggtggaggaggagcccagacccgccgccaaggtggtggagagagaggaggccgtgcccgaggccagccccgtgacccaggccggcgccagcgtgatcaccgtggagaccgtgatccaggagaacgtgggcgcccagaagatccccggcgagaagagcgtgcacgagggcgccctgaagcaggactag

SEQ ID NO: 329994 - DNA, 1143 bp, Artificial Sequence
  derived and/or modified sequence
tgactgggcagcaagttcagatacagcggcagaacccaggcccagaccagacaggccagcaccctgatcgacagacccgccccccacttcgagagaaccagcagcaagagagtgagcagaagcctggacggcgcccccatcggcgtgatggaccagagcctgatgaaggacttccccggcgccgccggcgagatcagcgcctacggccccggcctggtgagcatcgccgtggtgcaggacggcgacggcagaagagaggtgagaagccccaccaaggccccccacctgcagctgatcgagggcaagaagaacagcctgagagtggagggcgacaacatctacgtgagacacagcaacctgatgctggaggagctggacaaggcccaggaggacatcctgaagcaccaggccagcatcagcgagctgaagagaaacttcatggagagcacccccgagcccagacccaacgagtgggagaagagaagaatcacccccctgagcctgcagacccagggcagaaagggcgaccacctgttcaaggacatcctgagcgtgaaggagaagtacctgatgcccaccatctggaccgtggaggagaaggcccaggagaccgacaagaccagagcccccgagagcgagggcccctgcaccggcgccagagacgccgtgaagagcagccacgagaccctgaacatcgtggaggagaagaagagagccgaggtgggcaaggacgagagagtgatcaccgaggagatgaacggcaaggagatcagccccggcagcggccccggcgagatcagaaaggtggagcccgtgacccagaaggacagcaccagcctgagcagcgagagcagcagcagcagcagcgagagcgaggaggaggacgtgggcgagtacagaccccaccacagagtgaccgagggcaccatcagagaggagcaggagtacgaggaggaggtggaggaggagcccagacccgccgccaaggtggtggagagagaggaggccgtgcccgaggccagccccgtgacccaggccggcgccagcgtgatcaccgtggagaccgtgatccaggagaacgtgggcgcccagaagatccccggcgagaagagcgtgcacgagggcgccctgaagcaggactag

SEQ ID NO: 329995 - DNA, 4613 bp, Artificial Sequence
  derived and/or modified sequence
gtcgcgggaggggcttccgccgcgagggggcggggccggccctcagagtcctctgacggccccagtcagggaatttcaatttgaaacctagcggagggaggaggcaggcgcggctgccggcggctgggactgaagagggacgggtcccgcggcgagcgagctcctgagcataagctgtggccatgactactgaagtaggctctgtgtctgaagtgaagaaggactctagccagttaggaacagatgcaaccaaggaaaaacctaaagaagtagcagaaaatcagcagaatcagtcttccgatccagaggaggaaaaaggttcccagccacctcctgcagctgaaagccaaagtagtctacgccgccagaagagagagaaggaaacatcggagagcaggggtatttctcggttcataccgccatggcttaagaagcaaaagtcatataccttagtagtggccaaagatggaggagataaaaaagagcctacccaagctgttgttgaagaacaggtcttagataaagaggaaccccttccagaagaacagagacaggctaagggtgatgctgaagaaatggctcagaagaaacaagagattaaagttgaagtcaaggaagaaaaaccctcagtgagcaaggaagaaaaaccctcagtgagcaaagtggagatgcagcctactgaattagtaagtaaggagagagaagagaaggtaaaagaaacacaggaagacaaattagaaggaggagcagcaaaaagggagaccaaggaagtgcagaccaatgagctgaaagcagagaaggcatctcaaaaagtcaccaagaagaccaaaactgtccagtgtaaagtgaccctcttagatggcaccgaatacagctgtgacctggagaaacatgccaagggacaagtgttatttgacaaagtgtgtgaacacctcaatctcttggagaaagactactttggacttttgtttcaggaaagccctgagcagaaaaactggttagatcctgctaaagaaataaagagacaactgagaaaccttccatggctattcacttttaatgtgaagttttatcctcctgatccttctcaattgactgaagatatcaccagatacttcttgtgccttcagctccggcaggacattgcctctggccgcctgccctgctcttttgtgactcatgctctcctgggatcctacaccctgcaggctgaacttggtgactatgacccagaagaacatggcagcatcgacctcagtgaattccagtttgcccctactcagactaaggagctggaagagaaggtggcagagctgcacaaaacccacaggggcttatcgccagcacaagctgattcccagttcttagaaaatgcaaagaggctttccatgtatggtgttgacctacatcatgccaaggactcagaaggtgtggacatcaagctgggcgtgtgtgctaatggacttctcatttacaaagacagactgcgaatcaatcgttttgcttggccgaaaatcttaaaaatttcctataaacgcagtaacttctacattaaagtcagaccggcagagctggaacagtttgagagtaccattggattcaaactgccaaaccaccgggcagcgaaaagactatggaaagtgtgcgtggagcatcatactttctacaggcttgtttctccagagcagccaccaaaagccaagttcctgaccttggggtccaaatttcgctatagtggccgcacccaagcacagacccgccaggccagcaccctcatagataggccagcaccacactttgagcgcacttctagtaaacgggtctccaggagtctagatggagctccgattggtgtcatggaccaaagtcttatgaaggattttcctggcgctgctggggagatttcagcctatggacctggacttgtcagcattgccgtggtacaagatggggacggcaggagggaagtgagaagcccaactaaagccccacatttgcagctcattgaaggaaagaaaaattccttgagagtagaaggggataatatttatgtcagacatagcaatttaatgttggaggaactggataaggcccaggaggacatactgaaacatcaggctagcattagtgaactcaagcgcaattttatggaatccacacctgagccgcgccctaatgaatgggaaaaacgacgtatcacacctctgtccctacagacacaagggagaaaaggagaccatcttttcaaggatattttatccgtgaaggagaagtacctgatgccgacaatatggacagttgaagaaaaagctcaggagacggacaagacacgtgctcccgagtcagaagggccttgcactggagccagggatgctgttaagagttcacatgagactctgaatatagtggaggagaagaagcgggcagaggttgggaaagacgaaagagtaatcacagaagaaatgaatggtaaagagatatcacctgggagtggtcctggggagattcgtaaggtggagcctgtgacacaaaaagactccacctccctgtcttctgagagcagcagcagcagcagtgagagtgaggaggaagacgtgggagagtaccgtccccaccaccgagtgaccgagggcaccatcagggaggaacaggagtatgaagaagaggtggaggaagaaccccgcccggcagccaaggtagtagagagggaggaagcagtgcccgaagccagcccagtcacacaagcaggtgccagtgtaatcacagtagaaacagtgatccaggaaaatgtaggtgcccaaaagatacccggagagaagagtgtacacgaaggcgctcttaagcaagacatgggagaagaagcagaggaagagccacagaaagttaacggagaggtgtcccatgttgacattgatgttttgccacaaattatttgttgttcagagccaccagtggtaaaaacagagatggtaacaatttctgatgcctcacaaaggacagaaatctccaccaaggaagtccccattgtccaaactgagaccaaaaccatcacatatgagtctccacagattgatggcggggctggtggtgattcgggcacgttactgaccgcacaaaccatcacatctgagtccgtgtcaacaacgacaaccacacacatcaccaagactgtaaaaggtggaatttctgaaacaagaattgagaaacgcattgtgatcacaggagatggagatattgatcatgaccaggcactggctcaggcgatcagggaagccagagagcagcaccctgacatgtcggtcacaagagtggtggtacacaaagaaacagagttggctgaggaaggggaagattaagtaagaaagtcattttttaaacaacactcaactttgtgaacccctgaagattttttgaccgttccaagtcttaatgccacaccactattccagcgaatttatgctacaactggtaacaatgaccagaagcctgaagaattaaaatgccaacaccaaacctttccttaccagctctggtctatattgctcccatgcatttaatatattattttgttttataaccacttctaaatattctcagttctttctttttgttgttgttaattaaggggttttggttttgttttctgtttactttgtgtgcaactacctgcttttaatgactcactttgatcaaatgacagtgaacaaagccagcccaagctggtaaggtgctgttcacttgaacaggtgctgttgcgcagaaaggaaactctgtgactaatttagatagtggctttccttcttctggattcttttcattgaattctcacagtaaatatttacggagttttcaaattgcagcaaatatactgtatgagaaaatattaatacagattaaaagcctttcttacatcttgaaaattttctaatatttgagaatttcacagggatgttttttatattggacccttttgactttccagtcctgtgactttctacttttagtagagagtcagaatctctggactggagaataatgaagaagttcactgactgtgcactgtgcttagagaccctgccgcaccacagtgccaatgcttgtcagacacatgcccttcggcagcattccagaacaggagggaagagaaagagaaaactttcttcccttctactaaaagattcaggcagcttaaaaccttagtgctttctttcttaacatacccacatttcaattctttccattatttgaacacttgggtagaactcttgctttgtattaaacctctttgtctacacatgtaaaacttaccttttgttattgagcaggcctatctctttcagatagttttatgattcacacaggtttgaggatgctggggagagggggagggggctgtggtggtgttctgttggttacaagaaagttataccatttaaagctggcaccagagacccgatagggacttattaactatattgaacattttttcctttgcctttgaccctatgtatagttacgatgccagattagatttatagcagcctcaagttgtattaaatgatattttgcttcctgtaatactattataaaataaagtttgtttattctctaaa

SEQ ID NO: 329996 - DNA, 1138 bp, Artificial Sequence
  derived and/or modified sequence
cttggggtccaaatttcgctatagtggccgcacccaagcacagacccgccaggccagcaccctcatagataggccagcaccacactttgagcgcacttctagtaaacgggtctccaggagtctagatggagctccgattggtgtcatggaccaaagtcttatgaaggattttcctggcgctgctggggagatttcagcctatggacctggacttgtcagcattgccgtggtacaagatggggacggcaggagggaagtgagaagcccaactaaagccccacatttgcagctcattgaaggaaagaaaaattccttgagagtagaaggggataatatttatgtcagacatagcaatttaatgttggaggaactggataaggcccaggaggacatactgaaacatcaggctagcattagtgaactcaagcgcaattttatggaatccacacctgagccgcgccctaatgaatgggaaaaacgacgtatcacacctctgtccctacagacacaagggagaaaaggagaccatcttttcaaggatattttatccgtgaaggagaagtacctgatgccgacaatatggacagttgaagaaaaagctcaggagacggacaagacacgtgctcccgagtcagaagggccttgcactggagccagggatgctgttaagagttcacatgagactctgaatatagtggaggagaagaagcgggcagaggttgggaaagacgaaagagtaatcacagaagaaatgaatggtaaagagatatcacctgggagtggtcctggggagattcgtaaggtggagcctgtgacacaaaaagactccacctccctgtcttctgagagcagcagcagcagcagtgagagtgaggaggaagacgtgggagagtaccgtccccaccaccgagtgaccgagggcaccatcagggaggaacaggagtatgaagaagaggtggaggaagaaccccgcccggcagccaaggtagtagagagggaggaagcagtgcccgaagccagcccagtcacacaagcaggtgccagtgtaatcacagtagaaacagtgatccaggaaaatgtaggtgcccaaaagatacccggagagaagagtgtacacgaaggcgctcttaagcaagac

SEQ ID NO: 329997 - protein, 852 aa, Artificial Sequence
  derived and/or modified sequence
MTTEVGSVSEVKKDSSQLGTDATKEKPKEVAENQQNQSSDPEEEKGSQPPPAAESQSSLRRQKREKETSESRGISRFIPPWLKKQKSYTLVVAKDGGDKKEPTQAVVEEQVLDKEEPLPEEQRQAKGDAEEMAQKKQEIKVEVKEEKPSVSKEEKPSVSKVEMQPTELVSKEREEKVKETQEDKLEGGAAKRETKEVQTNELKAEKASQKVTKKTKTVQCKVTLLDGTEYSCDLEKHAKGQVLFDKVCEHLNLLEKDYFGLLFQESPEQKNWLDPAKEIKRQLRNLPWLFTFNVKFYPPDPSQLTEDITRYFLCLQLRQDIASGRLPCSFVTHALLGSYTLQAELGDYDPEEHGSIDLSEFQFAPTQTKELEEKVAELHKTHRGLSPAQADSQFLENAKRLSMYGVDLHHAKDSEGVDIKLGVCANGLLIYKDRLRINRFAWPKILKISYKRSNFYIKVRPAELEQFESTIGFKLPNHRAAKRLWKVCVEHHTFYRLVSPEQPPKAKFLTLGSKFRYSGRTQAQTRQASTLIDRPAPHFERTSSKRVSRSLDGAPIGVMDQSLMKDFPGAAGEISAYGPGLVSIAVVQDGDGRREVRSPTKAPHLQLIEGKSSHETLNIVEEKKRAEVGKDERVITEEMNGKEISPGSGPGEIRKVEPVTQKDSTSLSSESSSSSSESEEEDVGEYRPHHRVTEGTIREEQEYEEEVEEEPRPAAKPPVVKTEMVTISDASQRTEISTKEVPIVQTETKTITYESPQIDGGAGGDSGTLLTAQTITSESVSTTTTTHITKTVKGGISETRIEKRIVITGDGDIDHDQALAQAIREAREQHPDMSVTRVVVHKETELAEEGED

SEQ ID NO: 329998 - DNA, 1902 bp, Artificial Sequence
  derived and/or modified sequence
atgaccactgaagtaggatctgtctccgaggtcaaaaaggattctagccagcttgggactgacgcaactaaagaaaagcccaaagaggtggccgagaaccagcagaatcagagttccgatcccgaagaagagaaagggtctcagccaccgccagcagctgaatctcagagctcccttcgtaggcagaagcgcgagaaggagacgtcggagtccagaggcatcagccggttcattcctccttggctgaaaaagcagaagagctatactctagtggtggctaaagacgggggcgacaagaaagagccaacacaggcggttgtcgaggaacaggtgcttgataaagaggaaccactccctgaagagcaacgccaggcaaaaggcgatgccgaggagatggcacagaagaaacaggaaataaaggttgaggtcaaagaggagaaaccctctgtctcgaaggaggagaagcccagcgtgtcgaaagtagagatgcagccgaccgagcttgtgtctaaggaacgggaggagaaggtgaaggagactcaggaggacaagttggagggaggggctgctaaacgcgagactaaggaagtacagacaaacgagttgaaggccgagaaggcttcccagaaagtcacgaaaaaaaccaagacggtccagtgcaaagtaaccctgctggacggcaccgagtattcgtgtgacctggagaaacatgccaaaggccaggttttattcgataaggtgtgcgaacaccttaatctgcttgaaaaggactactttgggcttctcttccaagaaagcccagagcaaaagaactggctggaccctgccaaggaaattaaacgccagttgaggaatctcccgtggttgtttacattcaatgtaaagttctacccacctgatccatcccagctgacagaggacataacgcggtatttcctttgtctgcagcttcgtcaggacattgcaagtggcaggctcccctgcagctttgtcacacacgctttgctgggcagctacacactgcaggccgagcttggcgactacgaccctgaagagcacggcagcattgacctctcagaattccaattcgctccaacccagactaaggagctggaggagaaggttgcagaactgcataagacccaccgagggttatccccagcccaagccgacagtcagttccttgaaaacgctaagcggctcagcatgtatggcgttgatttgcaccatgcaaaagacagcgaaggcgtagacattaagctcggtgtctgcgcaaatggtctgcttatttataaggaccgcctgcggatcaaccggtttgcctggccaaagattctaaagatcagctataaacggtctaatttttacattaaagtgaggcccgccgagttggagcaattcgagtctaccataggcttcaagctgcccaaccatagagccgccaagcgtttgtggaaggtgtgtgttgagcaccacacattctacagactagtgtccccagagcaacctccaaaagccaagtttctgacactggggtccaaattcagatactccgggcgtacgcaagcacagaccaggcaggcatctactctgattgatcgcccggcgcctcactttgagcggacatcaagcaaaagagtaagtaggagcctggatggagcgccaattggggtcatggaccagtccctgatgaaagatttccctggcgccgcaggcgagatcagcgcctatggaccgggcttggtttcaattgctgtcgtgcaggatggcgatggtcgccgcgaggtaagaagccccactaaggctccccacctccagctgattgaagggaaatctagtcatgaaactctcaatatcgtggaggagaagagcggacagcggctcggaaagactaaggagtag

SEQ ID NO: 329999 - DNA, 2559 bp, Artificial Sequence
  derived and/or modified sequence
atgaccaccgaggtgggctctgtatctgaggtgaagaaggacagctcacagctgggaaccgacgctaccaaagagaaaccgaaagaggtggctgaaaaccagcagaaccaatctagcgacccagaggaagagaaggggagtcagccaccacctgcagccgaaagccagagttcactgcgcagacagaagagagagaaggaaacctccgaatccaggggcatcagtcgcttcattcctccctggcttaaaaaacaaaagtcgtacacattagtggtggccaaggatggaggggataaaaaggaacctacccaggccgtcgtggaggaacaggttctggataaagaggaaccactccccgaggagcaacgccaggcaaagggggacgcagaggaaatggctcagaaaaaacaggagatcaaagtggaggtgaaagaagagaaaccttcagtttcaaaggaagaaaaaccttctgtctccaaggtggaaatgcagcctacggagcttgtatcaaaggagcgtgaggaaaaggtgaaggagacgcaggaggataagctcgaggggggggccgctaaacgagagaccaaggaggtccagacaaacgaattgaaagccgaaaaagcctctcagaaggtgactaaaaagaccaagacagtgcagtgcaaggtcaccctgctcgatggaaccgaatactcatgtgatctagagaaacatgccaaggggcaagtgctgttcgataaggtgtgtgagcacctgaatctgctcgaaaaggactacttcggactcctgtttcaggaatcacccgaacaaaaaaactggcttgaccccgctaaagagattaaacgccagttgcgtaatctcccgtggctgtttactttcaacgttaagttctatccccccgacccaagtcagctcacagaagatattacaaggtatttcctgtgtctgcaactgagacaggatattgcaagcggccgcctgccatgctcattcgttacacatgccctgctaggttcttacaccctgcaagcggagttgggtgactatgacccagaagagcacggttccatcgatttatcagagttccagtttgcgccaacccaaacgaaggagctggaagagaaggtcgcagagctacacaaaacccatcgcggactgtcaccagcccaggccgacagccagttcttagagaatgccaagcgcctgtctatgtatggtgtggacctgcatcacgcaaaggattccgagggggttgacatcaagcttggagtctgtgctaatggcttactcatttacaaggatagactgcgtataaataggtttgcatggcctaagatcctgaaaattagttacaagcgctcaaacttctacatcaaagtaaggcctgcggaactggaacagttcgaaagtacaattggcttcaagctcccaaaccatcgcgcagccaaaaggctctggaaggtgtgcgtagagcatcatacattctataggctggtgtcaccagagcaaccacctaaagccaagtttctgacattaggctccaagtttaggtattccggaaggactcaggcacagacgagacaggcaagcaccctgatagacaggcctgcacctcactttgagagaacgtcatcaaagcgggtctcaaggagcctggatggcgctccaattggcgttatggatcaatctctcatgaaggacttccccggggccgcaggggagatctctgcttacggccccggtctggtaagcattgcagtagtccaggatggcgacggtagaagagaggttcgcagccctaccaaggcaccccatctccaactcattgaagggaaaagctcacacgagacattaaatattgtggaggagaagaagcgcgcagaagtggggaaagatgagagggtcatcaccgaagagatgaacgggaaggaaatctcccccggcagcggccctggagagatccggaaagtggaaccagtcactcagaaggactcaacaagcctgtcctctgagagctcctcatctagtagcgagtcagaagaagaggatgtgggagagtatagaccgcaccaccgcgtgactgaaggcactattcgggaggagcaggagtacgaggaggaggttgaggaggaacctcgtccagccgctaaaccacccgtcgtgaaaactgagatggtcaccatcagcgatgcatcccagagaacggagatttcaactaaagaggtcccaatcgtgcaaaccgaaacaaaaaccattacctacgaaagccctcagatcgatggcggagcaggcggcgattcaggaacactgctcaccgctcagaccatcacctcagaatcagtctcgacaacaactactacacacatcacaaagacagttaagggcggtatcagcgaaacgcgcattgaaaaacgaatcgtcattactggagacggggatatcgatcatgaccaagctctggcccaggccatcagagaggcaagagaacaacacccggacatgtcagttacccgagtggtggtacacaaagagaccgaattggccgaggagggggaggactag

SEQ ID NO: 330000 - DNA, 1902 bp, Artificial Sequence
  derived and/or modified sequence
atgaccacagaggtgggctctgtgtctgaggtgaagaaggacagcagccagctgggcacagatgccaccaaggagaagcccaaggaggtggccgagaaccagcagaaccagagcagtgaccctgaggaggagaagggcagccagcccccacctgctgctgagagccagagcagcctgcggcggcagaagcgggagaaggagaccagcgagagccggggcatcagccgcttcatccccccctggctgaagaagcagaagagctacaccctggtggtggccaaggatggaggagacaagaaggagcccacccaggccgtggtggaggagcaggtgctggacaaggaggagcccctgcctgaggagcagaggcaggccaagggagatgctgaggagatggcccagaagaagcaggagatcaaggtggaggtgaaggaggagaagcccagcgtgtccaaggaggagaagcccagcgtgtccaaggtggagatgcagcccacagagctggtgtccaaggagcgggaggagaaggtgaaggagacccaggaggacaagctggagggcggggccgccaagcgggagaccaaggaggtgcagaccaatgagctgaaggccgagaaggccagccagaaggtgaccaagaagaccaagacagtgcagtgcaaggtgaccctgctggatggaacagagtacagctgtgacctggagaagcacgccaagggccaggtgctgtttgacaaggtgtgtgagcacctgaacctgctggagaaggactacttcggcctgctcttccaggagagccctgagcagaagaactggctggaccctgccaaggagatcaagaggcagctgaggaacctgccctggctgttcaccttcaacgtgaagttctaccccccagaccccagccagctgacagaggacatcacccgctacttcctgtgcctgcagctgcggcaggacatcgccagcggccgcctgccctgcagctttgtgacccacgccctgctgggcagctacaccctgcaggccgagctgggggactatgaccctgaggagcacggcagcattgacctgtctgagttccagtttgcccccacccagaccaaggagctggaggagaaggtggccgagctgcacaagacccaccggggcctgagccctgcccaggccgacagccagttcctggagaatgccaagaggctgtccatgtatggagtggacctgcaccacgccaaggacagcgagggcgtggacatcaagctgggcgtgtgtgccaacggcctgctgatctacaaggaccggctgcgcatcaacagatttgcctggcccaagatcctgaagatctcctacaagaggagcaacttctacatcaaggtgcggcctgctgagctggagcagtttgagagcaccatcggcttcaagctgcccaaccaccgggccgccaagaggctgtggaaggtgtgtgtggagcaccacaccttctaccgcctggtgtccccagagcagccccccaaggccaagttcctgaccctgggcagcaagttccgctacagcggccgcacccaggcccagacccggcaggccagcaccctgattgacaggcctgccccccactttgagaggaccagcagcaagagggtgagccgcagcctggatggagcccccatcggcgtgatggaccagagcctgatgaaggacttccctggagctgctggggagatcagcgcctacggccctggcctggtgtccattgctgtggtgcaggatggagatggaagaagagaggtgcgcagccccaccaaggccccccacctgcagctgattgagggcaagagcagccatgagaccctgaacatcgtggaggagaagagcggccagaggctgggcaagaccaaggagtag

SEQ ID NO: 330001 - DNA, 2559 bp, Artificial Sequence
  derived and/or modified sequence
atgaccacagaggtgggctctgtgtctgaggtgaagaaggacagcagccagctgggcacagatgccaccaaggagaagcccaaggaggtggccgagaaccagcagaaccagagcagtgaccctgaggaggagaagggcagccagcccccacctgctgctgagagccagagcagcctgcggcggcagaagcgggagaaggagaccagcgagagccggggcatcagccgcttcatccccccctggctgaagaagcagaagagctacaccctggtggtggccaaggatggaggagacaagaaggagcccacccaggccgtggtggaggagcaggtgctggacaaggaggagcccctgcctgaggagcagaggcaggccaagggagatgctgaggagatggcccagaagaagcaggagatcaaggtggaggtgaaggaggagaagcccagcgtgtccaaggaggagaagcccagcgtgtccaaggtggagatgcagcccacagagctggtgtccaaggagcgggaggagaaggtgaaggagacccaggaggacaagctggagggcggggccgccaagcgggagaccaaggaggtgcagaccaatgagctgaaggccgagaaggccagccagaaggtgaccaagaagaccaagacagtgcagtgcaaggtgaccctgctggatggaacagagtacagctgtgacctggagaagcacgccaagggccaggtgctgtttgacaaggtgtgtgagcacctgaacctgctggagaaggactacttcggcctgctcttccaggagagccctgagcagaagaactggctggaccctgccaaggagatcaagaggcagctgaggaacctgccctggctgttcaccttcaacgtgaagttctaccccccagaccccagccagctgacagaggacatcacccgctacttcctgtgcctgcagctgcggcaggacatcgccagcggccgcctgccctgcagctttgtgacccacgccctgctgggcagctacaccctgcaggccgagctgggggactatgaccctgaggagcacggcagcattgacctgtctgagttccagtttgcccccacccagaccaaggagctggaggagaaggtggccgagctgcacaagacccaccggggcctgagccctgcccaggccgacagccagttcctggagaatgccaagaggctgtccatgtatggagtggacctgcaccacgccaaggacagcgagggcgtggacatcaagctgggcgtgtgtgccaacggcctgctgatctacaaggaccggctgcgcatcaacagatttgcctggcccaagatcctgaagatctcctacaagaggagcaacttctacatcaaggtgcggcctgctgagctggagcagtttgagagcaccatcggcttcaagctgcccaaccaccgggccgccaagaggctgtggaaggtgtgtgtggagcaccacaccttctaccgcctggtgtccccagagcagccccccaaggccaagttcctgaccctgggcagcaagttccgctacagcggccgcacccaggcccagacccggcaggccagcaccctgattgacaggcctgccccccactttgagaggaccagcagcaagagggtgagccgcagcctggatggagcccccatcggcgtgatggaccagagcctgatgaaggacttccctggagctgctggggagatcagcgcctacggccctggcctggtgtccattgctgtggtgcaggatggagatggaagaagagaggtgcgcagccccaccaaggccccccacctgcagctgattgagggcaagagcagccatgagaccctgaacatcgtggaggagaagaagagagctgaggtgggcaaggatgagagggtcatcacagaggagatgaatggcaaggagatcagccctggcagcggccctggagagatcaggaaggtggagcctgtgacccagaaggacagcaccagcctgagcagcgagagcagcagcagcagcagcgagagcgaggaggaggatgtgggggagtaccggccccaccaccgggtgacagagggcaccatccgggaggagcaggagtatgaggaggaggtggaggaggagcccaggcctgctgccaagccccctgtggtgaagacagagatggtgaccatcagtgatgccagccagaggacagagatcagcaccaaggaggtgcccatcgtgcagacagagaccaagaccatcacctatgagagcccccagattgatggaggagctggaggagacagcggcaccctgctgacagcccagaccatcaccagcgagagcgtgtccaccaccaccaccacccacatcaccaagacagtgaagggcggcatcagcgagaccagaattgagaagagaattgtcatcactggagatggagacatcgaccatgaccaggccctggcccaggccatccgggaggcccgggagcagcacccagacatgtctgtgaccagggtggtggtgcacaaggagacagagctggccgaggagggagaagattag

SEQ ID NO: 330002 - DNA, 1902 bp, Artificial Sequence
  derived and/or modified sequence
atgaccaccgaggtgggcagcgtgagcgaggtgaagaaggacagctcccagctaggcacagatgcaacgaaggaaaagccaaaagaggtggcagagaatcagcaaaatcaaagctccgatcctgaggaggaaaaagggagtcagccgcccccagccgccgaaagccagtcctcgctgcgacgccagaagagagagaaggaaacatccgagtcccgaggtatctcccggttcatccccccctggctgaagaagcagaagagttacaccctcgtcgtggcgaaagacggtggggacaaaaaggaaccgacacaggccgttgtggaggaacaggtgctcgataaggaagagcctctgcctgaggaacagaggcaggcaaagggcgacgcagaagaaatggcacagaaaaaacaggaaatcaaagtcgaggtaaaggaagaaaagccatccgttagcaaagaggagaaaccgtcggtgagcaaagtggaaatgcagccaactgaacttgtaagcaaagaaagggaggagaaggtcaaagagacacaagaggacaaactcgaaggcggagccgcgaaacgcgagaccaaagaagttcaaactaatgagttgaaagccgagaaggcttcccagaaggtgacaaaaaagaccaagaccgtgcaatgcaaagtgacccttttggacgggaccgaatattcttgtgaccttgagaaacatgctaagggacaggtgctcttcgacaaggtctgtgaacacctgaacttgctcgaaaaggactactttgggctactgttccaggagtcccccgaacagaagaactggctggacccagccaaggagataaaacgacaactgcgcaatctgccctggctctttacttttaatgtcaagttttaccctcccgatccatcccaactgacagaggatattactcggtacttcctatgcctgcagctgcgtcaggacatcgcctctggccgacttccatgtagctttgttacacacgccttgctgggctcatacacgctccaggcagagcttggcgattacgatccagaagagcatgggtctatcgacctcagcgagttccaatttgcgccaacccagacaaaggagcttgaagagaaggtcgccgaacttcataagacacacaggggcttgtctccggcgcaagcagattctcagttcctggagaacgccaaaaggcttagtatgtatggggtggatctccaccatgcaaaagactctgagggggtcgatataaagcttggggtgtgcgccaatggcctgctcatttacaaggaccgtctgaggatcaatcgcttcgcttggcctaagatcctgaagatatcctataagcggtctaacttttatatcaaagtgagaccagcagaactcgagcagtttgaatctactatcgggttcaaactgcccaaccacagggctgcaaagagactttggaaggtttgtgtcgagcaccacacattttaccggcttgtgagccctgagcaaccaccaaaagcaaagttcctcaccctgggctcaaagtttcggtactccggtagaacacaggcacagacacgtcaggccagtacgctcatcgacaggcctgcacctcactttgaacggacgtcaagcaaaagggtgtcacgctcgctggatggagcgccaattggagtcatggaccagagcttaatgaaggacttccccggtgcagccggcgagatcagtgcctacggacctgggctcgtctccatcgcagtggtgcaggacggggatggaagaagggaggtgagatcccctactaaagccccacacctgcagctgatcgaaggtaaatcaagccacgagaccctcaacattgtagaagaaaagtctggccaaagattgggcaagactaaggaatag

SEQ ID NO: 330003 - DNA, 2559 bp, Artificial Sequence
  derived and/or modified sequence
atgaccaccgaggtgggcagcgtgagcgaggtgaagaaggacagcagtcagcttggaactgatgctaccaaggagaagccgaaagaggtggctgagaaccaacagaaccagagcagcgaccccgaagaggagaagggatcacagccgccacctgctgccgaatcccagagctcgctccgacgacagaaaagggaaaaggaaacctccgagagccgtggtattagtcggttcatccctccctggctgaaaaagcagaagtcttatacattggtggtcgccaaagacggaggcgacaagaaggaacctactcaggccgtggttgaggagcaggtgctcgacaaggaggaacccctccccgaggaacaacgccaggcaaaaggggacgcggaagaaatggcccagaaaaaacaggagatcaaggtcgaagtgaaggaggaaaagccgagcgttagtaaagaagaaaaaccttccgtatcgaaggtggaaatgcagccaacagaactggtgtcaaaagagcgtgaggagaaagtgaaagagacacaggaggataagttggagggtggcgccgccaagagggaaacaaaagaagtgcagaccaacgagctcaaggccgagaaggcctcacagaaggtgacaaagaaaaccaaaacagttcagtgtaaagtcacactattggacggcactgaatacagttgtgatctcgaaaaacacgccaaaggccaggtgctgttcgacaaagtctgcgagcacctaaacctgctggagaaagactactttggcttgctgttccaggagtcccccgaacaaaaaaattggcttgaccccgctaaggagattaaaagacagttgcgcaatctgccatggctcttcacatttaatgtgaaattctatccccctgatccctcacaattaactgaggatataacacggtatttcttgtgcctccagctgcgacaggacatcgccagcggtaggctgccatgttcctttgtgacccacgctcttctaggctcatacacgctgcaggccgagcttggagattatgatcccgaagagcatggatcgatcgatctcagcgagttccaatttgcaccaacacaaacgaaggagctcgaagagaaagttgcggagctgcacaagacccacagaggcttgtctcctgcccaggcagacagccaatttttagaaaacgcaaaacggctgtctatgtatggtgtagacctgcaccatgccaaggactcagaaggtgtggacattaagttaggtgtgtgtgctaatggcttactgatttacaaagatcgactgaggatcaaccgctttgcctggcctaaaattctaaagatctcctataagagatcaaacttctatattaaggtgagacccgccgagttggagcagttcgaatccaccattggttttaagcttcctaatcacagagctgctaagagactctggaaagtgtgtgtggagcatcacacgttttatcgactggtgtctcctgaacagccgcctaaggcaaagtttcttactctggggagtaaattccggtatagcggccgcactcaagctcagacccgtcaggcaagcacccttatcgaccgtcccgcaccccactttgagagaaccagtagcaagcgcgttagtcgaagcctagatggagctcctataggggttatggaccagtctctcatgaaggactttcctggcgcggcgggtgagattagcgcttacggcccgggtttagtatccatagctgtggttcaggacggcgatggacgacgagaagtaagatcccctaccaaagccccccaccttcagttaatagaggggaaatcctctcacgagaccctgaacatcgtcgaggagaagaaaagagccgaagtggggaaggacgaacgcgtgataactgaagagatgaatggaaaggaaatttctcctggatctggcccgggtgagatcaggaaggttgaaccggttactcaaaaggattctacaagtttatcttcagagtcatcttccagctctagtgaatccgaagaggaagacgtaggagagtataggccgcaccacagagttacagagggaaccatacgcgaggagcaggagtatgaagaagaagtggaggaggaaccaaggcctgccgccaagcctcctgttgtgaaaacagagatggtgacaatctcggacgcaagtcagagaactgagatcagcaccaaggaggtccccatcgttcagacagagaccaaaacaatcacttacgaatcgccccagatagatgggggggccggaggcgactccggcactctcctcacagctcaaactatcaccagtgagagtgtgagcacgacaaccaccacccatattaccaagactgtgaagggaggaatttccgagacgcgaattgagaaaaggatcgtgataaccggtgatggcgatatcgatcacgatcaagcactggcccaggcgatcagagaggcgagagagcaacatccggacatgtctgtgactagagtcgtcgttcataaggagacagagctggccgaggagggggaagattag

SEQ ID NO: 330004 - DNA, 1902 bp, Artificial Sequence
  derived and/or modified sequence
atgaccacagaagttggcagtgtatccgaggtgaaaaaagacagcagtcagctaggtaccgacgcaaccaaggaaaaaccaaaggaggtggccgagaaccagcagaaccagagtagtgacccagaggaagaaaagggtagccaacctccgccagccgctgagagtcaatcttccctacgtagacagaagcgagaaaaggaaacatccgaatctcgaggcattagccgatttatacctccctggctcaagaagcagaaatcatataccctggtagtcgcaaaggatggcggtgataaaaaagaacctacacaggctgtggtggaggagcaagtgctggataaagaggaaccactcccagaggaacagcgccaagccaagggcgatgcagaagaaatggctcagaagaagcaggagataaaggtggaggttaaggaggagaagcctagcgtttccaaagaagagaagccctccgtgtccaaggtggagatgcagcctacagagcttgtctccaaagagagggaagagaaagttaaggaaacccaggaagacaaactggaaggcggagcagcgaagcgagaaacaaaggaagtacagactaacgagttgaaagcggaaaaagccagccagaaagtaaccaaaaaaaccaaaaccgtccagtgtaaagtaacgttacttgacggtaccgaatatagctgtgacctcgaaaaacatgctaaaggacaggtgctattcgataaagtttgtgagcacctgaatctcttagaaaaagattatttcggcctgctgtttcaagaaagcccggaacagaaaaactggctggatccagccaaggaaatcaaacgccaacttagaaatctgccgtggttattcacctttaacgtcaagttttacccgccagacccatcgcagctcacagaagacataacgaggtattttctctgcttgcagttgcggcaagacattgcatctgggcgtctgccatgtagctttgtgactcacgccctcttgggaagttacactcttcaggctgagctgggggactacgacccggaagagcacggctccatagatctgagcgagtttcagttcgctccgacacagactaaggagttggaggagaaggtcgccgagctccataagacccatagaggtctctcccctgcccaggccgacagtcaattcctagagaatgcaaaacgcctgtctatgtatggtgtcgatttacaccacgctaaagactccgagggggtcgacattaagttgggcgtctgcgctaacggtctgctgatctacaaggaccggcttaggattaacagatttgcttggcctaagatcctgaaaatatcttacaagaggagcaatttttacataaaggtgaggccagcagaactggagcaattcgagagcactattgggttcaaactgccaaatcatcgcgctgccaaacgcttatggaaagtgtgcgttgagcaccatacattctatcgactggtttcaccagaacagccccctaaggctaaatttttgaccctcggctccaagttccgctacagtggtcggacacaagcacagacaagacaggcatccacccttattgaccgcccagcccctcacttcgaacgcacctcctcaaaaagggtgtcccggtctctggatggggcacccattggcgttatggaccagagcctcatgaaggacttccctggcgctgccggtgagatttccgcatacggccctgggctggtttccattgccgtcgtgcaggatggcgacggcaggagggaggtgagatcccccaccaaggcccctcatctgcaacttatcgaaggaaagtcgtcccatgagacactgaacattgttgaagagaagagcggacagagactgggcaagacgaaagaatag

SEQ ID NO: 330005 - DNA, 2559 bp, Artificial Sequence
  derived and/or modified sequence
atgacaactgaagtagggagcgtatcagaggtaaagaaggactcatcccagctcggaaccgatgcgacaaaagaaaagcccaaggaggttgccgagaaccaacaaaatcaatcatctgaccccgaggaggagaaaggcagtcagcccccacctgcagcagagagccagtcctctctgagacgccagaagcgtgagaaagagacatccgagagtcgcggtatctccaggtttatacctccttggttgaaaaaacagaaatcatacacgctggtcgtggcaaaggacggcggagataagaaagagcctactcaggcggtggttgaggagcaggtgctggacaaagaagagccattacctgaagaacaacgccaagcgaaaggtgacgctgaggaaatggcacaaaaaaagcaggagattaaggtcgaagtgaaggaggagaagcctagcgtgagcaaggaagaaaaacccagcgttagcaaagtggagatgcagccaaccgaactggtaagtaaggagcgcgaagagaaggtgaaggaaactcaggaagacaagttggagggtggagccgctaagcgcgagacaaaggaagttcagaccaacgaactcaaagctgagaaggcttctcagaaagtgactaaaaagacaaaaaccgtccagtgcaaagtgacactcttagacggcacagaatatagctgtgacctcgagaaacacgcaaaagggcaggttctcttcgataaggtgtgcgaacacttgaacctgctggagaaggactacttcggactcctctttcaggaatctcccgagcagaaaaactggcttgacccagccaaggagattaagagacaactgcggaatctcccctggctctttacatttaacgtgaagttctacccgccagatccaagtcagctcacggaggacatcacgagatacttcctgtgcttgcagctccggcaggacatcgcatccggaaggcttccctgtagcttcgttacccacgctctcctggggtcatacacattgcaagctgaactgggagattatgacccggaggagcatggaagtatcgacctgtcagagttccagttcgctcctacgcagaccaaggagctggaggagaaagtggcagagttgcacaaaacacaccgaggtctgagtcctgcccaggccgactctcagttcttggagaacgccaaacgcctgtctatgtacggtgttgatctacatcacgccaaggatagtgagggcgtagacatcaaactgggagtgtgcgccaacggtcttttgatttataaggaccgcctgagaattaatcgctttgcctggccaaaaatcctcaaaataagctataaaaggtcaaatttctacatcaaggtccgtccagcagaactagaacagtttgagtcaaccattggatttaaactgcctaaccatagagctgctaaaagactctggaaggtgtgtgtggagcaccacacattctaccgcctcgtctcacccgagcagcctccaaaagctaaattcctcactcttgggtcgaagttccggtactcaggcaggactcaagcccagacacggcaagcttccacactcatcgataggcctgcaccccactttgagcggacatcaagcaagcgagtatcacggagtttggacggggcacccatcggtgtgatggaccagagcttaatgaaagatttccccggagccgctggcgaaatctctgcgtatgggccaggcttggtgtccatcgccgtcgtgcaggatggcgatggaagacgggaagttaggtcaccgactaaggctccccatcttcagctgatagagggaaaaagttctcatgaaacactgaatattgtggaggaaaagaagcgggctgaggtgggtaaggatgagcgggtcattaccgaagagatgaatggaaaagagataagccctggctccgggcctggagaaataaggaaagtcgaacctgtcactcagaaagattcaacttctctcagctctgagtccagcagctccagctcagaatcagaggaagaagacgtgggggaataccggcctcatcacagggtcacagaggggacaatccgcgaggaacaagagtatgaggaggaggtcgaagaggagccccgaccggcagccaaaccccctgtggtcaaaaccgagatggtaactatttccgatgcttcccaacggaccgagatcagtactaaggaggtccccatcgtacagaccgagacgaaaacaatcacctacgaatctccccagattgatggaggcgctggaggggactcaggaaccctgctgactgctcagactatcacaagcgagagcgtgtcaaccaccacaaccacacatataactaaaaccgtgaagggcggaattagcgaaactagaatcgagaagaggatcgtgataactggggacggcgacatcgaccatgatcaggcactggcccaagccatcagagaagcccgagaacaacatcccgacatgagcgtgacacgagtggtcgtccataaagagactgaactggccgaagagggcgaggattag

SEQ ID NO: 330006 - DNA, 1902 bp, Artificial Sequence
  derived and/or modified sequence
atgaccaccgaggtgggcagcgtgagcgaggtgaagaaggacagcagccagctgggcaccgacgccaccaaggagaagcccaaggaggtggccgagaaccagcagaaccagagcagcgaccccgaggaggagaagggcagccagcccccccccgccgccgagagccagagcagcctgagaagacagaagagagagaaggagaccagcgagagcagaggcatcagcagattcatccccccctggctgaagaagcagaagagctacaccctggtggtggccaaggacggcggcgacaagaaggagcccacccaggccgtggtggaggagcaggtgctggacaaggaggagcccctgcccgaggagcagagacaggccaagggcgacgccgaggagatggcccagaagaagcaggagatcaaggtggaggtgaaggaggagaagcccagcgtgagcaaggaggagaagcccagcgtgagcaaggtggagatgcagcccaccgagctggtgagcaaggagagagaggagaaggtgaaggagacccaggaggacaagctggagggcggcgccgccaagagagagaccaaggaggtgcagaccaacgagctgaaggccgagaaggccagccagaaggtgaccaagaagaccaagaccgtgcagtgcaaggtgaccctgctggacggcaccgagtacagctgcgacctggagaagcacgccaagggccaggtgctgttcgacaaggtgtgcgagcacctgaacctgctggagaaggactacttcggcctgctgttccaggagagccccgagcagaagaactggctggaccccgccaaggagatcaagagacagctgagaaacctgccctggctgttcaccttcaacgtgaagttctacccccccgaccccagccagctgaccgaggacatcaccagatacttcctgtgcctgcagctgagacaggacatcgccagcggcagactgccctgcagcttcgtgacccacgccctgctgggcagctacaccctgcaggccgagctgggcgactacgaccccgaggagcacggcagcatcgacctgagcgagttccagttcgcccccacccagaccaaggagctggaggagaaggtggccgagctgcacaagacccacagaggcctgagccccgcccaggccgacagccagttcctggagaacgccaagagactgagcatgtacggcgtggacctgcaccacgccaaggacagcgagggcgtggacatcaagctgggcgtgtgcgccaacggcctgctgatctacaaggacagactgagaatcaacagattcgcctggcccaagatcctgaagatcagctacaagagaagcaacttctacatcaaggtgagacccgccgagctggagcagttcgagagcaccatcggcttcaagctgcccaaccacagagccgccaagagactgtggaaggtgtgcgtggagcaccacaccttctacagactggtgagccccgagcagccccccaaggccaagttcctgaccctgggcagcaagttcagatacagcggcagaacccaggcccagaccagacaggccagcaccctgatcgacagacccgccccccacttcgagagaaccagcagcaagagagtgagcagaagcctggacggcgcccccatcggcgtgatggaccagagcctgatgaaggacttccccggcgccgccggcgagatcagcgcctacggccccggcctggtgagcatcgccgtggtgcaggacggcgacggcagaagagaggtgagaagccccaccaaggccccccacctgcagctgatcgagggcaagagcagccacgagaccctgaacatcgtggaggagaagagcggccagagactgggcaagaccaaggagtag

SEQ ID NO: 330007 - DNA, 2559 bp, Artificial Sequence
  derived and/or modified sequence
atgaccaccgaggtgggcagcgtgagcgaggtgaagaaggacagcagccagctgggcaccgacgccaccaaggagaagcccaaggaggtggccgagaaccagcagaaccagagcagcgaccccgaggaggagaagggcagccagcccccccccgccgccgagagccagagcagcctgagaagacagaagagagagaaggagaccagcgagagcagaggcatcagcagattcatccccccctggctgaagaagcagaagagctacaccctggtggtggccaaggacggcggcgacaagaaggagcccacccaggccgtggtggaggagcaggtgctggacaaggaggagcccctgcccgaggagcagagacaggccaagggcgacgccgaggagatggcccagaagaagcaggagatcaaggtggaggtgaaggaggagaagcccagcgtgagcaaggaggagaagcccagcgtgagcaaggtggagatgcagcccaccgagctggtgagcaaggagagagaggagaaggtgaaggagacccaggaggacaagctggagggcggcgccgccaagagagagaccaaggaggtgcagaccaacgagctgaaggccgagaaggccagccagaaggtgaccaagaagaccaagaccgtgcagtgcaaggtgaccctgctggacggcaccgagtacagctgcgacctggagaagcacgccaagggccaggtgctgttcgacaaggtgtgcgagcacctgaacctgctggagaaggactacttcggcctgctgttccaggagagccccgagcagaagaactggctggaccccgccaaggagatcaagagacagctgagaaacctgccctggctgttcaccttcaacgtgaagttctacccccccgaccccagccagctgaccgaggacatcaccagatacttcctgtgcctgcagctgagacaggacatcgccagcggcagactgccctgcagcttcgtgacccacgccctgctgggcagctacaccctgcaggccgagctgggcgactacgaccccgaggagcacggcagcatcgacctgagcgagttccagttcgcccccacccagaccaaggagctggaggagaaggtggccgagctgcacaagacccacagaggcctgagccccgcccaggccgacagccagttcctggagaacgccaagagactgagcatgtacggcgtggacctgcaccacgccaaggacagcgagggcgtggacatcaagctgggcgtgtgcgccaacggcctgctgatctacaaggacagactgagaatcaacagattcgcctggcccaagatcctgaagatcagctacaagagaagcaacttctacatcaaggtgagacccgccgagctggagcagttcgagagcaccatcggcttcaagctgcccaaccacagagccgccaagagactgtggaaggtgtgcgtggagcaccacaccttctacagactggtgagccccgagcagccccccaaggccaagttcctgaccctgggcagcaagttcagatacagcggcagaacccaggcccagaccagacaggccagcaccctgatcgacagacccgccccccacttcgagagaaccagcagcaagagagtgagcagaagcctggacggcgcccccatcggcgtgatggaccagagcctgatgaaggacttccccggcgccgccggcgagatcagcgcctacggccccggcctggtgagcatcgccgtggtgcaggacggcgacggcagaagagaggtgagaagccccaccaaggccccccacctgcagctgatcgagggcaagagcagccacgagaccctgaacatcgtggaggagaagaagagagccgaggtgggcaaggacgagagagtgatcaccgaggagatgaacggcaaggagatcagccccggcagcggccccggcgagatcagaaaggtggagcccgtgacccagaaggacagcaccagcctgagcagcgagagcagcagcagcagcagcgagagcgaggaggaggacgtgggcgagtacagaccccaccacagagtgaccgagggcaccatcagagaggagcaggagtacgaggaggaggtggaggaggagcccagacccgccgccaagccccccgtggtgaagaccgagatggtgaccatcagcgacgccagccagagaaccgagatcagcaccaaggaggtgcccatcgtgcagaccgagaccaagaccatcacctacgagagcccccagatcgacggcggcgccggcggcgacagcggcaccctgctgaccgcccagaccatcaccagcgagagcgtgagcaccaccaccaccacccacatcaccaagaccgtgaagggcggcatcagcgagaccagaatcgagaagagaatcgtgatcaccggcgacggcgacatcgaccacgaccaggccctggcccaggccatcagagaggccagagagcagcaccccgacatgagcgtgaccagagtggtggtgcacaaggagaccgagctggccgaggagggcgaggactag

SEQ ID NO: 330008 - DNA, 3910 bp, Artificial Sequence
  derived and/or modified sequence
gaggaggcaggcgcggctgccggcggctgggactgaagagggacgggtcccgcggcgagcgagctcctgaggtacggcgtcgggcataagctgtggccatgactactgaagtaggctctgtgtctgaagtgaagaaggactctagccagttaggaacagatgcaaccaaggaaaaacctaaagaagtagcagaaaatcagcagaatcagtcttccgatccagaggaggaaaaaggttcccagccacctcctgcagctgaaagccaaagtagtctacgccgccagaagagagagaaggaaacatcggagagcaggggtatttctcggttcataccgccatggcttaagaagcaaaagtcatataccttagtagtggccaaagatggaggagataaaaaagagcctacccaagctgttgttgaagaacaggtcttagataaagaggaaccccttccagaagaacagagacaggctaagggtgatgctgaagaaatggctcagaagaaacaagagattaaagttgaagtcaaggaagaaaaaccctcagtgagcaaggaagaaaaaccctcagtgagcaaagtggagatgcagcctactgaattagtaagtaaggagagagaagagaaggtaaaagaaacacaggaagacaaattagaaggaggagcagcaaaaagggagaccaaggaagtgcagaccaatgagctgaaagcagagaaggcatctcaaaaagtcaccaagaagaccaaaactgtccagtgtaaagtgaccctcttagatggcaccgaatacagctgtgacctggagaaacatgccaagggacaagtgttatttgacaaagtgtgtgaacacctcaatctcttggagaaagactactttggacttttgtttcaggaaagccctgagcagaaaaactggttagatcctgctaaagaaataaagagacaactgagaaaccttccatggctattcacttttaatgtgaagttttatcctcctgatccttctcaattgactgaagatatcaccagatacttcttgtgccttcagctccggcaggacattgcctctggccgcctgccctgctcttttgtgactcatgctctcctgggatcctacaccctgcaggctgaacttggtgactatgacccagaagaacatggcagcatcgacctcagtgaattccagtttgcccctactcagactaaggagctggaagagaaggtggcagagctgcacaaaacccacaggggcttatcgccagcacaagctgattcccagttcttagaaaatgcaaagaggctttccatgtatggtgttgacctacatcatgccaaggactcagaaggtgtggacatcaagctgggcgtgtgtgctaatggacttctcatttacaaagacagactgcgaatcaatcgttttgcttggccgaaaatcttaaaaatttcctataaacgcagtaacttctacattaaagtcagaccggcagagctggaacagtttgagagtaccattggattcaaactgccaaaccaccgggcagcgaaaagactatggaaagtgtgcgtggagcatcatactttctacaggcttgtttctccagagcagccaccaaaagccaagttcctgaccttggggtccaaatttcgctatagtggccgcacccaagcacagacccgccaggccagcaccctcatagataggccagcaccacactttgagcgcacttctagtaaacgggtctccaggagtctagatggagctccgattggtgtcatggaccaaagtcttatgaaggattttcctggcgctgctggggagatttcagcctatggacctggacttgtcagcattgccgtggtacaagatggggacggcaggagggaagtgagaagcccaactaaagccccacatttgcagctcattgaaggaaagagttcacatgagactctgaatatagtggaggagaagagcgggcagaggttgggaaagacgaaagagtaatcacagaagaaatgaatggtaaagagatatcacctgggagtggtcctggggagattcgtaaggtggagcctgtgacacaaaaagactccacctccctgtcttctgagagcagcagcagcagcagtgagagtgaggaggaagacgtgggagagtaccgtccccaccaccgagtgaccgagggcaccatcagggaggaacaggagtatgaagaagaggtggaggaagaaccccgcccggcagccaagccaccagtggtaaaaacagagatggtaacaatttctgatgcctcacaaaggacagaaatctccaccaaggaagtccccattgtccaaactgagaccaaaaccatcacatatgagtctccacagattgatggcggggctggtggtgattcgggcacgttactgaccgcacaaaccatcacatctgagtccgtgtcaacaacgacaaccacacacatcaccaagactgtaaaaggtggaatttctgaaacaagaattgagaaacgcattgtgatcacaggagatggagatattgatcatgaccaggcactggctcaggcgatcagggaagccagagagcagcaccctgacatgtcggtcacaagagtggtggtacacaaagaaacagagttggctgaggaaggggaagattaagtaagaaagtcattttttaaacaacactcaactttgtgaacccctgaagattttttgaccgttccaagtcttaatgccacaccactattccagcgaatttatgctacaactggtaacaatgaccagaagcctgaagaattaaaatgccaacaccaaacctttccttaccagctctggtctatattgctcccatgcatttaatatattattttgttttataaccacttctaaatattctcagttctttctttttgttgttgttaattaaggggttttggttttgttttctgtttactttgtgtgcaactacctgcttttaatgactcactttgatcaaatgacagtgaacaaagccagcccaagctggtaaggtgctgttcacttgaacaggtgctgttgcgcagaaaggaaactctgtgactaatttagatagtggctttccttcttctggattcttttcattgaattctcacagtaaatatttacggagttttcaaattgcagcaaatatactgtatgagaaaatattaatacagattaaaagcctttcttacatcttgaaaattttctaatatttgagaatttcacagggatgttttttatattggacccttttgactttccagtcctgtgactttctacttttagtagagagtcagaatctctggactggagaataatgaagaagttcactgactgtgcactgtgcttagagaccctgccgcaccacagtgccaatgcttgtcagacacatgcccttcggcagcattccagaacaggagggaagagaaagagaaaactttcttcccttctactaaaagattcaggcagcttaaaaccttagtgctttctttcttaacatacccacatttcaattctttccattatttgaacacttgggtagaactcttgctttgtattaaacctctttgtctacacatgtaaaacttaccttttgttattgagcaggcctatctctttcagatagttttatgattcacacaggtttgaggatgctggggagagggggagggggctgtggtggtgttctgttggttacaagaaagttataccatttaaagctggcaccagagacccgatagggacttattaactatattgaacattttttcctttgcctttgaccctatgtatagttacgatgccagattagatttatagcagcctcaagttgtattaaatgatattttgcttcctgtaatactattataaaataaagtttgtttattctct

SEQ ID NO: 330009 - DNA, 3914 bp, Artificial Sequence
  derived and/or modified sequence
gaggaggcaggcgcggctgccggcggctgggactgaagagggacgggtcccgcggcgagcgagctcctgaggtacggcgtcgggcataagctgtggccatgactactgaagtaggctctgtgtctgaagtgaagaaggactctagccagttaggaacagatgcaaccaaggaaaaacctaaagaagtagcagaaaatcagcagaatcagtcttccgatccagaggaggaaaaaggttcccagccacctcctgcagctgaaagccaaagtagtctacgccgccagaagagagagaaggaaacatcggagagcaggggtatttctcggttcataccgccatggcttaagaagcaaaagtcatataccttagtagtggccaaagatggaggagataaaaaagagcctacccaagctgttgttgaagaacaggtcttagataaagaggaaccccttccagaagaacagagacaggctaagggtgatgctgaagaaatggctcagaagaaacaagagattaaagttgaagtcaaggaagaaaaaccctcagtgagcaaggaagaaaaaccctcagtgagcaaagtggagatgcagcctactgaattagtaagtaaggagagagaagagaaggtaaaagaaacacaggaagacaaattagaaggaggagcagcaaaaagggagaccaaggaagtgcagaccaatgagctgaaagcagagaaggcatctcaaaaagtcaccaagaagaccaaaactgtccagtgtaaagtgaccctcttagatggcaccgaatacagctgtgacctggagaaacatgccaagggacaagtgttatttgacaaagtgtgtgaacacctcaatctcttggagaaagactactttggacttttgtttcaggaaagccctgagcagaaaaactggttagatcctgctaaagaaataaagagacaactgagaaaccttccatggctattcacttttaatgtgaagttttatcctcctgatccttctcaattgactgaagatatcaccagatacttcttgtgccttcagctccggcaggacattgcctctggccgcctgccctgctcttttgtgactcatgctctcctgggatcctacaccctgcaggctgaacttggtgactatgacccagaagaacatggcagcatcgacctcagtgaattccagtttgcccctactcagactaaggagctggaagagaaggtggcagagctgcacaaaacccacaggggcttatcgccagcacaagctgattcccagttcttagaaaatgcaaagaggctttccatgtatggtgttgacctacatcatgccaaggactcagaaggtgtggacatcaagctgggcgtgtgtgctaatggacttctcatttacaaagacagactgcgaatcaatcgttttgcttggccgaaaatcttaaaaatttcctataaacgcagtaacttctacattaaagtcagaccggcagagctggaacagtttgagagtaccattggattcaaactgccaaaccaccgggcagcgaaaagactatggaaagtgtgcgtggagcatcatactttctacaggcttgtttctccagagcagccaccaaaagccaagttcctgaccttggggtccaaatttcgctatagtggccgcacccaagcacagacccgccaggccagcaccctcatagataggccagcaccacactttgagcgcacttctagtaaacgggtctccaggagtctagatggagctccgattggtgtcatggaccaaagtcttatgaaggattttcctggcgctgctggggagatttcagcctatggacctggacttgtcagcattgccgtggtacaagatggggacggcaggagggaagtgagaagcccaactaaagccccacatttgcagctcattgaaggaaagagttcacatgagactctgaatatagtggaggagaagaagcgggcagaggttgggaaagacgaaagagtaatcacagaagaaatgaatggtaaagagatatcacctgggagtggtcctggggagattcgtaaggtggagcctgtgacacaaaaagactccacctccctgtcttctgagagcagcagcagcagcagtgagagtgaggaggaagacgtgggagagtaccgtccccaccaccgagtgaccgagggcaccatcagggaggaacaggagtatgaagaagaggtggaggaagaaccccgcccggcagccaagccaccagtggtaaaaacagagatggtaacaatttctgatgcctcacaaaggacagaaatctccaccaaggaagtccccattgtccaaactgagaccaaaaccatcacatatgagtctccacagattgatggcggggctggtggtgattcgggcacgttactgaccgcacaaaccatcacatctgagtccgtgtcaacaacgacaaccacacacatcaccaagactgtaaaaggtggaatttctgaaacaagaattgagaaacgcattgtgatcacaggagatggagatattgatcatgaccaggcactggctcaggcgatcagggaagccagagagcagcaccctgacatgtcggtcacaagagtggtggtacacaaagaaacagagttggctgaggaaggggaagattaagtaagaaagtcattttttaaacaacactcaactttgtgaacccctgaagattttttgaccgttccaagtcttaatgccacaccactattccagcgaatttatgctacaactggtaacaatgaccagaagcctgaagaattaaaatgccaacaccaaacctttccttaccagctctggtctatattgctcccatgcatttaatatattattttgttttataaccacttctaaatattctcagttctttctttttgttgttgttaattaaggggttttggttttgttttctgtttactttgtgtgcaactacctgcttttaatgactcactttgatcaaatgacagtgaacaaagccagcccaagctggtaaggtgctgttcacttgaacaggtgctgttgcgcagaaaggaaactctgtgactaatttagatagtggctttccttcttctggattcttttcattgaattctcacagtaaatatttacggagttttcaaattgcagcaaatatactgtatgagaaaatattaatacagattaaaagcctttcttacatcttgaaaattttctaatatttgagaatttcacagggatgttttttatattggacccttttgactttccagtcctgtgactttctacttttagtagagagtcagaatctctggactggagaataatgaagaagttcactgactgtgcactgtgcttagagaccctgccgcaccacagtgccaatgcttgtcagacacatgcccttcggcagcattccagaacaggagggaagagaaagagaaaactttcttcccttctactaaaagattcaggcagcttaaaaccttagtgctttctttcttaacatacccacatttcaattctttccattatttgaacacttgggtagaactcttgctttgtattaaacctctttgtctacacatgtaaaacttaccttttgttattgagcaggcctatctctttcagatagttttatgattcacacaggtttgaggatgctggggagagggggagggggctgtggtggtgttctgttggttacaagaaagttataccatttaaagctggcaccagagacccgatagggacttattaactatattgaacattttttcctttgcctttgaccctatgtatagttacgatgccagattagatttatagcagcctcaagttgtattaaatgatattttgcttcctgtaatactattataaaataaagtttgtttattctctaaa

SEQ ID NO: 330010 - protein, 153 aa, Artificial Sequence
  derived and/or modified sequence
MTTEVGSVSEVKKDSSQLGTDATKEKPKEVAENQQNQSSDPEEEKGSQPPPAAESQSSLRRQKREKETSESRGISRFIPPWLKKQKSYTLVVAKDGGDKKEPTQAVVEEQVLDKEEPLPEEQRQAKGDAEEMAQKKQEIKVEVKEEKPSVSKE

SEQ ID NO: 330011 - protein, 179 aa, Artificial Sequence
  derived and/or modified sequence
MTTEVGSVSEVKKDSSQLGTDATKEKPKEVAENQQNQSSDPEEEKGSQPPPAAESQSSLRRQKREKETSESRGISRFIPPWLKKQKSYTLVVAKDGGDKKEPTQAVVEEQVLDKEEPLPEEQRQAKGDAEEMAQKKQEIKVEVKEEKPSVSKEEKPSVSKVEMQPTELVSKEREEKVKE

SEQ ID NO: 330012 - DNA, 4360 bp, Artificial Sequence
  derived and/or modified sequence
ctgaaatggacttgctttcagacatttcagaggaagacccctttggggaggctgaccagatcacactagacagcttagagcacctttccacaggtgaaatatcggagcagggggattctgaagttgctatgcctgatttggtcttggattctgccatagccccttctcagcctgactgtccttctcccatccatgggaagactcttaaagcagctgacgacagtgattctgagtttggttacttctccttcagtttctccaaatgttttccctccggcttcccctcccttcttgatgaagatggatatcttgctttccccagcctccccaaggtctgggtctccttcctccccgctggtgtgcagcactatgtcccaatcacctccccttcattcattccttcccttatcctcatctttgggctacttctgtctgcttctcagtcagttcctttttctcttgccttttcccttcctctggctctatccctctgctatctggaggctaaagccgcctcctttaatgtttcttatgactgtgacttgaatgacaagctcgaggaagaggaagtagttgctggcatgcctacgtaagctcagtttgtggagtcaacacaatacactttatcttaaacccttcctaatatagagtgtaaatgtgtgcatacatttcaccactgattaccctcaacatagtagtacctgcacattttcacacacacaatattttagtgcatgagaaataagtgtagacacttctccttcattgataccattgaccagttccacacattctaagttaggagcgaaattgtaggattattttacaaatatctagatcaaagtagatttgtaacagaaggtgtgggggaggagggaaggaggagggaacctgtattgcccgtaacaatccatacagggtctctccattttgcaaacagatattaatgctgttcctttaggatgacatctttttgttttgatatagaatttaggatgcagtggacataactgttcctgatgtatattagtagaattccttagtactgttatttctcttgttggaaacccaagtgtgttctagcatctatgaggatgtatctgtaacctttactcctgacatttgtaagtctaatctcaaaagctccttatctccctattattgtagtatttggagaccagatgaattttagctagtttttttttctaaccttaaattatgtaattatatataagagtcactatagggtattttataaggaaggtactattctgttgtctttaacaaatgtatgtgaaaagtgaaacatggctttttgaaaatttagactatataacactaagattgggcctcatagtgctcctttatttaaaattaggtgtttggtttgaggatttttacccctatataaggcaaatttttttcaagtatcctacctctgtgctactaagtcagcattaacatgtacaatatatttttgattattttgttaaatgtggcctggtgatttagtgcctcatattctatggatcctaccaatacatacagtaaatcacaaaatttagagcaaacctaaagaaaaatgtaaagataattgcagtgagtatgcattgtaggacaattgttaaaagtttacctgaggaatgtcaaagatcaacattttagggaattaaatgttgaccaaggagttggaagatgtttcttaacagattattgaatgtctgtgtctcatttttcacatctgataaagactctgagctccttgcttacctctgaaaaatactatgaatggttaaaaaggtaagccgtttgaactctcagatttgacactatcatcctaattaagaaggaaaaggatatatattaggaattaacctataaaggttaaatgatttgcctttgataagggagtcaatatttttattctcaccattttttcccttgagtcaaaattcagtcagtatttgttagttttaaacttctacattcattcttttgaatcatcagatattgagaaatgtccaactatgaaaaactgttcttatttaaagaattttatgtaagtggttatatttcaaagattatttttaaatacccaccattttaatatgaaactagttaaataagccaatccccctcccccagccagaaaagaaatccatatttaacaaactgaatcataggttgaacatttgttccccaatataaagctaaaaacgaattttacatcattatactttaccccatcactagttgctttagacatttcaaattagaacagattgaattatgccatttttgcactctcatattcttgttcctgagtacaaaatattcaaaagcagagcataatctagggactgagaaagagtgaagcttccatcctccattccacctttgcaaaggatcatttccatcattcgtacaacactgtaggtgaagaaagaccaaagaggcttaatattctgcatcttctgagggcctcacagtaaaggcgaagatggaagaagaggaaacgcagctggaagagaaaaattccttgagagtagaaggggataatatttatgtcagacatagcaatttaatgttggaggaactggataaggcccaggaggacatactgaaacatcaggctagcattagtgaactcaagcgcaattttatggaatccacacctgagccgcgccctaatgaatgggaaaaacgacgtatcacacctctgtccctacagacacaagggacacgtgctcccgagtcagaagggccttgcactggagccagggatgctgttaagccaccagtggtaaaaacagagatggtaacaatttctgatgcctcacaaaggacagaaatctccaccaaggaagtccccattgtccaaactgagaccaaaaccatcacatatgagtctccacagactgtaaaaggtggaatttctgaaacaagaattgagaaacgcattgtgatcacaggagatggagatattgatcatgaccaggcactggctcaggcgatcagggaagccagagagcagcaccctgacatgtcggtcacaagagtggtggtacacaaagaaacagagttggctgaggaaggggaagattaagtaagaaagtcattttttaaacaacactcaactttgtgaacccctgaagattttttgaccgttccaagtcttaatgccacaccactattccagcgaatttatgctacaactggtaacaatgaccagaagcctgaagaattaaaatgccaacaccaaacctttccttaccagctctggtctatattgctcccatgcatttaatatattattttgttttataaccacttctaaatattctcagttctttctttttgttgttgttaattaaggggttttggttttgttttctgtttactttgtgtgcaactacctgcttttaatgactcactttgatcaaatgacagtgaacaaagccagcccaagctggtaaggtgctgttcacttgaacaggtgctgttgcgcagaaaggaaactctgtgactaatttagatagtggctttccttcttctggattcttttcattgaattctcacagtaaatatttacggagttttcaaattgcagcaaatatactgtatgagaaaatattaatacagattaaaagcctttcttacatcttgaaaattttctaatatttgagaatttcacagggatgttttttatattggacccttttgactttccagtcctgtgactttctacttttagtagagagtcagaatctctggactggagaataatgaagaagttcactgactgtgcactgtgcttagagaccctgccgcaccacagtgccaatgcttgtcagacacatgcccttcggcagcattccagaacaggagggaagagaaagagaaaactttcttcccttctactaaaagattcaggcagcttaaaaccttagtgctttctttcttaacatacccacatttcaattctttccattatttgaacacttgggtagaactcttgctttgtattaaacctctttgtctacacatgtaaaacttaccttttgttattgagcaggcctatctctttcagatagttttatgattcacacaggtttgaggatgctggggagagggggagggggctgtggtggtgttctgttggttacaagaaagttataccatttaaagctggcaccagagacccgatagggacttattaactatattgaacattttttcctttgcctttgaccctatgtatagttacgatgccagattagatttatagcagcctcaagttgtattaaatgatattttgcttcctgtaatactattataaaataaagtttgtttattctct

SEQ ID NO: 330013 - protein, 162 aa, Artificial Sequence
  derived and/or modified sequence
MTTEVGSVSEVKKDSSQLGTDATKEKPKEVAENQQNQSSDPEEEKGSQPPPAAESQSSLRRQKREKETSESRGISRFIPPWLKKQKSYTLVVAKDGGDKKEPTQAVVEEQVLDKEEPLPEEQRQAKGDAEEMAQKKQEIKVEVKEEKPSVSKEEKPSVSKVE

SEQ ID NO: 330014 - protein, 747 aa, Artificial Sequence
  derived and/or modified sequence
MTTEVGSVSEVKKDSSQLGTDATKEKPKEVAENQQNQSSDPEEEKGSQPPPAAESQSSLRRQKREKETSESRGISRFIPPWLKKQKSYTLVVAKDGGDKKEPTQAVVEEQVLDKEEPLPEEQRQAKGDAEEMAQKKQEIKVEVKEEKPSVSKEEKPSVSKVEMQPTELVSKEREEKVKETQEDKLEGGAAKRETKEVQTNELKAEKASQKVTKKTKTVQCKVTLLDGTEYSCDLEKHAKGQVLFDKVCEHLNLLEKDYFGLLFQESPEQKNWLDPAKEIKRQLRNLPWLFTFNVKFYPPDPSQLTEDITRYFLCLQLRQDIASGRLPCSFVTHALLGSYTLQAELGDYDPEEHGSIDLSEFQFAPTQTKELEEKVAELHKTHRGLSPAQADSQFLENAKRLSMYGVDLHHAKDSEGVDIKLGVCANGLLIYKDRLRINRFAWPKILKISYKRSNFYIKVRPAELEQFESTIGFKLPNHRAAKRLWKVCVEHHTFYRLVSPEQPPKAKFLTLGSKFRYSGRTQAQTRQASTLIDRPAPHFERTSSKRVSRSLDGAPIGVMDQSLMKDFPGAAGEISAYGPGLVSIAVVQDGDGRREVRSPTKAPHLQLIEGKPPVVKTEMVTISDASQRTEISTKEVPIVQTETKTITYESPQIDGGAGGDSGTLLTAQTITSESVSTTTTTHITKTVKGGISETRIEKRIVITGDGDIDHDQALAQAIREAREQHPDMSVTRVVVHKETELAEEGED

SEQ ID NO: 330015 - protein, 127 aa, Artificial Sequence
  derived and/or modified sequence
MTTEVGSVSEVKKDSSQLGTDATKEKPKEVAENQQNQSSDPEEEKGSQPPPAAESQSSLRRQKREKETSESRGISRFIPPWLKKQKSYTLVVAKDGGDKKEPTQAVVEEQVLDKEEPLPEEQRQAKG

SEQ ID NO: 330016 - DNA, 2244 bp, Artificial Sequence
  derived and/or modified sequence
atgactactgaagttggcagtgtatcagaagtgaaaaaggattctagccagctcggcacagacgctaccaaggaaaagcccaaagaggtcgccgagaaccaacagaaccaatccagcgatccagaggaggagaaaggctcacagccgcccccggccgccgagtctcaatcgtctctgagaagacagaaaagggagaaggaaacgtccgagagcaggggtatttccagattcattccgccttggctgaaaaaacaaaagagttataccttagtggttgcaaaggatggcggagataagaaggagcctactcaggctgtggtggaggaacaggtgctcgacaaggaggaaccccttccagaggaacagcgacaggctaaaggcgatgccgaagaaatggcacagaagaagcaggaaatcaaggtggaagtcaaggaggagaagccttccgtgagcaaagaagaaaaaccctccgtgtcgaaggtggagatgcagccaaccgagctggtaagtaaagagcgggaggagaaggtcaaggaaactcaggaagacaagctcgaaggcggagcagctaagagagaaacgaaagaggttcagaccaatgagttaaaagcagagaaagcatctcagaaggttacgaagaaaactaagacagtgcagtgtaaggtaacattactggatggaaccgaatatagttgtgaccttgaaaaacatgccaaggggcaggtgctgttcgacaaagtctgtgagcatctgaatctccttgaaaaggactactttgggttgctgttccaggaaagtcctgaacaaaagaattggctggatccagcaaaggagatcaaacggcagctgcggaacctcccttggttgttcacctttaacgtgaagttttatcctcccgacccctcgcagctgacagaagacatcaccaggtacttcttatgcctgcaactcaggcaagacatcgctagcggcagactgccttgttccttcgtgacccacgcactgctgggaagctacaccctccaggcggagttgggcgactatgatccagaggagcacgggtcgatcgacctgtctgagttccagtttgcacctacacagaccaaagaactggaggaaaaagtggctgagctgcacaagacccaccgcggattatcccctgcccaagccgactctcagtttctggagaacgcgaagcgattgtcgatgtatggtgttgacctgcaccacgccaaagatagcgagggtgtggatataaagctcggagtgtgcgccaacgggctgctgatttataaggatcgactgcggatcaaccgcttcgcctggccaaagatcctcaagatatcttacaagagaagtaacttctacatcaaagtgcggccagctgagctggagcagttcgaatccaccattggctttaaactccccaaccaccgcgctgcaaaaaggctgtggaaagtctgcgtcgagcaccatactttttacaggctggtctccccagagcaacctccaaaagctaagttcctcaccttaggaagtaagttcaggtattccggcaggacccaagcccagaccagacaggcatccactctgattgacaggcccgctcctcattttgagcggacttcctccaaaagagtttcgcgatcactggatggagccccaatcggtgtcatggaccagtctctcatgaaggattttcctggcgctgccggcgaaatctcggcctacgggcctggtttagtgtctatcgcagtcgtacaggatggagacggacggagagaggtccggtcgcccaccaaagctccgcatttgcagctcatcgagggtaaaccccccgtggtaaagaccgaaatggtgaccatttccgatgcatcgcagagaaccgaaatttctaccaaggaagtgccaattgtccaaactgagactaagaccataacatacgaatcaccgcagatagatggtggggccgggggggattctggcactctcctcactgcccaaactatcacatctgaatcagtgtccaccaccacaactacccacattactaaaactgtgaagggaggcatttcagaaacacgcattgaaaagcgaatcgtgataaccggcgacggggacatcgaccacgaccaggcactggcccaggccatcagggaggcaagggagcagcaccctgacatgagtgtgactcgcgtcgtagtccataaagagacagaactggctgaggagggtgaggattag

SEQ ID NO: 330017 - DNA, 2244 bp, Artificial Sequence
  derived and/or modified sequence
atgacgactgaagtgggctctgtgagcgaagtgaagaaggacagtagccaactagggaccgacgccaccaaagaaaagccaaaggaggtcgcggagaaccagcagaaccagtctagcgacccagaggaagagaaaggctcacagcccccccctgcagccgaatctcagtccagccttagacggcagaaacgggaaaaagaaacaagcgaatcgcggggcatctctcggtttatcccaccttggctgaaaaagcagaagtcctatactcttgtggtggctaaggatggcggcgataaaaaagagccaacacaggccgtggtcgaggagcaagtgttagataaggaagagccactcccagaagaacagcgccaggccaagggcgacgccgaagagatggcccagaagaaacaggagatcaaagtggaagttaaggaagagaagcctagcgtctctaaggaggaaaaacctagcgtgtctaaggtcgagatgcaacccaccgagctggtgtccaaggaacgggaagagaaggtcaaagaaacacaggaagataaactggaaggcggggcagcaaaaagagaaacaaaggaggtgcagaccaacgagctcaaggccgaaaaggcatcccagaaggtaaccaagaagactaagacagtgcagtgcaaggtgaccctgctggatggcacagagtattcttgtgatttagagaagcatgcgaaagggcaggtgctgtttgataaggtttgtgagcacttgaatcttctggaaaaggactacttcggcctgctcttccaggagtcacctgaacagaaaaattggctggacccagctaaggaaatcaaacgccagctgagaaacttgccttggttatttacctttaatgttaagttctatccgccagatccaagtcagctgacggaggatataacgcggtacttcctgtgcctccagttgcgccaggatatcgcttccggacgcctcccatgctcctttgtcacacacgcattgctgggaagctacacacttcaggccgaacttggagattatgaccctgaagaacacgggtctattgacttaagtgaattccagttcgcgccaacccaaacgaaggagcttgaagagaaagttgctgaattgcacaagacacacagggggctttcccccgcccaggctgattctcagttcctagagaatgctaaacggctcagcatgtatggagttgatcttcaccatgccaaggattcggaaggcgtggacataaagctaggcgtgtgcgcgaacggtttattgatttataaggaccgtctcaggatcaataggtttgcgtggccaaagatcctgaaaatttcttacaaaagaagtaacttttatatcaaagtgcgacccgccgaactggaacagttcgaaagtactatagggtttaagctgcctaatcaccgagcggcaaaacgtttgtggaaagtttgcgttgagcaccacacattctaccgcctggtttctccggagcagccaccaaaagcaaagttcctaaccctgggctccaaatttaggtatagtggacgaacacaagctcaaacaagacaggccagcacgctgattgaccggcctgcccctcatttcgaaaggactagtagcaaacgcgtatccaggtctctggacggggcaccaataggggtgatggaccaaagtctaatgaaggacttcccaggagctgccggtgagatctcagcatacggcccaggactggtttcaatcgccgtggttcaggatggcgatgggagaagggaagtaaggtcacctaccaaggctccccacctgcagctgatcgaaggcaagcctcccgtcgttaaaacggagatggtgacaatatccgacgcctcccagaggaccgagataagcaccaaagaagtaccaatagtccagacggagacaaaaactatcacctacgaatctccccagatcgacggcggcgctggcggagattctggcactttgctgacggctcagacaattacaagcgagagcgtgtccaccacaacaaccacgcatatcactaagaccgtgaaagggggtatctctgagacacgcattgagaaaagaatcgttattacaggggacggagacatagaccacgaccaggctctcgcgcaggccatcagagaggcccgggaacagcaccctgacatgtcagtcacccgggtcgtggtccataaagagactgagcttgctgaggagggtgaggactag

SEQ ID NO: 330018 - DNA, 2244 bp, Artificial Sequence
  derived and/or modified sequence
atgaccacagaggtgggctctgtgtctgaggtgaagaaggacagcagccagctgggcacagatgccaccaaggagaagcccaaggaggtggccgagaaccagcagaaccagagcagtgaccctgaggaggagaagggcagccagcccccacctgctgctgagagccagagcagcctgcggcggcagaagcgggagaaggagaccagcgagagccggggcatcagccgcttcatccccccctggctgaagaagcagaagagctacaccctggtggtggccaaggatggaggagacaagaaggagcccacccaggccgtggtggaggagcaggtgctggacaaggaggagcccctgcctgaggagcagaggcaggccaagggagatgctgaggagatggcccagaagaagcaggagatcaaggtggaggtgaaggaggagaagcccagcgtgtccaaggaggagaagcccagcgtgtccaaggtggagatgcagcccacagagctggtgtccaaggagcgggaggagaaggtgaaggagacccaggaggacaagctggagggcggggccgccaagcgggagaccaaggaggtgcagaccaatgagctgaaggccgagaaggccagccagaaggtgaccaagaagaccaagacagtgcagtgcaaggtgaccctgctggatggaacagagtacagctgtgacctggagaagcacgccaagggccaggtgctgtttgacaaggtgtgtgagcacctgaacctgctggagaaggactacttcggcctgctcttccaggagagccctgagcagaagaactggctggaccctgccaaggagatcaagaggcagctgaggaacctgccctggctgttcaccttcaacgtgaagttctaccccccagaccccagccagctgacagaggacatcacccgctacttcctgtgcctgcagctgcggcaggacatcgccagcggccgcctgccctgcagctttgtgacccacgccctgctgggcagctacaccctgcaggccgagctgggggactatgaccctgaggagcacggcagcattgacctgtctgagttccagtttgcccccacccagaccaaggagctggaggagaaggtggccgagctgcacaagacccaccggggcctgagccctgcccaggccgacagccagttcctggagaatgccaagaggctgtccatgtatggagtggacctgcaccacgccaaggacagcgagggcgtggacatcaagctgggcgtgtgtgccaacggcctgctgatctacaaggaccggctgcgcatcaacagatttgcctggcccaagatcctgaagatctcctacaagaggagcaacttctacatcaaggtgcggcctgctgagctggagcagtttgagagcaccatcggcttcaagctgcccaaccaccgggccgccaagaggctgtggaaggtgtgtgtggagcaccacaccttctaccgcctggtgtccccagagcagccccccaaggccaagttcctgaccctgggcagcaagttccgctacagcggccgcacccaggcccagacccggcaggccagcaccctgattgacaggcctgccccccactttgagaggaccagcagcaagagggtgagccgcagcctggatggagcccccatcggcgtgatggaccagagcctgatgaaggacttccctggagctgctggggagatcagcgcctacggccctggcctggtgtccattgctgtggtgcaggatggagatggaagaagagaggtgcgcagccccaccaaggccccccacctgcagctgattgagggcaagccccctgtggtgaagacagagatggtgaccatcagtgatgccagccagaggacagagatcagcaccaaggaggtgcccatcgtgcagacagagaccaagaccatcacctatgagagcccccagattgatggaggagctggaggagacagcggcaccctgctgacagcccagaccatcaccagcgagagcgtgtccaccaccaccaccacccacatcaccaagacagtgaagggcggcatcagcgagacccgcatcgagaagagaattgtcatcactggagatggagacatcgaccatgaccaggccctggcccaggccatccgggaggcccgggagcagcacccagacatgtctgtgaccagggtggtggtgcacaaggagacagagctggccgaggagggggaggactag

SEQ ID NO: 330019 - DNA, 2244 bp, Artificial Sequence
  derived and/or modified sequence
atgaccaccgaggtgggcagcgtgagcgaggtgaagaaggacagcagccaacttggcacagacgccaccaaggagaaacctaaagaagtggccgagaatcagcagaatcagtctagtgaccccgaagaggagaaaggtagtcagcctccccccgcggccgaatctcagagcagcctaaggcggcagaaacgcgagaaggaaactagcgaatctaggggcatcagtagatttattccaccatggcttaaaaagcagaagagctacacactggtggtggcaaaggacggaggcgacaagaaggaacccactcaggccgtggtcgaagagcaggtgctcgacaaagaggaacccctgccggaggaacaacgtcaagcaaaaggtgacgcagaagagatggcacaaaagaaacaggaaatcaaagtcgaggtcaaggaggagaaaccctcagttagcaaggaggaaaaaccatccgtctcaaaggtagaaatgcaacccaccgaactggtgtcgaaggagcgggaggagaaagtgaaggagacccaggaggataaactcgaggggggagcagctaagcgggagacaaaggaagttcagactaacgagctcaaagcagaaaaggcatctcagaaagtgaccaagaagactaaaaccgtgcagtgcaaagttactctgttggatggaactgagtattcttgcgacttggagaagcacgccaaagggcaggtactcttcgataaggtatgtgagcacctgaatttgttggaaaaagattattttggactacttttccaggagtccccagaacagaagaactggctagaccccgcgaaggagataaagcgccagttgagaaacctaccctggttgtttacctttaatgtgaagttctatcctccagacccctcgcagttgaccgaggacattactagatatttcttgtgccttcagctcagacaagacatcgcgagcggaaggttaccttgtagcttcgtaactcacgcactacttggatcctatacgctccaggctgagcttggcgactatgacccagaggaacacggttcaattgatctgagcgagtttcagtttgcaccaacacagacaaaagaactggaagagaaggtggcagagttgcacaagacgcaccgcggcctgagtcccgctcaggccgactctcagttcctggaaaatgctaaaaggctgtctatgtatggggtggacctgcaccatgcaaaggattctgaaggcgtggatatcaagttaggagtctgcgcgaatggacttctcatctacaaggatcgtctcaggatcaatagattcgcctggcccaaaatactgaagatttcatataagcgcagcaacttctatattaaagtgaggcccgcagagctggagcagtttgagagtactatcgggtttaagctccctaaccatagagctgccaaacgactttggaaggtgtgcgtcgagcatcatactttttatagactcgtctcgcccgagcagccaccgaaagcaaaattcctgacgctgggttcaaagttcaggtactcaggtcgcacccaagcccaaacaagacaagccagcaccctcatcgacaggcccgcgcctcatttcgagcgcacttcctctaagagagtgagtaggtccctggacggggcccccataggcgttatggaccaaagcctaatgaaagatttccccggggctgccggagaaatctcagcttacggacccggattggtgagcatcgcagtggtgcaggatggtgatggaagacgcgaagtgcggtctccaaccaaagccccccacctgcagctgatcgaaggaaaaccccctgttgtgaagacagagatggtgacaatcagtgatgcctcccaaagaactgaaatctccaccaaagaggtacccattgtgcaaactgagacaaagacgataacatatgaaagcccccaaatcgatggtggcgcggggggggactctggtaccttgctgacagctcagacaattacaagtgaatccgtgagtacaactactaccacccatataacaaagactgtgaaaggaggcatttccgaaacaaggatcgaaaagagaatcgtgatcacaggcgacggggacatcgaccatgatcaggctctggcccaagcaatccgggaagcaagagagcagcatccggacatgagtgtgaccagggttgtggtacacaaagaaacggagttagccgaagaaggcgaagattag

SEQ ID NO: 330020 - DNA, 2244 bp, Artificial Sequence
  derived and/or modified sequence
atgaccaccgaggtgggcagcgtgagcgaggtgaagaaggacagctcacaactcggaaccgatgccacaaaagagaaacctaaggaggtagcagaaaaccaacagaatcagagctcagatcccgaagaagagaaggggtctcagccaccgcctgccgcggagtctcagtctagcctgaggagacagaaaagagagaaggagacaagcgagtcgcgcggaatctctcgcttcattccgccctggcttaagaagcagaagtcatatacacttgtggtggcaaaggatggtggcgacaaaaaggaaccaacccaggctgtggtagaggaacaggttctggacaaggaagaaccgctgccagaagaacagagacaggctaagggggacgctgaagaaatggctcagaagaagcaggagattaaagtggaggtgaaagaggaaaagccatccgtgtctaaagaggagaagcctagtgtgagcaaagtggaaatgcaacctactgagctcgtgtcgaaagaacgtgaggagaaagtgaaagaaacacaggaggataagctggaaggcggcgccgctaagagggaaaccaaagaggtgcaaaccaatgagctcaaggctgaaaaggcatcccaaaaggttacgaaaaagactaagaccgtgcagtgtaaggtgaccctgctggacggcactgaatactcctgcgatttagagaaacacgctaaagggcaggtcctgtttgataaggtctgcgagcacctgaacttgcttgagaaagactacttcggactcctcttccaggaatctcctgaacaaaagaactggcttgaccccgctaaagagataaaacgtcagcttcgaaacttgccctggttgtttacctttaacgtgaaattctaccctccggatccgagccagttaactgaggacatcaccaggtacttcctttgtttacagctccggcaagatattgccagtgggcgcctaccttgcagttttgtgacgcacgcactgttaggttcctacacccttcaagccgaactgggcgattacgaccccgaggaacatgggtccatcgatctaagcgagttccagtttgcgcctacacagactaaggagttagaggagaaggtggcggaactacacaagactcaccgcggcctgagccccgcacaagccgactctcagtttctcgaaaatgccaagaggttgtccatgtatggcgtcgatctgcaccacgctaaggattctgaaggtgtcgacattaaactgggcgtgtgtgccaatggcctcctgatttacaaggaccggttaagaattaatagattcgcttggccaaaaatcctcaagattagttataagaggtctaacttctatatcaaggtgaggcccgccgagttggagcagttcgaatcaactatcggctttaagctccctaatcaccgcgctgcgaagagattgtggaaagtgtgtgttgagcaccacaccttctatcggctggtcagtcctgaacaacctcctaaagccaaattcctaaccctgggttccaaattcaggtatagtggccggacccaagcccagacgcggcaggccagcaccttgatcgatcgtccagctccccattttgaaagaacatcctccaagcgggtcagtagatccctggacggcgcgcctattggagtgatggatcaatcactgatgaaggactttcccggggcagccggggagattagtgcctacgggcctggcctcgtctctatcgccgtagtccaggatggggacggtagaagagaagtgagaagtccaaccaaagcgccacacttgcagctgattgaagggaaaccgccagtggtgaagactgaaatggtgacaatcagcgatgcatctcagcggactgagatatcgaccaaagaagtcccaatcgtgcaaacagaaaccaaaaccataacatacgagagcccccaaattgatggcggtgcaggcggcgattccgggacactcctcacagcgcaaacaatcacgtccgagtctgtatccacgactaccaccacacatattactaagacggttaaagggggcattagcgagactcgaatcgaaaaacgcatcgttatcacgggcgacggagacatcgatcacgaccaagcactcgcacaggccattcgggaggcgcgggagcagcacccagacatgtcagtgactagggtcgtggtccacaaggaaacagaactcgcagaagagggggaggactag

SEQ ID NO: 330021 - DNA, 2244 bp, Artificial Sequence
  derived and/or modified sequence
atgactactgaggtgggctccgtgtccgaggtgaaaaaggattccagccagctgggtaccgatgccaccaaggagaagcccaaagaagtggctgaaaatcagcagaaccagtcctccgatcctgaggaggaaaaaggaagtcagccgcctccagctgccgagtctcaatccagccttcgaagacagaagcgggagaaggaaacttcagagtccagaggaattagcaggtttatccccccatggttgaagaagcagaaatcctatacgctggtcgtggccaaagacggcggtgacaaaaaagaaccaacccaggcagtggtggaggagcaggtcctggataaggaggaaccgctccccgaagaacagagacaggccaaaggtgacgccgaggagatggcacagaagaagcaggaaatcaaagtggaagttaaagaggagaaacccagcgtctctaaggaggagaaaccatccgtgtctaaagtggaaatgcaacccacagaactcgtgagtaaggaacgggaggagaaggtcaaagagacacaggaagataagctggagggcggtgccgctaaaagagagaccaaggaggtgcaaactaatgagttaaaggccgagaaggctagccagaaagtgacaaaaaagactaagactgttcagtgcaaagtaacgttgctcgacggcacagagtattcctgtgacctagagaagcatgccaaggggcaagtgttatttgacaaggtatgcgagcatctcaacttacttgaaaaggattactttggcctcctttttcaagagagcccagagcagaagaactggctcgatccagccaaggagatcaagagacagctcagaaatctgccgtggctgttcaccttcaacgtgaaattttacccccctgacccctctcagctcaccgaagacattacacgatacttcctgtgtctccaactgcgccaagacatcgcttcaggccgtctcccctgttcctttgtcacccatgcattgcttggctcgtacaccctccaggccgagcttggcgactacgaccccgaagagcacggatcaattgacctgtcagagttccaattcgcaccaacccaaaccaaggagctggaagagaaagtcgcggagcttcacaagacccaccgcggactgagccccgctcaggccgattcacagttcctcgaaaatgctaagcgcctctcgatgtacggtgtcgacctgcatcacgcgaaggatagcgagggtgtagacattaagttgggtgtctgcgctaatggcttgctgatctacaaagaccgcctgcgcattaaccggtttgcctggccgaaaattctgaaaatctcttataagcgcagcaacttctacatcaaagtcaggccagcggagctggagcaattcgagagtacgataggtttcaaactcccaaaccaccgagccgcaaagcgtctgtggaaggtctgtgtagagcaccacaccttctatcgcttagtctctcctgaacagcctcccaaagcgaagtttctcacgctcggcagtaaatttcgatattctggcaggacccaggcccagaccaggcaagcctcgaccctcattgataggccagcaccacacttcgaaagaacttcttctaagagggtcagcaggtcattggacggcgctcctattggagtgatggatcagtctcttatgaaagattttccgggagccgcaggcgaaattagcgcttatggccctggtcttgtaagtatagcagttgtgcaggatggggacggaagaagggaggtcaggagcccaaccaaagcgccacatctgcagctgattgagggtaagccacccgtcgtaaaaactgaaatggtgacaatttcggatgccagccaacgcaccgaaatatctactaaagaggtcccgatagtgcagacagagaccaagaccatcacatatgagtcaccgcaaatagacggcggagctggtggtgacagtggaactctgctcaccgcacagactataaccagcgagtcggtctccacaacgacaacgacccatatcacaaaaaccgtgaaagggggtataagtgaaacccggattgaaaaacgaatcgtgattaccggggacggagacatcgaccatgaccaagctctggctcaggccattcgagaggcccgagaacagcacccagacatgtcagtgacccgggtggtggtccacaaggagactgaactggcagaagaaggggaggattag

SEQ ID NO: 330022 - DNA, 2244 bp, Artificial Sequence
  derived and/or modified sequence
atgaccactgaggttggtagtgtttcagaggtgaaaaaagattccagccagctgggaacagacgccacaaaagaaaagcctaaagaggttgcagaaaaccaacagaaccagagcagtgacccagaagaggaaaaaggaagccagccgccacccgctgccgagagccagtcttccctacgacggcagaagagggagaaagaaacctccgaatctagagggattagcagatttatccctccctggctcaagaagcagaaaagttacacactcgtcgtcgcaaaagatggtggcgataaaaaggaacccactcaggctgtagtggaagagcaggttctggataaggaggagcccctgcccgaagaacagagacaagctaaaggtgatgccgaagagatggcccagaagaagcaggagatcaaggtagaggtgaaggaggagaagcccagcgtaagcaaggaggaaaagccatctgtttcaaaggttgaaatgcagccaaccgagttggtgagcaaagaaagagaggaaaaggtgaaagagacccaagaagacaaactcgagggaggtgctgccaagagggagaccaaggaagttcagaccaatgagctcaaggcagaaaaagcctcgcaaaaggtgacaaagaagacaaagaccgtgcagtgtaaagtgaccctcttagatggtaccgagtattcctgcgatttagagaagcacgccaaaggccaagtactgttcgacaaagtttgcgaacatctgaacctgttagaaaaagactattttggcctgctgttccaagaaagccccgaacagaaaaactggttagaccccgctaaggaaatcaaacgacagctgaggaatttgccttggctcttcacgttcaacgttaagttctatcctcctgatccaagccagcttacggaagatatcactcggtactttttgtgtctgcagctccgccaggatatcgcgtccggaagactgccatgcagttttgtgacccacgctctgttaggaagctacacgctgcaggccgagctgggggattatgaccccgaggaacacgggtctatcgatctatccgaatttcaatttgcccctacacaaaccaaagagctcgaggagaaagtggcggaacttcacaaaacccacagaggtttaagtcccgcacaggccgactcacagtttcttgaaaacgcaaagcggctctccatgtacggtgttgatctgcaccatgctaaggacagtgagggggtcgacatcaaactgggagtgtgtgccaatggcctgttaatatataaggaccgcctcagaattaaccggttcgcttggccgaagatcctgaaaatatcttacaaaagaagcaacttttacattaaggttcgccctgccgagctcgagcagttcgaatctaccatcgggtttaaactccccaatcacagagctgccaagaggctgtggaaagtgtgtgtggagcaccataccttctatcgcctcgtgagtcctgagcagccaccaaaggctaaattcttgacattagggtctaaatttcgatattctggccgaacccaggcgcaaacgagacaggcctctacactaatcgaccgcccagcgcctcatttcgagcgtacctcatcaaagagagtgtcacggagccttgacggagcccctattggagttatggatcagtccctgatgaaagatttcccaggtgcagcaggcgagatttctgcatacggtcccggtttagtcagtattgctgtggtccaggatggggacggtaggcgtgaggtccgcagtcctacaaaggctcctcacctccaattgatagaggggaaaccgcctgtggtgaaaacggagatggttacgatcagcgacgcctcgcagaggaccgagatctccaccaaggaggtccctattgtgcagactgaaaccaaaaccattacgtatgagtccccacagatcgacggcggagctggaggagatagtgggactttgcttactgcgcaaaccataacctccgaatccgtctctacgacaaccactacccacattacaaaaacggtgaaaggtggcatctctgaaacgagaattgaaaagaggattgtcataaccggcgatggtgacatcgatcatgatcaggctcttgcacaggccatcagggaagcacgggagcagcaccccgatatgtcagtgacgagggttgtggtccataaagagaccgaattggctgaggaaggcgaggactag

SEQ ID NO: 330023 - DNA, 2244 bp, Artificial Sequence
  derived and/or modified sequence
atgaccaccgaggtgggcagcgtgagcgaggtgaagaaggacagcagccagctgggcaccgacgccaccaaggagaagcccaaggaggtggccgagaaccagcagaaccagagcagcgaccccgaggaggagaagggcagccagcccccccccgccgccgagagccagagcagcctgagaagacagaagagagagaaggagaccagcgagagcagaggcatcagcagattcatccccccctggctgaagaagcagaagagctacaccctggtggtggccaaggacggcggcgacaagaaggagcccacccaggccgtggtggaggagcaggtgctggacaaggaggagcccctgcccgaggagcagagacaggccaagggcgacgccgaggagatggcccagaagaagcaggagatcaaggtggaggtgaaggaggagaagcccagcgtgagcaaggaggagaagcccagcgtgagcaaggtggagatgcagcccaccgagctggtgagcaaggagagagaggagaaggtgaaggagacccaggaggacaagctggagggcggcgccgccaagagagagaccaaggaggtgcagaccaacgagctgaaggccgagaaggccagccagaaggtgaccaagaagaccaagaccgtgcagtgcaaggtgaccctgctggacggcaccgagtacagctgcgacctggagaagcacgccaagggccaggtgctgttcgacaaggtgtgcgagcacctgaacctgctggagaaggactacttcggcctgctgttccaggagagccccgagcagaagaactggctggaccccgccaaggagatcaagagacagctgagaaacctgccctggctgttcaccttcaacgtgaagttctacccccccgaccccagccagctgaccgaggacatcaccagatacttcctgtgcctgcagctgagacaggacatcgccagcggcagactgccctgcagcttcgtgacccacgccctgctgggcagctacaccctgcaggccgagctgggcgactacgaccccgaggagcacggcagcatcgacctgagcgagttccagttcgcccccacccagaccaaggagctggaggagaaggtggccgagctgcacaagacccacagaggcctgagccccgcccaggccgacagccagttcctggagaacgccaagagactgagcatgtacggcgtggacctgcaccacgccaaggacagcgagggcgtggacatcaagctgggcgtgtgcgccaacggcctgctgatctacaaggacagactgagaatcaacagattcgcctggcccaagatcctgaagatcagctacaagagaagcaacttctacatcaaggtgagacccgccgagctggagcagttcgagagcaccatcggcttcaagctgcccaaccacagagccgccaagagactgtggaaggtgtgcgtggagcaccacaccttctacagactggtgagccccgagcagccccccaaggccaagttcctgaccctgggcagcaagttcagatacagcggcagaacccaggcccagaccagacaggccagcaccctgatcgacagacccgccccccacttcgagagaaccagcagcaagagagtgagcagaagcctggacggcgcccccatcggcgtgatggaccagagcctgatgaaggacttccccggcgccgccggcgagatcagcgcctacggccccggcctggtgagcatcgccgtggtgcaggacggcgacggcagaagagaggtgagaagccccaccaaggccccccacctgcagctgatcgagggcaagccccccgtggtgaagaccgagatggtgaccatcagcgacgccagccagagaaccgagatcagcaccaaggaggtgcccatcgtgcagaccgagaccaagaccatcacctacgagagcccccagatcgacggcggcgccggcggcgacagcggcaccctgctgaccgcccagaccatcaccagcgagagcgtgagcaccaccaccaccacccacatcaccaagaccgtgaagggcggcatcagcgagaccagaatcgagaagagaatcgtgatcaccggcgacggcgacatcgaccacgaccaggccctggcccaggccatcagagaggccagagagcagcaccccgacatgagcgtgaccagagtggtggtgcacaaggagaccgagctggccgaggagggcgaggactag

SEQ ID NO: 330024 - DNA, 3677 bp, Artificial Sequence
  derived and/or modified sequence
ccgcgagggggcggggccggccctcagagtcctctgacggccccagtcagggaatttcaatttgaaacctagcggagggaggaggcaggcgcggctgccggcggctgggactgaagagggacgggtcccgcggcgagcgagctcctgaggtacggcgtcgggcataagctgtggccatgactactgaagtaggctctgtgtctgaagtgaagaaggactctagccagttaggaacagatgcaaccaaggaaaaacctaaagaagtagcagaaaatcagcagaatcagtcttccgatccagaggaggaaaaaggttcccagccacctcctgcagctgaaagccaaagtagtctacgccgccagaagagagagaaggaaacatcggagagcaggggtatttctcggttcataccgccatggcttaagaagcaaaagtcatataccttagtagtggccaaagatggaggagataaaaaagagcctacccaagctgttgttgaagaacaggtcttagataaagaggaaccccttccagaagaacagagacaggctaagggtgatgctgaagaaatggctcagaagaaacaagagattaaagttgaagtcaaggaagaaaaaccctcagtgagcaaggaagaaaaaccctcagtgagcaaagtggagatgcagcctactgaattagtaagtaaggagagagaagagaaggtaaaagaaacacaggaagacaaattagaaggaggagcagcaaaaagggagaccaaggaagtgcagaccaatgagctgaaagcagagaaggcatctcaaaaagtcaccaagaagaccaaaactgtccagtgtaaagtgaccctcttagatggcaccgaatacagctgtgacctggagaaacatgccaagggacaagtgttatttgacaaagtgtgtgaacacctcaatctcttggagaaagactactttggacttttgtttcaggaaagccctgagcagaaaaactggttagatcctgctaaagaaataaagagacaactgagaaaccttccatggctattcacttttaatgtgaagttttatcctcctgatccttctcaattgactgaagatatcaccagatacttcttgtgccttcagctccggcaggacattgcctctggccgcctgccctgctcttttgtgactcatgctctcctgggatcctacaccctgcaggctgaacttggtgactatgacccagaagaacatggcagcatcgacctcagtgaattccagtttgcccctactcagactaaggagctggaagagaaggtggcagagctgcacaaaacccacaggggcttatcgccagcacaagctgattcccagttcttagaaaatgcaaagaggctttccatgtatggtgttgacctacatcatgccaaggactcagaaggtgtggacatcaagctgggcgtgtgtgctaatggacttctcatttacaaagacagactgcgaatcaatcgttttgcttggccgaaaatcttaaaaatttcctataaacgcagtaacttctacattaaagtcagaccggcagagctggaacagtttgagagtaccattggattcaaactgccaaaccaccgggcagcgaaaagactatggaaagtgtgcgtggagcatcatactttctacaggcttgtttctccagagcagccaccaaaagccaagttcctgaccttggggtccaaatttcgctatagtggccgcacccaagcacagacccgccaggccagcaccctcatagataggccagcaccacactttgagcgcacttctagtaaacgggtctccaggagtctagatggagctccgattggtgtcatggaccaaagtcttatgaaggattttcctggcgctgctggggagatttcagcctatggacctggacttgtcagcattgccgtggtacaagatggggacggcaggagggaagtgagaagcccaactaaagccccacatttgcagctcattgaaggaaagccaccagtggtaaaaacagagatggtaacaatttctgatgcctcacaaaggacagaaatctccaccaaggaagtccccattgtccaaactgagaccaaaaccatcacatatgagtctccacagattgatggcggggctggtggtgattcgggcacgttactgaccgcacaaaccatcacatctgagtccgtgtcaacaacgacaaccacacacatcaccaagactgtaaaaggtggaatttctgaaacaagaattgagaaacgcattgtgatcacaggagatggagatattgatcatgaccaggcactggctcaggcgatcagggaagccagagagcagcaccctgacatgtcggtcacaagagtggtggtacacaaagaaacagagttggctgaggaaggggaagattaagtaagaaagtcattttttaaacaacactcaactttgtgaacccctgaagattttttgaccgttccaagtcttaatgccacaccactattccagcgaatttatgctacaactggtaacaatgaccagaagcctgaagaattaaaatgccaacaccaaacctttccttaccagctctggtctatattgctcccatgcatttaatatattattttgttttataaccacttctaaatattctcagttctttctttttgttgttgttaattaaggggttttggttttgttttctgtttactttgtgtgcaactacctgcttttaatgactcactttgatcaaatgacagtgaacaaagccagcccaagctggtaaggtgctgttcacttgaacaggtgctgttgcgcagaaaggaaactctgtgactaatttagatagtggctttccttcttctggattcttttcattgaattctcacagtaaatatttacggagttttcaaattgcagcaaatatactgtatgagaaaatattaatacagattaaaagcctttcttacatcttgaaaattttctaatatttgagaatttcacagggatgttttttatattggacccttttgactttccagtcctgtgactttctacttttagtagagagtcagaatctctggactggagaataatgaagaagttcactgactgtgcactgtgcttagagaccctgccgcaccacagtgccaatgcttgtcagacacatgcccttcggcagcattccagaacaggagggaagagaaagagaaaactttcttcccttctactaaaagattcaggcagcttaaaaccttagtgctttctttcttaacatacccacatttcaattctttccattatttgaacacttgggtagaactcttgctttgtattaaacctctttgtctacacatgtaaaacttaccttttgttattgagcaggcctatctctttcagatagttttatgattcacacaggtttgaggatgctggggagagggggagggggctgtggtggtgttctgttggttacaagaaagttataccatttaaagctggcaccagagacccgatagggacttattaactatattgaacattttttcctttgcctttgaccctatgtatagttacgatgccagattagatttatagcagcctcaagttgtattaaatgatattttgcttcctgtaatactattataaaataaagtttgtttattctctaaa

SEQ ID NO: 330025 - DNA, 3663 bp, Artificial Sequence
  derived and/or modified sequence
actgtacttaaggcgtttatcctaatccaggcgtccttggattgcacggtgccagcaagcaaggtggtaacagtgatcacagcctgggctgcaggtgtgagttctgaggagatctatggtttacccagcgaatttattactgataaatcataagctgtggccatgactactgaagtaggctctgtgtctgaagtgaagaaggactctagccagttaggaacagatgcaaccaaggaaaaacctaaagaagtagcagaaaatcagcagaatcagtcttccgatccagaggaggaaaaaggttcccagccacctcctgcagctgaaagccaaagtagtctacgccgccagaagagagagaaggaaacatcggagagcaggggtatttctcggttcataccgccatggcttaagaagcaaaagtcatataccttagtagtggccaaagatggaggagataaaaaagagcctacccaagctgttgttgaagaacaggtcttagataaagaggaaccccttccagaagaacagagacaggctaagggtgatgctgaagaaatggctcagaagaaacaagagattaaagttgaagtcaaggaagaaaaaccctcagtgagcaaggaagaaaaaccctcagtgagcaaagtggagatgcagcctactgaattagtaagtaaggagagagaagagaaggtaaaagaaacacaggaagacaaattagaaggaggagcagcaaaaagggagaccaaggaagtgcagaccaatgagctgaaagcagagaaggcatctcaaaaagtcaccaagaagaccaaaactgtccagtgtaaagtgaccctcttagatggcaccgaatacagctgtgacctggagaaacatgccaagggacaagtgttatttgacaaagtgtgtgaacacctcaatctcttggagaaagactactttggacttttgtttcaggaaagccctgagcagaaaaactggttagatcctgctaaagaaataaagagacaactgagaaaccttccatggctattcacttttaatgtgaagttttatcctcctgatccttctcaattgactgaagatatcaccagatacttcttgtgccttcagctccggcaggacattgcctctggccgcctgccctgctcttttgtgactcatgctctcctgggatcctacaccctgcaggctgaacttggtgactatgacccagaagaacatggcagcatcgacctcagtgaattccagtttgcccctactcagactaaggagctggaagagaaggtggcagagctgcacaaaacccacaggggcttatcgccagcacaagctgattcccagttcttagaaaatgcaaagaggctttccatgtatggtgttgacctacatcatgccaaggactcagaaggtgtggacatcaagctgggcgtgtgtgctaatggacttctcatttacaaagacagactgcgaatcaatcgttttgcttggccgaaaatcttaaaaatttcctataaacgcagtaacttctacattaaagtcagaccggcagagctggaacagtttgagagtaccattggattcaaactgccaaaccaccgggcagcgaaaagactatggaaagtgtgcgtggagcatcatactttctacaggcttgtttctccagagcagccaccaaaagccaagttcctgaccttggggtccaaatttcgctatagtggccgcacccaagcacagacccgccaggccagcaccctcatagataggccagcaccacactttgagcgcacttctagtaaacgggtctccaggagtctagatggagctccgattggtgtcatggaccaaagtcttatgaaggattttcctggcgctgctggggagatttcagcctatggacctggacttgtcagcattgccgtggtacaagatggggacggcaggagggaagtgagaagcccaactaaagccccacatttgcagctcattgaaggaaagccaccagtggtaaaaacagagatggtaacaatttctgatgcctcacaaaggacagaaatctccaccaaggaagtccccattgtccaaactgagaccaaaaccatcacatatgagtctccacagattgatggcggggctggtggtgattcgggcacgttactgaccgcacaaaccatcacatctgagtccgtgtcaacaacgacaaccacacacatcaccaagactgtaaaaggtggaatttctgaaacaagaattgagaaacgcattgtgatcacaggagatggagatattgatcatgaccaggcactggctcaggcgatcagggaagccagagagcagcaccctgacatgtcggtcacaagagtggtggtacacaaagaaacagagttggctgaggaaggggaagattaagtaagaaagtcattttttaaacaacactcaactttgtgaacccctgaagattttttgaccgttccaagtcttaatgccacaccactattccagcgaatttatgctacaactggtaacaatgaccagaagcctgaagaattaaaatgccaacaccaaacctttccttaccagctctggtctatattgctcccatgcatttaatatattattttgttttataaccacttctaaatattctcagttctttctttttgttgttgttaattaaggggttttggttttgttttctgtttactttgtgtgcaactacctgcttttaatgactcactttgatcaaatgacagtgaacaaagccagcccaagctggtaaggtgctgttcacttgaacaggtgctgttgcgcagaaaggaaactctgtgactaatttagatagtggctttccttcttctggattcttttcattgaattctcacagtaaatatttacggagttttcaaattgcagcaaatatactgtatgagaaaatattaatacagattaaaagcctttcttacatcttgaaaattttctaatatttgagaatttcacagggatgttttttatattggacccttttgactttccagtcctgtgactttctacttttagtagagagtcagaatctctggactggagaataatgaagaagttcactgactgtgcactgtgcttagagaccctgccgcaccacagtgccaatgcttgtcagacacatgcccttcggcagcattccagaacaggagggaagagaaagagaaaactttcttcccttctactaaaagattcaggcagcttaaaaccttagtgctttctttcttaacatacccacatttcaattctttccattatttgaacacttgggtagaactcttgctttgtattaaacctctttgtctacacatgtaaaacttaccttttgttattgagcaggcctatctctttcagatagttttatgattcacacaggtttgaggatgctggggagagggggagggggctgtggtggtgttctgttggttacaagaaagttataccatttaaagctggcaccagagacccgatagggacttattaactatattgaacattttttcctttgcctttgaccctatgtatagttacgatgccagattagatttatagcagcctcaagttgtattaaatgatattttgcttcctgtaatactattataaaataaagtttgtttattctctaaa

SEQ ID NO: 330026 - protein, 595 aa, Artificial Sequence [sequence omitted]

SEQ ID NO: 330027 - protein, 182 aa, Artificial Sequence
  derived and/or modified sequence
MESAKETRYCAVCNDYASGYHYGVWSCEGCKAFFKRSIQGHNDYMCPATNQCTIDKNRRKSCQACRLRKCYEVGMMKGGIRKDRRGGRMLKHKLLLILSHIRHMSNKGMEHLYSMKCKNVVPLYDLLLEMLDAHRLHAPTSRGGASVEETDQSHLATAGSTSSHSLQKYYITGEAEGFPATV

SEQ ID NO: 330028 - protein, 388 aa, Artificial Sequence
  derived and/or modified sequence
  misc_feature (1)..(1): Xaa can be any naturally occurring amino acid
XLKIISCQPSDKPVPPGENAPEWRAGQPGSAPRSHCGRSAAGPGHRRPLCDFNGEGPNSDNRRQGGRERLASTNDKGSMAMESAKETRYCAVCNDYASGYHYGVWSCEGCKAFFKRSIQGHNDYMCPATNQCTIDKNRRKSCQACRLRKCYEVGMMKGGIRKDRRGGRMLKHKRQRDDGEGRGEVGSAGDMRAANLWPSPLMIKRSKKNSLALSLTADQMVSALLDAEPPILYSEYDPTRPFSEASMMGLLTNLADRELVHMINWAKRVPGFVDLTLHDQVHLLECAWLEILMIGLVWRSMEHPGKLLFAPNLLLDRNQGKCVEGMVEIFDMLLATSSRFRMMNLQGEEFVCLKSIILLNSGISHVEAKKRILNLHPKIFGNKWFPRV

SEQ ID NO: 330029 - protein, 523 aa, Artificial Sequence
  derived and/or modified sequence
MTMTLHTKASGMALLHQIQGNELEPPPLNSVSPSPLMLLHPPPQLSPFLQPHGQQVPYYLENEPSGYTVREAGPPAFYRPNSDNRRQGGRERLASTNDKGSMAMESAKETRYCAVCNDYASGYHYGVWSCEGCKAFFKRSIQGHNDYMCPATNQCTIDKNRRKSCQACRLRKCYEVGMMKGGIRKDRRGGRMLKHKRQRDDGEGRGEVGSAGDMRAANLWPSPLMIKRSKKNSLALSLTADQMVSALLDAEPPILYSEYDPTRPFSEASMMGLLTNLADRELVHMINWAKRVPGFVDLTLHDQVHLLECAWLEILMIGLVWRSMEHPGKLLFAPNLLLDRNQGKCVEGMVEIFDMLLATSSRFRMMNLQGEEFVCLKSIILLNSGVYTFLSSTLKSLEEKDHIHRVLDKITDTLIHLMAKAGLTLQQQHQRLAQLLLILSHIRHMSNKGMEHLYSMKCKNVVPLYDLLLEMLDAHRLHAPTSRGGASVEETDQSHLATAGSTSSHSLQKYYITGEAEGFPATV

SEQ ID NO: 330030 - protein, 483 aa, Artificial Sequence
  derived and/or modified sequence
MTMTLHTKASGMALLHQIQGNELEPLNRPQLKIPLERPLGEVYLDSSKPAVYNYPEGAAYEFNAAAAANAQVYGQTGLPYGPGSEAAAFGSNGLGGFPPLNSVSPSPLMLLHPPPQLSPFLQPHGQQVPYYLENEPSGYTVREAGPPAFYRPNSDNRRQGGRERLASTNDKGSMAMESAKETRYCAVCNDYASGYHYGVWSCEGCKAFFKRSIQGHNDYMCPATNQCTIDKNRRKSCQACRLRKCYEVGMMKGGFVDLTLHDQVHLLECAWLEILMIGLVWRSMEHPGKLLFAPNLLLDRNQGKCVEGMVEIFDMLLATSSRFRMMNLQGEEFVCLKSIILLNSGVYTFLSSTLKSLEEKDHIHRVLDKITDTLIHLMAKAGLTLQQQHQRLAQLLLILSHIRHMSNKGMEHLYSMKCKNVVPLYDLLLEMLDAHRLHAPTSRGGASVEETDQSHLATAGSTSSHSLQKYYITGEAEGFPATV

SEQ ID NO: 330031 - protein, 310 aa, Artificial Sequence
  derived and/or modified sequence
MAMESAKETRYCAVCNDYASGYHYGVWSCEGCKAFFKRSIQGHNDYMCPATNQCTIDKNRRKSCQACRLRKCYEVGMMKGGIRKDRRGGRMLKHKRQRDDGEGRGEVGSAGDMRAANLWPSPLMIKRSKKNSLALSLTADQMVSALLDAEPPILYSEYDPTRPFSEASMMGLLTNLADRELVHMINWAKRVPGFVDLTLHDQVHLLECAWLEILMIGLVWRSMEHPGKLLFAPNLLLDRNQGKCVEGMVEIFDMLLATSSRFRMMNLQGEEFVCLKSIILLNSGISHVEAKKRILNLHPKIFGNKWFPRV

SEQ ID NO: 330032 - DNA, 6330 bp, Artificial Sequence
  derived and/or modified sequence
aggagctggcggagggcgttcgtcctgggactgcacttgctcccgtcgggtcgcccggcttcaccggacccgcaggctcccggggcagggccggggccagagctcgcgtgtcggcgggacatgcgctgcgtcgcctctaacctcgggctgtgctctttttccaggtggcccgccggtttctgagccttctgccctgcggggacacggtctgcaccctgcccgcggccacggaccatgaccatgaccctccacaccaaagcatctgggatggccctactgcatcagatccaagggaacgagctggagcccctgaaccgtccgcagctcaagatccccctggagcggcccctgggcgaggtgtacctggacagcagcaagcccgccgtgtacaactaccccgagggcgccgcctacgagttcaacgccgcggccgccgccaacgcgcaggtctacggtcagaccggcctcccctacggccccgggtctgaggctgcggcgttcggctccaacggcctggggggtttccccccactcaacagcgtgtctccgagcccgctgatgctactgcacccgccgccgcagctgtcgcctttcctgcagccccacggccagcaggtgccctactacctggagaacgagcccagcggctacacggtgcgcgaggccggcccgccggcattctacaggccaaattcagataatcgacgccagggtggcagagaaagattggccagtaccaatgacaagggaagtatggctatggaatctgccaaggagactcgctactgtgcagtgtgcaatgactatgcttcaggctaccattatggagtctggtcctgtgagggctgcaaggccttcttcaagagaagtattcaaggacataacgactatatgtgtccagccaccaaccagtgcaccattgataaaaacaggaggaagagctgccaggcctgccggctccgcaaatgctacgaagtgggaatgatgaaaggtgggatacgaaaagaccgaagaggagggagaatgttgaaacacaagcgccagagagatgatggggagggcaggggtgaagtggggtctgctggagacatgagagctgccaacctttggccaagcccgctcatgatcaaacgctctaagaagaacagcctggccttgtccctgacggccgaccagatggtcagtgccttgttggatgctgagccccccatactctattccgagtatgatcctaccagacccttcagtgaagcttcgatgatgggcttactgaccaacctggcagacagggagctggttcacatgatcaactgggcgaagagggtgccaggctttgtggatttgaccctccatgatcaggtccaccttctagaatgtgcctggctagagatcctgatgattggtctcgtctggcgctccatggagcacccagggaagctactgtttgctcctaacttgctcttggacaggaaccagggaaaatgtgtagagggcatggtggagatcttcgacatgctgctggctacatcatctcggttccgcatgatgaatctgcagggagaggagtttgtgtgcctcaaatctattattttgcttaattctggagtgtacacatttctgtccagcaccctgaagtctctggaagagaaggaccatatccaccgagtcctggacaagatcacagacactttgatccacctgatggccaaggcaggcctgaccctgcagcagcagcaccagcggctggcccagctcctcctcatcctctcccacatcaggcacatgagtaacaaaggcatggagcatctgtacagcatgaagtgcaagaacgtggtgcccctctatgacctgctgctggagatgctggacgcccaccgcctacatgcgcccactagccgtggaggggcatccgtggaggagacggaccaaagccacttggccactgcgggctctacttcatcgcattccttgcaaaagtattacatcacgggggaggcagagggtttccctgccacggtctgagagctccctggctcccacacggttcagataatccctgctgcattttaccctcatcatgcaccactttagccaaattctgtctcctgcatacactccggcatgcatccaacaccaatggctttctagatgagtggccattcatttgcttgctcagttcttagtggcacatcttctgtcttctgttgggaacagccaaagggattccaaggctaaatctttgtaacagctctctttcccccttgctatgttactaagcgtgaggattcccgtagctcttcacagctgaactcagtctatgggttggggctcagataactctgtgcatttaagctacttgtagagacccaggcctggagagtagacattttgcctctgataagcactttttaaatggctctaagaataagccacagcaaagaatttaaagtggctcctttaattggtgacttggagaaagctaggtcaagggtttattatagcaccctcttgtattcctatggcaatgcatccttttatgaaagtggtacaccttaaagcttttatatgactgtagcagagtatctggtgattgtcaattcattccccctataggaatacaaggggcacacagggaaggcagatcccctagttggcaagactattttaacttgatacactgcagattcagatgtgctgaaagctctgcctctggctttccggtcatgggttccagttaattcatgcctcccatggacctatggagagcagcaagttgatcttagttaagtctccctatatgagggataagttcctgatttttgtttttatttttgtgttacaaaagaaagccctccctccctgaacttgcagtaaggtcagcttcaggacctgttccagtgggcactgtacttggatcttcccggcgtgtgtgtgccttacacaggggtgaactgttcactgtggtgatgcatgatgagggtaaatggtagttgaaaggagcaggggccctggtgttgcatttagccctggggcatggagctgaacagtacttgtgcaggattgttgtggctactagagaacaagagggaaagtagggcagaaactggatacagttctgaggcacagccagacttgctcagggtggccctgccacaggctgcagctacctaggaacattccttgcagaccccgcattgccctttgggggtgccctgggatccctggggtagtccagctcttcttcatttcccagcgtggccctggttggaagaagcagctgtcacagctgctgtagacagctgtgttcctacaattggcccagcaccctggggcacgggagaagggtggggaccgttgctgtcactactcaggctgactggggcctggtcagattacgtatgcccttggtggtttagagataatccaaaatcagggtttggtttggggaagaaaatcctcccccttcctcccccgccccgttccctaccgcctccactcctgccagctcatttccttcaatttcctttgacctataggctaaaaaagaaaggctcattccagccacagggcagccttccctgggcctttgcttctctagcacaattatgggttacttcctttttcttaacaaaaaagaatgtttgatttcctctgggtgaccttattgtctgtaattgaaaccctattgagaggtgatgtctgtgttagccaatgacccaggtgagctgctcgggcttctcttggtatgtcttgtttggaaaagtggatttcattcatttctgattgtccagttaagtgatcaccaaaggactgagaatctgggagggcaaaaaaaaaaaaaaagtttttatgtgcacttaaatttggggacaattttatgtatctgtgttaaggatatgtttaagaacataattcttttgttgctgtttgtttaagaagcaccttagtttgtttaagaagcaccttatatagtataatatatatttttttgaaattacattgcttgtttatcagacaattgaatgtagtaattctgttctggatttaatttgactgggttaacatgcaaaaaccaaggaaaaatatttagtttttttttttttttttgtatacttttcaagctaccttgtcatgtatacagtcatttatgcctaaagcctggtgattattcatttaaatgaagatcacatttcatatcaacttttgtatccacagtagacaaaatagcactaatccagatgcctattgttggatactgaatgacagacaatcttatgtagcaaagattatgcctgaaaaggaaaattattcagggcagctaattttgcttttaccaaaatatcagtagtaatatttttggacagtagctaatgggtcagtgggttctttttaatgtttatacttagattttcttttaaaaaaattaaaataaaacaaaaaaaaatttctaggactagacgatgtaataccagctaaagccaaacaattatacagtggaaggttttacattattcatccaatgtgtttctattcatgttaagatactactacatttgaagtgggcagagaacatcagatgattgaaatgttcgcccaggggtctccagcaactttggaaatctctttgtatttttacttgaagtgccactaatggacagcagatattttctggctgatgttggtattgggtgtaggaacatgatttaaaaaaaaactcttgcctctgctttcccccactctgaggcaagttaaaatgtaaaagatgtgatttatctggggggctcaggtatggtggggaagtggattcaggaatctggggaatggcaaatatattaagaagagtattgaaagtatttggaggaaaatggttaattctgggtgtgcaccagggttcagtagagtccacttctgccctggagaccacaaatcaactagctccatttacagccatttctaaaatggcagcttcagttctagagaagaaagaacaacatcagcagtaaagtccatggaatagctagtggtctgtgtttcttttcgccattgcctagcttgccgtaatgattctataatgccatcatgcagcaattatgagaggctaggtcatccaaagagaagaccctatcaatgtaggttgcaaaatctaacccctaaggaagtgcagtctttgatttgatttccctagtaaccttgcagatatgtttaaccaagccatagcccatgccttttgagggctgaacaaataagggacttactgataatttacttttgatcacattaaggtgttctcaccttgaaatcttatacactgaaatggccattgatttaggccactggcttagagtactccttcccctgcatgacactgattacaaatactttcctattcatactttccaattatgagatggactgtgggtactgggagtgatcactaacaccatagtaatgtctaatattcacaggcagatctgcttggggaagctagttatgtgaaaggcaaatagagtcatacagtagctcaaaaggcaaccataattctctttggtgcaggtcttgggagcgtgatctagattacactgcaccattcccaagttaatcccctgaaaacttactctcaactggagcaaatgaactttggtcccaaatatccatcttttcagtagcgttaattatgctctgtttccaactgcatttcctttccaattgaattaaagtgtggcctcgtttttagtcatttaaaattgttttctaagtaattgctgcctctattatggcacttcaattttgcactgtcttttgagattcaagaaaaatttctattcttttttttgcatccaattgtgcctgaacttttaaaatatgtaaatgctgccatgttccaaacccatcgtcagtgtgtgtgtttagagctgtgcaccctagaaacaacatattgtcccatgagcaggtgcctgagacacagacccctttgcattcacagagaggtcattggttatagagacttgaattaataagtgacattatgccagtttctgttctctcacaggtgataaacaatgctttttgtgcactacatactcttcagtgtagagctcttgttttatgggaaaaggctcaaatgccaaattgtgtttgatggattaatatgcccttttgccgatgcatactattactgatgtgactcggttttgtcgcagctttgctttgtttaatgaaacacacttgtaaacctcttttgcactttgaaaaagaatccagcgggatgctcgagcacctgtaaacaattttctcaacctatttgatgttcaaataaagaattaaactaaa

SEQ ID NO: 330033 - DNA, 1788 bp, Artificial Sequence
  derived and/or modified sequence
atgaccatgaccctgcacaccaaggccagcggcatggccctgctgcaccagatccagggcaacgagctggagcccctgaacagaccccagctgaagatccccctggagagacccctgggcgaggtgtacctggacagcagcaagcccgccgtgtacaactaccccgagggcgccgcctacgagttcaacgccgccgccgccgccaacgcccaggtgtacggccagaccggcctgccctacggccccggcagcgaggccgccgccttcggcagcaacggcctgggcggcttcccccccctgaacagcgtgagccccagccccctgatgctgctgcacccccccccccagctgagccccttcctgcagccccacggccagcaggtgccctactacctggagaacgagcccagcggctacaccgtgagagaggccggcccccccgccttctacagacccaacagcgacaacagaagacagggcggcagagagagactggccagcaccaacgacaagggcagcatggccatggagagcgccaaggagaccagatactgcgccgtgtgcaacgactacgccagcggctaccactacggcgtgtggagctgcgagggctgcaaggccttcttcaagagaagcatccagggccacaacgactacatgtgccccgccaccaaccagtgcaccatcgacaagaacagaagaaagagctgccaggcctgcagactgagaaagtgctacgaggtgggcatgatgaagggcggcatcagaaaggacagaagaggcggcagaatgctgaagcacaagagacagagagacgacggcgagggcagaggcgaggtgggcagcgccggcgacatgagagccgccaacctgtggcccagccccctgatgatcaagagaagcaagaagaacagcctggccctgagcctgaccgccgaccagatggtgagcgccctgctggacgccgagccccccatcctgtacagcgagtacgaccccaccagacccttcagcgaggccagcatgatgggcctgctgaccaacctggccgacagagagctggtgcacatgatcaactgggccaagagagtgcccggcttcgtggacctgaccctgcacgaccaggtgcacctgctggagtgcgcctggctggagatcctgatgatcggcctggtgtggagaagcatggagcaccccggcaagctgctgttcgcccccaacctgctgctggacagaaaccagggcaagtgcgtggagggcatggtggagatcttcgacatgctgctggccaccagcagcagattcagaatgatgaacctgcagggcgaggagttcgtgtgcctgaagagcatcatcctgctgaacagcggcgtgtacaccttcctgagcagcaccctgaagagcctggaggagaaggaccacatccacagagtgctggacaagatcaccgacaccctgatccacctgatggccaaggccggcctgaccctgcagcagcagcaccagagactggcccagctgctgctgatcctgagccacatcagacacatgagcaacaagggcatggagcacctgtacagcatgaagtgcaagaacgtggtgcccctgtacgacctgctgctggagatgctggacgcccacagactgcacgcccccaccagcagaggcggcgccagcgtggaggagaccgaccagagccacctggccaccgccggcagcaccagcagccacagcctgcagaagtactacatcaccggcgaggccgagggcttccccgccaccgtgtag

SEQ ID NO: 330034 - DNA, 1788 bp, Artificial Sequence
  derived and/or modified sequence
atgaccatgaccctgcacacaaaggcttcaggcatggccctgttacatcaaattcagggaaatgaactcgaacccctgaatcgtcctcagttaaaaatccccctggagcgcccgctcggggaggtttatctcgactcctccaaaccggccgtgtacaattacccggaaggcgcagcctacgagttcaatgctgccgccgccgcaaatgctcaagtgtacggccagacagggctcccatacggtccagggagtgaggctgccgctttcggctcaaatggtctaggcggcttcccccccttaaatagcgtttccccctctccactgatgctcctccatccgcctccccaactgtccccattcctgcagccacacggtcaacaggtcccctactacctggagaatgaaccatctggatacactgtccgagaagccggacctcctgccttctaccggccgaacagtgacaaccgacggcagggtggccgggagcgcctggcctctactaacgataaaggatccatggcaatggagagtgccaaggagacgcgttactgcgccgtgtgcaatgattacgcttcaggctaccactatggtgtgtggtcatgtgaaggctgtaaggcgttctttaaacgctccattcagggacacaacgattatatgtgccctgccacaaaccagtgtaccattgataagaatagaaggaaatcctgtcaggcctgcagactcagaaagtgttacgaggtcggaatgatgaaggggggcatcagaaaagaccggcgggggggacgtatgttgaaacacaagcgtcagagggatgacggtgaaggtagaggagaagtcggctccgcaggcgatatgcgggccgccaacctctggccctcaccgctaatgataaaacgaagcaagaagaattcactagctctgtccctcacagccgaccagatggtcagtgctctcctagacgcagagccccccattctttattccgagtacgacccaacccggcctttttccgaggcctcaatgatgggcctactgaccaatcttgcagaccgggagctggtgcacatgataaattgggcgaagagagttccggggttcgtggaccttacccttcatgatcaagttcacctcttagagtgcgcatggcttgagattctgatgattggtcttgtttggcggtccatggaacatcctggcaagcttctgttcgcccccaatctcctcttagaccgaaaccaggggaagtgtgtagaagggatggttgagatctttgacatgctcctcgcaacaagctcaagatttcgtatgatgaatctgcaaggagaggaattcgtctgtctgaagagtatcattctcctgaattctggcgtatatacctttctgagctccacactgaaatccctggaggagaaggaccatattcatagggtgcttgacaagatcactgatacactgatacacctgatggctaaagcaggtctgacattgcagcaacaacaccagagactagcacagctgctgctgatcctctcccacataagacacatgtcaaataaaggcatggaacacctttatagcatgaagtgcaagaatgtggtgccgctgtacgatctgcttcttgagatgctggacgctcatcgtctccatgcccccacctctcgcggaggagccagtgtggaggagacagaccagtcccatttggctacggctggtagcacgagcagtcactccctgcagaagtactacattaccggggaagctgaaggtttccctgcgactgtgtag

SEQ ID NO: 330035 - DNA, 1788 bp, Artificial Sequence
  derived and/or modified sequence
atgaccatgaccctgcacaccaaggccagcggcatggccctgctgcaccagatccagggcaatgagctggagcccctgaaccggccccagctgaagatccccctggagcggcccctgggggaggtgtacctggacagcagcaagccagctgtgtacaactacccagagggcgccgcctatgagttcaatgctgctgctgctgccaatgcccaggtgtatggccagacaggcctgccctacggccctggcagcgaggccgccgccttcggcagcaatggcctgggcggcttcccccccctgaacagcgtgagccccagccccctgatgctgctgcaccccccaccccagctgagccccttcctgcagccccacggccagcaggtgccctactacctggagaatgagcccagcggctacacagtgcgggaggccggccccccagccttctaccggcccaacagcgacaacagacggcagggcggccgggagcggctggccagcaccaatgacaagggctccatggccatggagagcgccaaggagacccgctactgtgctgtgtgcaatgactatgccagcggctaccactatggagtgtggagctgtgagggctgcaaggccttcttcaagaggagcatccagggccacaatgactacatgtgcccagccaccaaccagtgcaccatcgacaagaacagaaggaagagctgccaggcctgccgcctgaggaagtgctatgaggtgggcatgatgaagggcggcatcaggaaggacagaagaggaggccgcatgctgaagcacaagaggcagagagatgatggagagggccgcggggaggtgggcagcgctggggacatgagagctgccaacctgtggcccagccccctgatgatcaagaggagcaagaagaacagcctggccctgagcctgacagctgaccagatggtgtctgccctgctggatgctgagccccccatcctgtacagtgaatatgaccccacccggcccttcagcgaggcctccatgatgggcctgctgaccaacctggccgaccgggagctggtgcacatgatcaactgggccaagagggtgcccggctttgtggacctgaccctgcatgaccaggtgcacctgctggagtgtgcctggctggagatcctgatgattggcctggtgtggaggtccatggagcaccctgggaagctgctgtttgcccccaacctgctgctggacaggaaccagggcaaatgtgtggagggcatggtggagatctttgacatgctgctggccaccagcagccgcttcaggatgatgaacctgcagggcgaggagtttgtgtgcctgaagagcatcatcctgctgaacagcggcgtgtacaccttcctgagcagcaccctgaagagcctggaggagaaggaccacatccaccgggtgctggacaagatcacagacaccctcatccacctgatggccaaggccggcctgaccctgcagcagcagcaccagaggctggcccagctgctgctgatcctgagccacatccgccacatgagcaacaagggcatggagcacctgtacagcatgaagtgcaagaatgtggtgcccctgtatgacctgctgctggagatgctggatgcccaccggctgcacgcccccaccagccggggcggggcctctgtggaggagacagaccagagccacctggccacagctggcagcaccagcagccacagcctgcagaagtactacatcactggagaggccgagggcttccctgccaccgtgtag

SEQ ID NO: 330036 - DNA, 1788 bp, Artificial Sequence
  derived and/or modified sequence
atgaccatgaccctgcacaccaaggccagcggcatggccctgctgcaccaaatccaggggaatgagctggaacccttgaaccggccccagctgaaaattcccctggagcggccgctgggggaagtctatttggattcttctaagccagctgtctacaactatcccgaaggggctgcatatgagttcaatgctgccgcggcagccaacgcccaggtctatgggcagacaggactcccgtatggcccgggaagcgaggctgccgctttcgggtccaatggcctggggggattccccccgctgaattccgtgtcccctagtccgctaatgcttctgcacccacctcctcagctctctcccttccttcagccccacggccagcaggtaccttattacctggagaatgaaccctctggctatactgtgcgtgaggccggaccgcccgccttttaccgtcccaactccgacaaccgacggcagggtgggagggagaggttagccagtaccaacgacaagggctccatggcaatggagtccgccaaagaaacaaggtattgtgcggtgtgtaatgattacgcctctggataccactatggagtttggagctgtgagggatgtaaagcattctttaaaaggtcgattcaaggccacaatgactatatgtgtcccgctacgaatcagtgtactatcgacaagaataggcgcaagtcctgccaggcgtgcagactgcggaaatgctatgaagtgggcatgatgaagggcgggatccgtaaggacagaagaggtggtaggatgctgaagcacaaacgccagcgagacgacggcgagggcaggggagaggttgggagcgcaggcgacatgcgagctgctaacctgtggccatccccgttaatgataaaaagatctaaaaaaaattcacttgcattgagcctcaccgctgaccagatggtcagcgcactgctagacgcggaaccacccatcctttatagcgagtacgatcctacccgcccgttcagtgaagccagcatgatggggctgctgacgaacctggcggatcgagagctggtgcacatgattaattgggccaagcgggtgccgggcttcgtggacttgacactccatgaccaggtacatctcctcgagtgcgcgtggctcgaaatccttatgattggcctcgtctggaggagcatggagcatccagggaaactactgtttgcgcctaatctccttctggacaggaatcaagggaagtgtgtagagggcatggtggagatcttcgacatgctgttggccacatcctcacgtttccgcatgatgaatctccagggcgaagagttcgtgtgcctgaagtctattatcctcctcaattccggcgtgtataccttcctaagcagcacgctgaagagtctggaagagaaggaccatattcatcgagttctcgataagataacagacactttaatacatctaatggccaaagccggccttaccttgcaacagcagcaccaacgcctagctcagctcctgttgattctgtcacatatccgacatatgagtaacaagggaatggagcacctgtactccatgaagtgcaagaatgtggtgcctttgtatgatttgctgctggaaatgctggatgcccatcgcctgcatgctcctacttcaaggggtggtgccagcgtggaagagacggatcaaagccacctggcaacagcaggcagtacctctagccatagcctccagaaatattacattacaggggaggccgaggggttccctgcaactgtctag

SEQ ID NO: 330037 - DNA, 1788 bp, Artificial Sequence
  derived and/or modified sequence
atgacgatgacgcttcatactaaggcgagcggcatggccttactgcaccagatacaggggaatgagttggaacccctgaaccgccctcaactgaagattcctctcgagcgcccattaggcgaggtctacctcgacagttccaaaccggcagtctataattaccccgagggagctgcctacgagttcaacgcggctgccgctgccaatgcccaagtttacggacagacggggctgccttacgggccaggctcggaggcagccgcttttggaagtaatggattaggtggctttcccccattaaactccgtgtctcccagccctcttatgctactgcacccacctcctcaactgtccccgtttctgcagcctcatggccagcaggtcccttactatttggaaaatgagccctccggttataccgtgcgagaagcgggaccgcctgcattctacagacccaactctgataaccggagacagggcggtcgggaaagacttgcgtcaactaacgacaaaggtagcatggcaatggagagcgctaaagagacccgctattgcgcagtgtgtaacgactacgccagcggctaccattatggcgtgtggtcttgtgagggctgcaaagccttcttcaagcgatccattcagggtcacaacgactatatgtgtcctgcgactaaccaatgcaccattgacaagaatcgcagaaagagttgtcaggcctgcagattgagaaagtgctatgaggtcggcatgatgaaagggggtatacgaaaagaccgaaggggcggtcgaatgctaaagcacaaacgccaaagagacgacggggagggtagaggagaggtaggttctgccggtgacatgcgcgcagcaaacctgtggccttcgcctctgatgataaagcgctctaaaaaaaattcgttggctctaagcctgacagccgaccagatggtgtccgcactgctggacgccgaaccccctatcctgtacagcgagtatgatcccacaaggcctttctcagaagcatccatgatgggacttttaactaatctcgctgaccgggaattggttcacatgataaattgggcaaaacgcgtgccaggatttgtagaccttaccctgcacgatcaggtgcacctgctcgagtgcgcgtggctggagatcctgatgattgggctggtctggcgtagcatggaacaccccggaaagctgctttttgccccaaacctcttgctggataggaatcagggcaagtgtgtagaagggatggtcgagattttcgacatgctcctggctacctctagtcggtttaggatgatgaacctgcagggggaagagtttgtctgcctcaaatccatcattctactgaattccggcgtctacacctttctgagctctactcttaaatccttggaagaaaaagaccacatacaccgcgtgctggacaaaattacagacacactgattcatctcatggctaaagccggacttacactccaacaacagcatcaacgtctggcccagctgctgctgatcctctcacatatccggcacatgtccaacaagggaatggaacacctgtacagcatgaagtgtaagaatgtcgtcccactatatgaccttctcttagagatgctcgacgcacatcggctccatgcgcctaccagccgtgggggtgcgagcgtggaggagactgaccagtcacatctcgccacagctggcagtacttcgagccacagcttgcagaagtactacattactggtgaagccgaaggatttccggctaccgtatag

SEQ ID NO: 330038 - DNA, 1572 bp, Artificial Sequence
  derived and/or modified sequence
atgaccatgaccctgcacaccaaggccagcggcatggccctgctgcaccagatccagggcaacgagctggagcccccccccctgaacagcgtgagccccagccccctgatgctgctgcacccccccccccagctgagccccttcctgcagccccacggccagcaggtgccctactacctggagaacgagcccagcggctacaccgtgagagaggccggcccccccgccttctacagacccaacagcgacaacagaagacagggcggcagagagagactggccagcaccaacgacaagggcagcatggccatggagagcgccaaggagaccagatactgcgccgtgtgcaacgactacgccagcggctaccactacggcgtgtggagctgcgagggctgcaaggccttcttcaagagaagcatccagggccacaacgactacatgtgccccgccaccaaccagtgcaccatcgacaagaacagaagaaagagctgccaggcctgcagactgagaaagtgctacgaggtgggcatgatgaagggcggcatcagaaaggacagaagaggcggcagaatgctgaagcacaagagacagagagacgacggcgagggcagaggcgaggtgggcagcgccggcgacatgagagccgccaacctgtggcccagccccctgatgatcaagagaagcaagaagaacagcctggccctgagcctgaccgccgaccagatggtgagcgccctgctggacgccgagccccccatcctgtacagcgagtacgaccccaccagacccttcagcgaggccagcatgatgggcctgctgaccaacctggccgacagagagctggtgcacatgatcaactgggccaagagagtgcccggcttcgtggacctgaccctgcacgaccaggtgcacctgctggagtgcgcctggctggagatcctgatgatcggcctggtgtggagaagcatggagcaccccggcaagctgctgttcgcccccaacctgctgctggacagaaaccagggcaagtgcgtggagggcatggtggagatcttcgacatgctgctggccaccagcagcagattcagaatgatgaacctgcagggcgaggagttcgtgtgcctgaagagcatcatcctgctgaacagcggcgtgtacaccttcctgagcagcaccctgaagagcctggaggagaaggaccacatccacagagtgctggacaagatcaccgacaccctgatccacctgatggccaaggccggcctgaccctgcagcagcagcaccagagactggcccagctgctgctgatcctgagccacatcagacacatgagcaacaagggcatggagcacctgtacagcatgaagtgcaagaacgtggtgcccctgtacgacctgctgctggagatgctggacgcccacagactgcacgcccccaccagcagaggcggcgccagcgtggaggagaccgaccagagccacctggccaccgccggcagcaccagcagccacagcctgcagaagtactacatcaccggcgaggccgagggcttccccgccaccgtgtag

SEQ ID NO: 330039 - DNA, 6455 bp, Artificial Sequence
  derived and/or modified sequence
gagttgtgcctggagtgatgtttaagccaatgtcagggcaaggcaacagtccctggccgtcctccagcacctttgtaatgcatatgagctcgggagaccagtacttaaagttggaggcccgggagcccaggagctggcggagggcgttcgtcctgggactgcacttgctcccgtcgggtcgcccggcttcaccggacccgcaggctcccggggcagggccggggccagagctcgcgtgtcggcgggacatgcgctgcgtcgcctctaacctcgggctgtgctctttttccaggtggcccgccggtttctgagccttctgccctgcggggacacggtctgcaccctgcccgcggccacggaccatgaccatgaccctccacaccaaagcatctgggatggccctactgcatcagatccaagggaacgagctggagcccctgaaccgtccgcagctcaagatccccctggagcggcccctgggcgaggtgtacctggacagcagcaagcccgccgtgtacaactaccccgagggcgccgcctacgagttcaacgccgcggccgccgccaacgcgcaggtctacggtcagaccggcctcccctacggccccgggtctgaggctgcggcgttcggctccaacggcctggggggtttccccccactcaacagcgtgtctccgagcccgctgatgctactgcacccgccgccgcagctgtcgcctttcctgcagccccacggccagcaggtgccctactacctggagaacgagcccagcggctacacggtgcgcgaggccggcccgccggcattctacaggccaaattcagataatcgacgccagggtggcagagaaagattggccagtaccaatgacaagggaagtatggctatggaatctgccaaggagactcgctactgtgcagtgtgcaatgactatgcttcaggctaccattatggagtctggtcctgtgagggctgcaaggccttcttcaagagaagtattcaaggacataacgactatatgtgtccagccaccaaccagtgcaccattgataaaaacaggaggaagagctgccaggcctgccggctccgtaaatgctacgaagtgggaatgatgaaaggtgggatacgaaaagaccgaagaggagggagaatgttgaaacacaagcgccagagagatgatggggagggcaggggtgaagtggggtctgctggagacatgagagctgccaacctttggccaagcccgctcatgatcaaacgctctaagaagaacagcctggccttgtccctgacggccgaccagatggtcagtgccttgttggatgctgagcccccgatactctattccgagtatgatcctaccagacccttcagtgaagcttcgatgatgggcttactgaccaacctggcagacagggagctggttcacatgatcaactgggcgaagagggtgccaggctttgtggatttgaccctccatgatcaggtccaccttctagaatgtgcctggctagagatcctgatgattggtctcgtctggcgctccatggagcacccagggaagctactgtttgctcctaacttgctcttggacaggaaccagggaaaatgtgtagagggcatggtggagatcttcgacatgctgctggctacatcatctcggttccgcatgatgaatctgcagggagaggagtttgtgtgcctcaaatctattattttgcttaattctggagtgtacacatttctgtccagcaccctgaagtctctggaagagaaggaccatatccaccgagtcctggacaagatcacagacactttgatccacctgatggccaaggcaggcctgaccctgcagcagcagcaccagcggctggcccagctcctcctcatcctctcccacatcaggcacatgagtaacaaaggcatggagcatctgtacagcatgaagtgcaagaacgtggtgcccctctatgacctgctgctggagatgctggacgcccaccgcctacatgcgcccactagccgtggaggggcatccgtggaggagacggaccaaagccacttggccactgcgggctctacttcatcgcattccttgcaaaagtattacatcacgggggaggcagagggtttccctgccacggtctgagagctccctggctcccacacggttcagataatccctgctgcattttaccctcatcatgcaccactttagccaaattctgtctcctgcatacactccggcatgcatccaacaccaatggctttctagatgagtggccattcatttgcttgctcagttcttagtggcacatcttctgtcttctgttgggaacagccaaagggattccaaggctaaatctttgtaacagctctctttcccccttgctatgttactaagcgtgaggattcccgtagctcttcacagctgaactcagtctatgggttggggctcagataactctgtgcatttaagctacttgtagagacccaggcctggagagtagacattttgcctctgataagcactttttaaatggctctaagaataagccacagcaaagaatttaaagtggctcctttaattggtgacttggagaaagctaggtcaagggtttattatagcaccctcttgtattcctatggcaatgcatccttttatgaaagtggtacaccttaaagcttttatatgactgtagcagagtatctggtgattgtcaattcattccccctataggaatacaaggggcacacagggaaggcagatcccctagttggcaagactattttaacttgatacactgcagattcagatgtgctgaaagctctgcctctggctttccggtcatgggttccagttaattcatgcctcccatggacctatggagagcagcaagttgatcttagttaagtctccctatatgagggataagttcctgatttttgtttttatttttgtgttacaaaagaaagccctccctccctgaacttgcagtaaggtcagcttcaggacctgttccagtgggcactgtacttggatcttcccggcgtgtgtgtgccttacacaggggtgaactgttcactgtggtgatgcatgatgagggtaaatggtagttgaaaggagcaggggccctggtgttgcatttagccctggggcatggagctgaacagtacttgtgcaggattgttgtggctactagagaacaagagggaaagtagggcagaaactggatacagttctgaggcacagccagacttgctcagggtggccctgccacaggctgcagctacctaggaacattccttgcagaccccgcattgccctttgggggtgccctgggatccctggggtagtccagctcttcttcatttcccagcgtggccctggttggaagaagcagctgtcacagctgctgtagacagctgtgttcctacaattggcccagcaccctggggcacgggagaagggtggggaccgttgctgtcactactcaggctgactggggcctggtcagattacgtatgcccttggtggtttagagataatccaaaatcagggtttggtttggggaagaaaatcctcccccttcctcccccgccccgttccctaccgcctccactcctgccagctcatttccttcaatttcctttgacctataggctaaaaaagaaaggctcattccagccacagggcagccttccctgggcctttgcttctctagcacaattatgggttacttcctttttcttaacaaaaaagaatgtttgatttcctctgggtgaccttattgtctgtaattgaaaccctattgagaggtgatgtctgtgttagccaatgacccaggtgagctgctcgggcttctcttggtatgtcttgtttggaaaagtggatttcattcatttctgattgtccagttaagtgatcaccaaaggactgagaatctgggagggcaaaaaaaaaaaaaaagtttttatgtgcacttaaatttggggacaattttatgtatctgtgttaaggatatgtttaagaacataattcttttgttgctgtttgtttaagaagcaccttagtttgtttaagaagcaccttatatagtataatatatatttttttgaaattacattgcttgtttatcagacaattgaatgtagtaattctgttctggatttaatttgactgggttaacatgcaaaaaccaaggaaaaatatttagtttttttttttttttttgtatacttttcaagctaccttgtcatgtatacagtcatttatgcctaaagcctggtgattattcatttaaatgaagatcacatttcatatcaacttttgtatccacagtagacaaaatagcactaatccagatgcctattgttggatactgaatgacagacaatcttatgtagcaaagattatgcctgaaaaggaaaattattcagggcagctaattttgcttttaccaaaatatcagtagtaatatttttggacagtagctaatgggtcagtgggttctttttaatgtttatacttagattttcttttaaaaaaattaaaataaaacaaaaaaaaatttctaggactagacgatgtaataccagctaaagccaaacaattatacagtggaaggttttacattattcatccaatgtgtttctattcatgttaagatactactacatttgaagtgggcagagaacatcagatgattgaaatgttcgcccaggggtctccagcaactttggaaatctctttgtatttttacttgaagtgccactaatggacagcagatattttctggctgatgttggtattgggtgtaggaacatgatttaaaaaaaaactcttgcctctgctttcccccactctgaggcaagttaaaatgtaaaagatgtgatttatctggggggctcaggtatggtggggaagtggattcaggaatctggggaatggcaaatatattaagaagagtattgaaagtatttggaggaaaatggttaattctgggtgtgcaccagggttcagtagagtccacttctgccctggagaccacaaatcaactagctccatttacagccatttctaaaatggcagcttcagttctagagaagaaagaacaacatcagcagtaaagtccatggaatagctagtggtctgtgtttcttttcgccattgcctagcttgccgtaatgattctataatgccatcatgcagcaattatgagaggctaggtcatccaaagagaagaccctatcaatgtaggttgcaaaatctaacccctaaggaagtgcagtctttgatttgatttccctagtaaccttgcagatatgtttaaccaagccatagcccatgccttttgagggctgaacaaataagggacttactgataatttacttttgatcacattaaggtgttctcaccttgaaatcttatacactgaaatggccattgatttaggccactggcttagagtactccttcccctgcatgacactgattacaaatactttcctattcatactttccaattatgagatggactgtgggtactgggagtgatcactaacaccatagtaatgtctaatattcacaggcagatctgcttggggaagctagttatgtgaaaggcaaatagagtcatacagtagctcaaaaggcaaccataattctctttggtgcaggtcttgggagcgtgatctagattacactgcaccattcccaagttaatcccctgaaaacttactctcaactggagcaaatgaactttggtcccaaatatccatcttttcagtagcgttaattatgctctgtttccaactgcatttcctttccaattgaattaaagtgtggcctcgtttttagtcatttaaaattgttttctaagtaattgctgcctctattatggcacttcaattttgcactgtcttttgagattcaagaaaaatttctattcttttttttgcatccaattgtgcctgaacttttaaaatatgtaaatgctgccatgttccaaacccatcgtcagtgtgtgtgtttagagctgtgcaccctagaaacaacatattgtcccatgagcaggtgcctgagacacagacccctttgcattcacagagaggtcattggttatagagacttgaattaataagtgacattatgccagtttctgttctctcacaggtgataaacaatgctttttgtgcactacatactcttcagtgtagagctcttgttttatgggaaaaggctcaaatgccaaattgtgtttgatggattaatatgcccttttgccgatgcatactattactgatgtgactcggttttgtcgcagctttgctttgtttaatgaaacacacttgtaaacctcttttgcactttgaaaaagaatccagcgggatgctcgagcacctgtaaacaattttctcaacctatttgatgttcaaataaagaattaaact

SEQ ID NO: 330040 - DNA, 3335 bp, Artificial Sequence
  derived and/or modified sequence
ctagagcatgggtggccattgttgacctacaggaggcaccactgtcaccaacaaagggtaacagtctttcttttcaatatttatttatatccagtatttattttcaatactgactatggagagagctctcctgtgctcaaacactgcaatactgggggtctttcaaagcacaaaaacatatatttgcatgatggcatcattaacatttttatggctttctatttcttttttgtactggtctcaagagccactcataaatctctcagtaactgcatagtgtcccagggccagagaccggccactcctggcattgtgattagagtcatttaatatccaaggtggtgactaatgtctggcaacaaagcctccattgggtgtcatgtgtcctgggaccctgagcgtgggcactctaggagcacctcagtattgcgtgttagtactatggccgagagaatagttgagaaagtggtcaagaggtggatccatgtgaacgccactgggaaatgagagacctcgttcccaatcacggtcagtgcaactcgaaagcctaaaatcagtttaaaacaaaggtatctacctttatcttatgttcatatcctaggcttttaataatacgtatttttcacatgtttacagaaagcagtcaactgagctattcatggaaaggtttgtgggtttggttaacgaagtggaggagtattacatttcagctggaaacacatccctagaatgccaaaacatttattccaaagtctggtttcctggtgcaatcggaggcatggcaatgcctctgttcagagactgggggctagggccagtaaggcatttgatccacatgtatcccagaaggcttttattgttaaattatattctttcggaaaaaccacccatgtcctattttgtaaacttgatatccatacacttttgactggcattctattttagccgtaagactatgattcacagcaagcctgtttttcctcttgcttggggtggcagcagaaagcatagggtactttccagcctccaagggtaggggcaaaggggctggggtttctcctccccagtacagctttctctggctgtgccacactgctccctgtgagcagacagcaagtctcccctcactccccactgccattcatccagcgctgtgcagtagcccagctgcgtgtctgccgggaggggctgccaagtgccctgcctactggctgcttcccgaatccctgccattccacgcacaaacacatccacacactctctctgcctagttcacacactgagccactcgcacatgcgagcacattccttccttccttctcactctctcggcccttgacttctacaagcccatggaacatttctggaaagacgttcttgatccagcagggtggcccgccggtttctgagccttctgccctgcggggacacggtctgcaccctgcccgcggccacggaccatgaccatgaccctccacaccaaagcatctgggatggccctactgcatcagatccaagggaacgagctggagcccctgaaccgtccgcagctcaagatccccctggagcggcccctgggcgaggtgtacctggacagcagcaagcccgccgtgtacaactaccccgagggcgccgcctacgagttcaacgccgcggccgccgccaacgcgcaggtctacggtcagaccggcctcccctacggccccgggtctgaggctgcggcgttcggctccaacggcctggggggtttccccccactcaacagcgtgtctccgagcccgctgatgctactgcacccgccgccgcagctgtcgcctttcctgcagccccacggccagcaggtgccctactacctggagaacgagcccagcggctacacggtgcgcgaggccggcccgccggcattctacaggccaaattcagataatcgacgccagggtggcagagaaagattggccagtaccaatgacaagggaagtatggctatggaatctgccaaggagactcgctactgtgcagtgtgcaatgactatgcttcaggctaccattatggagtctggtcctgtgagggctgcaaggccttcttcaagagaagtattcaaggacataacgactatatgtgtccagccaccaaccagtgcaccattgataaaaacaggaggaagagctgccaggcctgccggctccgtaaatgctacgaagtgggaatgatgaaaggtgggatacgaaaagaccgaagaggagggagaatgttgaaacacaagcgccagagagatgatggggagggcaggggtgaagtggggtctgctggagacatgagagctgccaacctttggccaagcccgctcatgatcaaacgctctaagaagaacagcctggccttgtccctgacggccgaccagatggtcagtgccttgttggatgctgagcccccgatactctattccgagtatgatcctaccagacccttcagtgaagcttcgatgatgggcttactgaccaacctggcagacagggagctggttcacatgatcaactgggcgaagagggtgccaggctttgtggatttgaccctccatgatcaggtccaccttctagaatgtgcctggctagagatcctgatgattggtctcgtctggcgctccatggagcacccagggaagctactgtttgctcctaacttgctcttggacaggaaccagggaaaatgtgtagagggcatggtggagatcttcgacatgctgctggctacatcatctcggttccgcatgatgaatctgcagggagaggagtttgtgtgcctcaaatctattattttgcttaattctggagtgtacacatttctgtccagcaccctgaagtctctggaagagaaggaccatatccaccgagtcctggacaagatcacagacactttgatccacctgatggccaaggcaggcctgaccctgcagcagcagcaccagcggctggcccagctcctcctcatcctctcccacatcaggcacatgagtaacaaaggcatggagcatctgtacagcatgaagtgcaagaacgtggtgcccctctatgacctgctgctggagatgctggacgcccaccgcctacatgcgcccactagccgtggaggggcatccgtggaggagacggaccaaagccacttggccactgcgggctctacttcatcgcattccttgcaaaagtattacatcacgggggaggcagagggtttccctgccacggtctgagagctccctggctcccacacggttcagataatccctgctgcattttaccctcatcatgcaccactttagccaaattctgtctcctgc

SEQ ID NO: 330041 - DNA, 1788 bp, Artificial Sequence
  derived and/or modified sequence
atgacaatgaccttgcatactaaggctagcgggatggctctgctacaccagattcagggtaacgaactagagcctctcaatcggccacagcttaagattcccctggagcgcccgctgggcgaggtgtaccttgattcaagtaagcccgcagtctacaactaccctgagggagcggcgtacgagtttaacgctgccgctgccgcaaacgctcaagtttatgggcagaccgggctaccctacggccccgggagcgaggcggccgccttcggaagcaatggcttggggggtttcccacccctgaactcagtgtctccatcaccactgatgctcctacacccccctccgcagctatctcctttcctgcagccccacggccagcaggttccttattatttggaaaatgaaccctcgggatacactgtacgggaggccggacccccagcattttaccgaccaaattcagataataggcggcaaggtggacgggagcgtctcgcttcgacgaacgataaaggaagcatggcaatggagagtgccaaggagacaaggtactgtgccgtgtgcaacgactacgccagcggctaccattatggagtctggtcatgcgaggggtgcaaggccttctttaaacgcagcatacagggtcacaacgattacatgtgccctgctacgaaccagtgcacaatcgacaaaaataggcggaaaagttgtcaggcctgtcgcctcagaaaatgttatgaggtgggaatgatgaaaggtggcattcgcaaagaccgccggggcggtaggatgttaaagcacaagaggcagcgcgacgacggggaagggagaggtgaggtcgggagcgctggggacatgcgcgctgccaacctgtggccatcccctcttatgataaaaaggtccaaaaaaaattccctcgccctgtcactgacagcagaccagatggtatctgctctcctggacgccgaaccccccatcctgtatagcgaatacgatccaacacgtccttttagcgaggcgtctatgatgggattactgacaaatctggcggatcgcgaactcgtgcacatgattaattgggccaaacgggtgcccgggtttgtagaccttaccttgcacgatcaggtgcacctgctggagtgtgcttggttggagatcctgatgatagggcttgtctggcggtctatggagcaccctggaaaactgttgtttgccccaaatcttctgctggatcgcaaccagggcaagtgtgtagagggtatggtcgaaatcttcgacatgctcctggccacaagctcgaggtttcggatgatgaatctgcagggcgaggagtttgtgtgtctgaagagtatcatcttgttaaacagcggagtgtatacctttttgagcagcaccctaaagagccttgaggaaaaagaccatattcacagggtgctcgataagatcactgacaccttaatccacctgatggcgaaagctgggctgaccctacaacaacagcatcaacggctcgcccaacttctcctgattttgagccatattcgacatatgagcaacaagggaatggagcacttgtatagcatgaagtgcaaaaacgtcgtcccattatatgatctgctcctggagatgctggacgctcacaggttgcacgcccctacctcgcggggtggagcgagcgtggaagagaccgatcaaagccacctcgcaaccgctgggtccaccagttcccactcattgcagaaatattacatcacgggcgaggccgagggatttccagcgacggtttag

SEQ ID NO: 330042 - DNA, 1572 bp, Artificial Sequence
  derived and/or modified sequence
atgactatgactctccataccaaggccagcggaatggcactgttgcaccaaatccaggggaacgaactggagcctccacctttaaactcagtctctccttctcccctcatgctgctccatcccccaccccaactcagtccattcctgcagccacatggacagcaagtcccatattacctagagaacgaacctagcggatatactgtccgtgaggcgggtcccccggcattctataggcctaactctgacaacagaagacagggtggcagagaaagactggcttccaccaatgacaagggcagcatggccatggaaagtgcaaaggaaaccaggtactgcgccgtctgcaatgattatgcaagcgggtaccactacggtgtctggagttgcgaaggctgtaaagctttttttaagaggtccatccagggacataatgactatatgtgccccgctacaaaccaatgcacaattgacaagaatagaagaaagtcttgtcaggcttgccgactgcggaagtgctacgaggtgggcatgatgaagggcggaattcgtaaagacaggcgcggggggcggatgttgaagcataaacggcagcgggacgacggggagggccggggggaagtagggagcgctggggacatgcgcgccgcaaacctgtggcctagcccccttatgataaaacgcagtaagaagaactctctggcccttagcctgactgccgaccagatggtctctgcactcttagacgccgaaccccctattctatactccgaatacgatcccacgcgcccattcagcgaggcctcgatgatgggcctcctgacgaatcttgccgatcgcgaactcgttcatatgatcaactgggctaaaagggtacccggttttgtggatctcacactgcatgatcaggttcatctgctggagtgtgcatggcttgaaatcctgatgatcgggctggtgtggcggagcatggagcatccaggaaaacttctgtttgctcccaacctgctcctcgatcggaatcagggaaaatgtgtggagggcatggtcgaaatctttgacatgctactggcgacttctagcagattcagaatgatgaatctccagggagaagagtttgtctgcctgaaaagtattatcttactgaattcaggagtatacacgtttctttcctctacactgaaaagtctggaggaaaaagaccatatccatagggtgctcgataaaattacagacactctcatccatctgatggccaaggcaggattgacccttcagcagcagcatcaaagactggcccagctgctcctgatcctttctcacattagacacatgagcaacaagggcatggaacatctgtacagcatgaaatgcaaaaacgttgtgcctctgtacgatctattgcttgagatgctcgatgcacatcggctgcacgctcccacaagcaggggcggtgcctcggtggaagagaccgatcagagccacttagccaccgcaggctcaacgtcttcccattctctacagaagtactacattaccggagaagcagaagggtttcctgccactgtttag

SEQ ID NO: 330043 - DNA, 1788 bp, Artificial Sequence
  derived and/or modified sequence
atgacaatgacattacacaccaaagcatccggaatggcccttctgcatcagatccaagggaatgagcttgaacctcttaaccggcctcaactgaagataccgctggagcggcccttgggcgaggtgtacctcgactccagtaagcctgctgtctacaattaccctgagggcgctgcctacgagttcaacgctgctgcagccgctaacgcacaagtctacgggcagactggcctcccctacggaccgggctcagaagctgccgcattcggatccaacggactgggcggcttccctccactcaactctgtgtctccatctccactgatgctgctccaccctcctccacagctgtcgccctttctgcaaccacacggtcaacaggtcccatactatctggaaaacgagccctctgggtataccgtgagggaggccggtcctcctgccttctacaggcccaactcagataacagaaggcagggcggcagggagcgtctggccagcacaaatgataagggctcaatggccatggagagcgcaaaagaaacccggtattgcgctgtctgcaatgactacgcaagcgggtatcactacggggtgtggtcctgcgagggatgcaaagcgttttttaaacggtccattcagggacacaatgactatatgtgtcctgctacaaaccagtgtactatcgacaaaaaccgccgcaagtcttgccaagcatgcagactgaggaagtgttatgaagtcggcatgatgaaagggggaatccggaaggatagaagaggtggccgcatgttaaagcacaagcggcagcgcgacgacggggaagggagaggagaggtgggctctgctggggatatgcgcgcagctaatctgtggccaagccctctgatgatcaaaagaagcaaaaagaactccctagccttgagcctgactgctgaccagatggtcagcgccctgcttgacgcagagcctcccatcttgtactccgagtatgaccctacgcggcctttcagcgaggcgtcgatgatggggctcctcaccaacttggcagacagggaactcgtgcacatgattaactgggcaaaaagggtacctgggttcgtggaccttacactccacgatcaggtgcacctgctcgaatgtgcttggctggagatactgatgatagggttagtgtggagaagtatggagcacccaggtaaactcctgttcgcccccaatctcctcttggacaggaaccagggcaagtgcgtggaagggatggttgagatctttgacatgctgctggctacgtcctcacgcttcaggatgatgaatttgcagggggaggagtttgtgtgtttaaaatccatcattctgctgaattccggcgtgtacaccttcttgtcaagtaccctgaaatccttggaagagaaggaccatatccacagggtattggataagatcacggacactttgatccatctcatggccaaggctggcttgaccctgcaacaacagcatcagcggctcgcacagcttttactcatcctgtcccacatccgacatatgtctaacaaggggatggaacacctgtatagcatgaagtgcaagaacgtggtccccttgtatgacctactccttgaaatgctggatgcgcatcgcttgcacgccccaacaagtagaggcggggcttctgtcgaagagactgatcagtctcatcttgccacagctggctccacgtcttcccattctttacagaagtactatatcacaggggaggccgagggttttcctgcaaccgtgtag

SEQ ID NO: 330044 - DNA, 1788 bp, Artificial Sequence
  derived and/or modified sequence
atgacaatgaccctgcacactaaagcttctggcatggccctgcttcaccaaatccaaggtaacgaactggagccgttgaacaggccccagctgaaaattcccttggaacggccactcggcgaggtctacttggacagctcgaagcctgccgtctacaactaccccgaaggcgccgcctacgagttcaatgctgctgccgctgctaatgcacaggtgtatggccagaccggcctgccatatggacctggatctgaagctgccgccttcggttcgaatgggcttgggggctttcccccactcaactctgtctctccatccccactcatgctcctgcacccaccgccccaactcagccccttcctgcagccccatggacagcaagttccgtattatctggagaatgagccatccggatacacagtgcgggaggcaggacccccagccttttacagacctaactcggacaaccgtagacagggcgggagagaacgactagcctctactaacgataaggggtccatggcaatggagtctgccaaggagacccgctactgtgctgtatgcaacgactacgcatccggatatcactatggcgtgtggtcctgtgaaggatgcaaagcgttttttaagcgctctattcagggtcacaacgattacatgtgccctgccactaaccagtgtaccattgataaaaatcggcggaaaagctgtcaggcttgccgcctgcgcaagtgttacgaagtgggaatgatgaagggcggtattagaaaagatagaagaggcggaaggatgctaaaacataaaaggcagcgcgatgacggcgaaggccgtggtgaagtgggcagtgcgggcgacatgagagcagctaatttgtggccctctccattgatgatcaaaagaagcaaaaagaacagtctcgcactcagcctgacagcagatcagatggtatccgccctcttagatgccgaaccacccattctgtatagcgagtacgaccctacaagaccgttctcggaggcaagtatgatgggactgctgacaaatctcgctgatagagagcttgttcacatgatcaactgggcgaaacgcgtccccggcttcgttgacctgacactacacgatcaggtgcacctgctggaatgtgcatggcttgaaattctgatgatcgggttggtttggcggtccatggagcatcctggcaaactgctgttcgctcccaacctactgctcgatcgtaatcagggcaaatgcgttgaaggaatggtcgaaatcttcgatatgctcttggccacaagctcccgctttaggatgatgaatttacagggagaagaatttgtatgcctaaagtccatcattttgcttaactctggcgtgtatacattcctatcttccacacttaagtccttggaggagaaggaccatattcatagagtactggataaaatcaccgatactcttattcacttaatggctaaggcgggccttactttgcagcagcagcaccagaggctcgcccagttactgctgatattgtcacacatacggcatatgagcaataaaggaatggagcatctgtactccatgaagtgtaaaaatgtggtccccctctacgacctgttactcgagatgctggatgcacatcgacttcacgctccaacaagccgcggcggagctagtgtggaggaaacggaccagagccacttggccaccgccggctccactagctctcactcactgcagaaatactacatcaccggagaggcagaaggctttcccgctactgtctag

SEQ ID NO: 330045 - DNA, 5880 bp, Artificial Sequence
  derived and/or modified sequence
atgaccatgaccctccacaccaaagcatctgggatggccctactgcatcagatccaagggaacgagctggagccccccccactcaacagcgtgtctccgagcccgctgatgctactgcacccgccgccgcagctgtcgcctttcctgcagccccacggccagcaggtgccctactacctggagaacgagcccagcggctacacggtgcgcgaggccggcccgccggcattctacaggccaaattcagataatcgacgccagggtggcagagaaagattggccagtaccaatgacaagggaagtatggctatggaatctgccaaggagactcgctactgtgcagtgtgcaatgactatgcttcaggctaccattatggagtctggtcctgtgagggctgcaaggccttcttcaagagaagtattcaaggacataacgactatatgtgtccagccaccaaccagtgcaccattgataaaaacaggaggaagagctgccaggcctgccggctccgtaaatgctacgaagtgggaatgatgaaaggtgggatacgaaaagaccgaagaggagggagaatgttgaaacacaagcgccagagagatgatggggagggcaggggtgaagtggggtctgctggagacatgagagctgccaacctttggccaagcccgctcatgatcaaacgctctaagaagaacagcctggccttgtccctgacggccgaccagatggtcagtgccttgttggatgctgagcccccgatactctattccgagtatgatcctaccagacccttcagtgaagcttcgatgatgggcttactgaccaacctggcagacagggagctggttcacatgatcaactgggcgaagagggtgccaggctttgtggatttgaccctccatgatcaggtccaccttctagaatgtgcctggctagagatcctgatgattggtctcgtctggcgctccatggagcacccagggaagctactgtttgctcctaacttgctcttggacaggaaccagggaaaatgtgtagagggcatggtggagatcttcgacatgctgctggctacatcatctcggttccgcatgatgaatctgcagggagaggagtttgtgtgcctcaaatctattattttgcttaattctggagtgtacacatttctgtccagcaccctgaagtctctggaagagaaggaccatatccaccgagtcctggacaagatcacagacactttgatccacctgatggccaaggcaggcctgaccctgcagcagcagcaccagcggctggcccagctcctcctcatcctctcccacatcaggcacatgagtaacaaaggcatggagcatctgtacagcatgaagtgcaagaacgtggtgcccctctatgacctgctgctggagatgctggacgcccaccgcctacatgcgcccactagccgtggaggggcatccgtggaggagacggaccaaagccacttggccactgcgggctctacttcatcgcattccttgcaaaagtattacatcacgggggaggcagagggtttccctgccacggtctgagagctccctggctcccacacggttcagataatccctgctgcattttaccctcatcatgcaccactttagccaaattctgtctcctgcatacactccggcatgcatccaacaccaatggctttctagatgagtggccattcatttgcttgctcagttcttagtggcacatcttctgtcttctgttgggaacagccaaagggattccaaggctaaatctttgtaacagctctctttcccccttgctatgttactaagcgtgaggattcccgtagctcttcacagctgaactcagtctatgggttggggctcagataactctgtgcatttaagctacttgtagagacccaggcctggagagtagacattttgcctctgataagcactttttaaatggctctaagaataagccacagcaaagaatttaaagtggctcctttaattggtgacttggagaaagctaggtcaagggtttattatagcaccctcttgtattcctatggcaatgcatccttttatgaaagtggtacaccttaaagcttttatatgactgtagcagagtatctggtgattgtcaattcattccccctataggaatacaaggggcacacagggaaggcagatcccctagttggcaagactattttaacttgatacactgcagattcagatgtgctgaaagctctgcctctggctttccggtcatgggttccagttaattcatgcctcccatggacctatggagagcagcaagttgatcttagttaagtctccctatatgagggataagttcctgatttttgtttttatttttgtgttacaaaagaaagccctccctccctgaacttgcagtaaggtcagcttcaggacctgttccagtgggcactgtacttggatcttcccggcgtgtgtgtgccttacacaggggtgaactgttcactgtggtgatgcatgatgagggtaaatggtagttgaaaggagcaggggccctggtgttgcatttagccctggggcatggagctgaacagtacttgtgcaggattgttgtggctactagagaacaagagggaaagtagggcagaaactggatacagttctgaggcacagccagacttgctcagggtggccctgccacaggctgcagctacctaggaacattccttgcagaccccgcattgccctttgggggtgccctgggatccctggggtagtccagctcttcttcatttcccagcgtggccctggttggaagaagcagctgtcacagctgctgtagacagctgtgttcctacaattggcccagcaccctggggcacgggagaagggtggggaccgttgctgtcactactcaggctgactggggcctggtcagattacgtatgcccttggtggtttagagataatccaaaatcagggtttggtttggggaagaaaatcctcccccttcctcccccgccccgttccctaccgcctccactcctgccagctcatttccttcaatttcctttgacctataggctaaaaaagaaaggctcattccagccacagggcagccttccctgggcctttgcttctctagcacaattatgggttacttcctttttcttaacaaaaaagaatgtttgatttcctctgggtgaccttattgtctgtaattgaaaccctattgagaggtgatgtctgtgttagccaatgacccaggtgagctgctcgggcttctcttggtatgtcttgtttggaaaagtggatttcattcatttctgattgtccagttaagtgatcaccaaaggactgagaatctgggagggcaaaaaaaaaaaaaaagtttttatgtgcacttaaatttggggacaattttatgtatctgtgttaaggatatgtttaagaacataattcttttgttgctgtttgtttaagaagcaccttagtttgtttaagaagcaccttatatagtataatatatatttttttgaaattacattgcttgtttatcagacaattgaatgtagtaattctgttctggatttaatttgactgggttaacatgcaaaaaccaaggaaaaatatttagtttttttttttttttttgtatacttttcaagctaccttgtcatgtatacagtcatttatgcctaaagcctggtgattattcatttaaatgaagatcacatttcatatcaacttttgtatccacagtagacaaaatagcactaatccagatgcctattgttggatactgaatgacagacaatcttatgtagcaaagattatgcctgaaaaggaaaattattcagggcagctaattttgcttttaccaaaatatcagtagtaatatttttggacagtagctaatgggtcagtgggttctttttaatgtttatacttagattttcttttaaaaaaattaaaataaaacaaaaaaaaatttctaggactagacgatgtaataccagctaaagccaaacaattatacagtggaaggttttacattattcatccaatgtgtttctattcatgttaagatactactacatttgaagtgggcagagaacatcagatgattgaaatgttcgcccaggggtctccagcaactttggaaatctctttgtatttttacttgaagtgccactaatggacagcagatattttctggctgatgttggtattgggtgtaggaacatgatttaaaaaaaaactcttgcctctgctttcccccactctgaggcaagttaaaatgtaaaagatgtgatttatctggggggctcaggtatggtggggaagtggattcaggaatctggggaatggcaaatatattaagaagagtattgaaagtatttggaggaaaatggttaattctgggtgtgcaccagggttcagtagagtccacttctgccctggagaccacaaatcaactagctccatttacagccatttctaaaatggcagcttcagttctagagaagaaagaacaacatcagcagtaaagtccatggaatagctagtggtctgtgtttcttttcgccattgcctagcttgccgtaatgattctataatgccatcatgcagcaattatgagaggctaggtcatccaaagagaagaccctatcaatgtaggttgcaaaatctaacccctaaggaagtgcagtctttgatttgatttccctagtaaccttgcagatatgtttaaccaagccatagcccatgccttttgagggctgaacaaataagggacttactgataatttacttttgatcacattaaggtgttctcaccttgaaatcttatacactgaaatggccattgatttaggccactggcttagagtactccttcccctgcatgacactgattacaaatactttcctattcatactttccaattatgagatggactgtgggtactgggagtgatcactaacaccatagtaatgtctaatattcacaggcagatctgcttggggaagctagttatgtgaaaggcaaatagagtcatacagtagctcaaaaggcaaccataattctctttggtgcaggtcttgggagcgtgatctagattacactgcaccattcccaagttaatcccctgaaaacttactctcaactggagcaaatgaactttggtcccaaatatccatcttttcagtagcgttaattatgctctgtttccaactgcatttcctttccaattgaattaaagtgtggcctcgtttttagtcatttaaaattgttttctaagtaattgctgcctctattatggcacttcaattttgcactgtcttttgagattcaagaaaaatttctattcttttttttgcatccaattgtgcctgaacttttaaaatatgtaaatgctgccatgttccaaacccatcgtcagtgtgtgtgtttagagctgtgcaccctagaaacaacatattgtcccatgagcaggtgcctgagacacagacccctttgcattcacagagaggtcattggttatagagacttgaattaataagtgacattatgccagtttctgttctctcacaggtgataaacaatgctttttgtgcactacatactcttcagtgtagagctcttgttttatgggaaaaggctcaaatgccaaattgtgtttgatggattaatatgcccttttgccgatgcatactattactgatgtgactcggttttgtcgcagctttgctttgtttaatgaaacacacttgtaaacctcttttgcactttgaaaaagaatccagcgggatgctcgagcacctgtaaacaattttctcaacctatttgatgttcaaataaagaattaaactaaa

SEQ ID NO: 330046 - DNA, 6466 bp, Artificial Sequence
  derived and/or modified sequence
atggtcataacagcctcctgtctaccgactcagaacggattttaccaaaactgaaaatgcaggctccatgctcagaagctctttaacaggctcgaaaggtccatgctcctttctcctgcccattctatagcataagaagacagtctctgagtgataatcttctcttcaagaagaagaaaactaggaaggagtaagcacaaagatctcttcacattctccgggactgcggtaccaaatatcagcacagcacttcttgaaaaaggatgtagattttaatctgaactttgaaccatcactgaggtggcccgccggtttctgagccttctgccctgcggggacacggtctgcaccctgcccgcggccacggaccatgaccatgaccctccacaccaaagcatctgggatggccctactgcatcagatccaagggaacgagctggagcccctgaaccgtccgcagctcaagatccccctggagcggcccctgggcgaggtgtacctggacagcagcaagcccgccgtgtacaactaccccgagggcgccgcctacgagttcaacgccgcggccgccgccaacgcgcaggtctacggtcagaccggcctcccctacggccccgggtctgaggctgcggcgttcggctccaacggcctggggggtttccccccactcaacagcgtgtctccgagcccgctgatgctactgcacccgccgccgcagctgtcgcctttcctgcagccccacggccagcaggtgccctactacctggagaacgagcccagcggctacacggtgcgcgaggccggcccgccggcattctacaggccaaattcagataatcgacgccagggtggcagagaaagattggccagtaccaatgacaagggaagtatggctatggaatctgccaaggagactcgctactgtgcagtgtgcaatgactatgcttcaggctaccattatggagtctggtcctgtgagggctgcaaggccttcttcaagagaagtattcaaggacataacgactatatgtgtccagccaccaaccagtgcaccattgataaaaacaggaggaagagctgccaggcctgccggctccgtaaatgctacgaagtgggaatgatgaaaggtgggatacgaaaagaccgaagaggagggagaatgttgaaacacaagcgccagagagatgatggggagggcaggggtgaagtggggtctgctggagacatgagagctgccaacctttggccaagcccgctcatgatcaaacgctctaagaagaacagcctggccttgtccctgacggccgaccagatggtcagtgccttgttggatgctgagcccccgatactctattccgagtatgatcctaccagacccttcagtgaagcttcgatgatgggcttactgaccaacctggcagacagggagctggttcacatgatcaactgggcgaagagggtgccaggctttgtggatttgaccctccatgatcaggtccaccttctagaatgtgcctggctagagatcctgatgattggtctcgtctggcgctccatggagcacccagggaagctactgtttgctcctaacttgctcttggacaggaaccagggaaaatgtgtagagggcatggtggagatcttcgacatgctgctggctacatcatctcggttccgcatgatgaatctgcagggagaggagtttgtgtgcctcaaatctattattttgcttaattctggagtgtacacatttctgtccagcaccctgaagtctctggaagagaaggaccatatccaccgagtcctggacaagatcacagacactttgatccacctgatggccaaggcaggcctgaccctgcagcagcagcaccagcggctggcccagctcctcctcatcctctcccacatcaggcacatgagtaacaaaggcatggagcatctgtacagcatgaagtgcaagaacgtggtgcccctctatgacctgctgctggagatgctggacgcccaccgcctacatgcgcccactagccgtggaggggcatccgtggaggagacggaccaaagccacttggccactgcgggctctacttcatcgcattccttgcaaaagtattacatcacgggggaggcagagggtttccctgccacggtctgagagctccctggctcccacacggttcagataatccctgctgcattttaccctcatcatgcaccactttagccaaattctgtctcctgcatacactccggcatgcatccaacaccaatggctttctagatgagtggccattcatttgcttgctcagttcttagtggcacatcttctgtcttctgttgggaacagccaaagggattccaaggctaaatctttgtaacagctctctttcccccttgctatgttactaagcgtgaggattcccgtagctcttcacagctgaactcagtctatgggttggggctcagataactctgtgcatttaagctacttgtagagacccaggcctggagagtagacattttgcctctgataagcactttttaaatggctctaagaataagccacagcaaagaatttaaagtggctcctttaattggtgacttggagaaagctaggtcaagggtttattatagcaccctcttgtattcctatggcaatgcatccttttatgaaagtggtacaccttaaagcttttatatgactgtagcagagtatctggtgattgtcaattcattccccctataggaatacaaggggcacacagggaaggcagatcccctagttggcaagactattttaacttgatacactgcagattcagatgtgctgaaagctctgcctctggctttccggtcatgggttccagttaattcatgcctcccatggacctatggagagcagcaagttgatcttagttaagtctccctatatgagggataagttcctgatttttgtttttatttttgtgttacaaaagaaagccctccctccctgaacttgcagtaaggtcagcttcaggacctgttccagtgggcactgtacttggatcttcccggcgtgtgtgtgccttacacaggggtgaactgttcactgtggtgatgcatgatgagggtaaatggtagttgaaaggagcaggggccctggtgttgcatttagccctggggcatggagctgaacagtacttgtgcaggattgttgtggctactagagaacaagagggaaagtagggcagaaactggatacagttctgaggcacagccagacttgctcagggtggccctgccacaggctgcagctacctaggaacattccttgcagaccccgcattgccctttgggggtgccctgggatccctggggtagtccagctcttcttcatttcccagcgtggccctggttggaagaagcagctgtcacagctgctgtagacagctgtgttcctacaattggcccagcaccctggggcacgggagaagggtggggaccgttgctgtcactactcaggctgactggggcctggtcagattacgtatgcccttggtggtttagagataatccaaaatcagggtttggtttggggaagaaaatcctcccccttcctcccccgccccgttccctaccgcctccactcctgccagctcatttccttcaatttcctttgacctataggctaaaaaagaaaggctcattccagccacagggcagccttccctgggcctttgcttctctagcacaattatgggttacttcctttttcttaacaaaaaagaatgtttgatttcctctgggtgaccttattgtctgtaattgaaaccctattgagaggtgatgtctgtgttagccaatgacccaggtgagctgctcgggcttctcttggtatgtcttgtttggaaaagtggatttcattcatttctgattgtccagttaagtgatcaccaaaggactgagaatctgggagggcaaaaaaaaaaaaaaagtttttatgtgcacttaaatttggggacaattttatgtatctgtgttaaggatatgtttaagaacataattcttttgttgctgtttgtttaagaagcaccttagtttgtttaagaagcaccttatatagtataatatatatttttttgaaattacattgcttgtttatcagacaattgaatgtagtaattctgttctggatttaatttgactgggttaacatgcaaaaaccaaggaaaaatatttagtttttttttttttttttgtatacttttcaagctaccttgtcatgtatacagtcatttatgcctaaagcctggtgattattcatttaaatgaagatcacatttcatatcaacttttgtatccacagtagacaaaatagcactaatccagatgcctattgttggatactgaatgacagacaatcttatgtagcaaagattatgcctgaaaaggaaaattattcagggcagctaattttgcttttaccaaaatatcagtagtaatatttttggacagtagctaatgggtcagtgggttctttttaatgtttatacttagattttcttttaaaaaaattaaaataaaacaaaaaaaaatttctaggactagacgatgtaataccagctaaagccaaacaattatacagtggaaggttttacattattcatccaatgtgtttctattcatgttaagatactactacatttgaagtgggcagagaacatcagatgattgaaatgttcgcccaggggtctccagcaactttggaaatctctttgtatttttacttgaagtgccactaatggacagcagatattttctggctgatgttggtattgggtgtaggaacatgatttaaaaaaaaactcttgcctctgctttcccccactctgaggcaagttaaaatgtaaaagatgtgatttatctggggggctcaggtatggtggggaagtggattcaggaatctggggaatggcaaatatattaagaagagtattgaaagtatttggaggaaaatggttaattctgggtgtgcaccagggttcagtagagtccacttctgccctggagaccacaaatcaactagctccatttacagccatttctaaaatggcagcttcagttctagagaagaaagaacaacatcagcagtaaagtccatggaatagctagtggtctgtgtttcttttcgccattgcctagcttgccgtaatgattctataatgccatcatgcagcaattatgagaggctaggtcatccaaagagaagaccctatcaatgtaggttgcaaaatctaacccctaaggaagtgcagtctttgatttgatttccctagtaaccttgcagatatgtttaaccaagccatagcccatgccttttgagggctgaacaaataagggacttactgataatttacttttgatcacattaaggtgttctcaccttgaaatcttatacactgaaatggccattgatttaggccactggcttagagtactccttcccctgcatgacactgattacaaatactttcctattcatactttccaattatgagatggactgtgggtactgggagtgatcactaacaccatagtaatgtctaatattcacaggcagatctgcttggggaagctagttatgtgaaaggcaaatagagtcatacagtagctcaaaaggcaaccataattctctttggtgcaggtcttgggagcgtgatctagattacactgcaccattcccaagttaatcccctgaaaacttactctcaactggagcaaatgaactttggtcccaaatatccatcttttcagtagcgttaattatgctctgtttccaactgcatttcctttccaattgaattaaagtgtggcctcgtttttagtcatttaaaattgttttctaagtaattgctgcctctattatggcacttcaattttgcactgtcttttgagattcaagaaaaatttctattcttttttttgcatccaattgtgcctgaacttttaaaatatgtaaatgctgccatgttccaaacccatcgtcagtgtgtgtgtttagagctgtgcaccctagaaacaacatattgtcccatgagcaggtgcctgagacacagacccctttgcattcacagagaggtcattggttatagagacttgaattaataagtgacattatgccagtttctgttctctcacaggtgataaacaatgctttttgtgcactacatactcttcagtgtagagctcttgttttatgggaaaaggctcaaatgccaaattgtgtttgatggattaatatgcccttttgccgatgcatactattactgatgtgactcggttttgtcgcagctttgctttgtttaatgaaacacacttgtaaacctcttttgcactttgaaaaagaatccagcgggatgctcgagcacctgtaaacaattttctcaacctatttgatgttcaaataaagaattaaactaaa

SEQ ID NO: 330047 - DNA, 6357 bp, Artificial Sequence
  derived and/or modified sequence
gacaaacagagatatatcggagtctggcacggggcacataaggcagcacattagagaaagccggcccctggatccgtctttcgcgtttattttaagcccagtcttccctgggccacctttagcagatcctcgtgcgcccccgccccctggccgtgaaactcagcctctatccagcagcgacgacaagtaaagtggcccgccggtttctgagccttctgccctgcggggacacggtctgcaccctgcccgcggccacggaccatgaccatgaccctccacaccaaagcatctgggatggccctactgcatcagatccaagggaacgagctggagcccctgaaccgtccgcagctcaagatccccctggagcggcccctgggcgaggtgtacctggacagcagcaagcccgccgtgtacaactaccccgagggcgccgcctacgagttcaacgccgcggccgccgccaacgcgcaggtctacggtcagaccggcctcccctacggccccgggtctgaggctgcggcgttcggctccaacggcctggggggtttccccccactcaacagcgtgtctccgagcccgctgatgctactgcacccgccgccgcagctgtcgcctttcctgcagccccacggccagcaggtgccctactacctggagaacgagcccagcggctacacggtgcgcgaggccggcccgccggcattctacaggccaaattcagataatcgacgccagggtggcagagaaagattggccagtaccaatgacaagggaagtatggctatggaatctgccaaggagactcgctactgtgcagtgtgcaatgactatgcttcaggctaccattatggagtctggtcctgtgagggctgcaaggccttcttcaagagaagtattcaaggacataacgactatatgtgtccagccaccaaccagtgcaccattgataaaaacaggaggaagagctgccaggcctgccggctccgtaaatgctacgaagtgggaatgatgaaaggtgggatacgaaaagaccgaagaggagggagaatgttgaaacacaagcgccagagagatgatggggagggcaggggtgaagtggggtctgctggagacatgagagctgccaacctttggccaagcccgctcatgatcaaacgctctaagaagaacagcctggccttgtccctgacggccgaccagatggtcagtgccttgttggatgctgagcccccgatactctattccgagtatgatcctaccagacccttcagtgaagcttcgatgatgggcttactgaccaacctggcagacagggagctggttcacatgatcaactgggcgaagagggtgccaggctttgtggatttgaccctccatgatcaggtccaccttctagaatgtgcctggctagagatcctgatgattggtctcgtctggcgctccatggagcacccagggaagctactgtttgctcctaacttgctcttggacaggaaccagggaaaatgtgtagagggcatggtggagatcttcgacatgctgctggctacatcatctcggttccgcatgatgaatctgcagggagaggagtttgtgtgcctcaaatctattattttgcttaattctggagtgtacacatttctgtccagcaccctgaagtctctggaagagaaggaccatatccaccgagtcctggacaagatcacagacactttgatccacctgatggccaaggcaggcctgaccctgcagcagcagcaccagcggctggcccagctcctcctcatcctctcccacatcaggcacatgagtaacaaaggcatggagcatctgtacagcatgaagtgcaagaacgtggtgcccctctatgacctgctgctggagatgctggacgcccaccgcctacatgcgcccactagccgtggaggggcatccgtggaggagacggaccaaagccacttggccactgcgggctctacttcatcgcattccttgcaaaagtattacatcacgggggaggcagagggtttccctgccacggtctgagagctccctggctcccacacggttcagataatccctgctgcattttaccctcatcatgcaccactttagccaaattctgtctcctgcatacactccggcatgcatccaacaccaatggctttctagatgagtggccattcatttgcttgctcagttcttagtggcacatcttctgtcttctgttgggaacagccaaagggattccaaggctaaatctttgtaacagctctctttcccccttgctatgttactaagcgtgaggattcccgtagctcttcacagctgaactcagtctatgggttggggctcagataactctgtgcatttaagctacttgtagagacccaggcctggagagtagacattttgcctctgataagcactttttaaatggctctaagaataagccacagcaaagaatttaaagtggctcctttaattggtgacttggagaaagctaggtcaagggtttattatagcaccctcttgtattcctatggcaatgcatccttttatgaaagtggtacaccttaaagcttttatatgactgtagcagagtatctggtgattgtcaattcattccccctataggaatacaaggggcacacagggaaggcagatcccctagttggcaagactattttaacttgatacactgcagattcagatgtgctgaaagctctgcctctggctttccggtcatgggttccagttaattcatgcctcccatggacctatggagagcagcaagttgatcttagttaagtctccctatatgagggataagttcctgatttttgtttttatttttgtgttacaaaagaaagccctccctccctgaacttgcagtaaggtcagcttcaggacctgttccagtgggcactgtacttggatcttcccggcgtgtgtgtgccttacacaggggtgaactgttcactgtggtgatgcatgatgagggtaaatggtagttgaaaggagcaggggccctggtgttgcatttagccctggggcatggagctgaacagtacttgtgcaggattgttgtggctactagagaacaagagggaaagtagggcagaaactggatacagttctgaggcacagccagacttgctcagggtggccctgccacaggctgcagctacctaggaacattccttgcagaccccgcattgccctttgggggtgccctgggatccctggggtagtccagctcttcttcatttcccagcgtggccctggttggaagaagcagctgtcacagctgctgtagacagctgtgttcctacaattggcccagcaccctggggcacgggagaagggtggggaccgttgctgtcactactcaggctgactggggcctggtcagattacgtatgcccttggtggtttagagataatccaaaatcagggtttggtttggggaagaaaatcctcccccttcctcccccgccccgttccctaccgcctccactcctgccagctcatttccttcaatttcctttgacctataggctaaaaaagaaaggctcattccagccacagggcagccttccctgggcctttgcttctctagcacaattatgggttacttcctttttcttaacaaaaaagaatgtttgatttcctctgggtgaccttattgtctgtaattgaaaccctattgagaggtgatgtctgtgttagccaatgacccaggtgagctgctcgggcttctcttggtatgtcttgtttggaaaagtggatttcattcatttctgattgtccagttaagtgatcaccaaaggactgagaatctgggagggcaaaaaaaaaaaaaaagtttttatgtgcacttaaatttggggacaattttatgtatctgtgttaaggatatgtttaagaacataattcttttgttgctgtttgtttaagaagcaccttagtttgtttaagaagcaccttatatagtataatatatatttttttgaaattacattgcttgtttatcagacaattgaatgtagtaattctgttctggatttaatttgactgggttaacatgcaaaaaccaaggaaaaatatttagtttttttttttttttttgtatacttttcaagctaccttgtcatgtatacagtcatttatgcctaaagcctggtgattattcatttaaatgaagatcacatttcatatcaacttttgtatccacagtagacaaaatagcactaatccagatgcctattgttggatactgaatgacagacaatcttatgtagcaaagattatgcctgaaaaggaaaattattcagggcagctaattttgcttttaccaaaatatcagtagtaatatttttggacagtagctaatgggtcagtgggttctttttaatgtttatacttagattttcttttaaaaaaattaaaataaaacaaaaaaaaatttctaggactagacgatgtaataccagctaaagccaaacaattatacagtggaaggttttacattattcatccaatgtgtttctattcatgttaagatactactacatttgaagtgggcagagaacatcagatgattgaaatgttcgcccaggggtctccagcaactttggaaatctctttgtatttttacttgaagtgccactaatggacagcagatattttctggctgatgttggtattgggtgtaggaacatgatttaaaaaaaaactcttgcctctgctttcccccactctgaggcaagttaaaatgtaaaagatgtgatttatctggggggctcaggtatggtggggaagtggattcaggaatctggggaatggcaaatatattaagaagagtattgaaagtatttggaggaaaatggttaattctgggtgtgcaccagggttcagtagagtccacttctgccctggagaccacaaatcaactagctccatttacagccatttctaaaatggcagcttcagttctagagaagaaagaacaacatcagcagtaaagtccatggaatagctagtggtctgtgtttcttttcgccattgcctagcttgccgtaatgattctataatgccatcatgcagcaattatgagaggctaggtcatccaaagagaagaccctatcaatgtaggttgcaaaatctaacccctaaggaagtgcagtctttgatttgatttccctagtaaccttgcagatatgtttaaccaagccatagcccatgccttttgagggctgaacaaataagggacttactgataatttacttttgatcacattaaggtgttctcaccttgaaatcttatacactgaaatggccattgatttaggccactggcttagagtactccttcccctgcatgacactgattacaaatactttcctattcatactttccaattatgagatggactgtgggtactgggagtgatcactaacaccatagtaatgtctaatattcacaggcagatctgcttggggaagctagttatgtgaaaggcaaatagagtcatacagtagctcaaaaggcaaccataattctctttggtgcaggtcttgggagcgtgatctagattacactgcaccattcccaagttaatcccctgaaaacttactctcaactggagcaaatgaactttggtcccaaatatccatcttttcagtagcgttaattatgctctgtttccaactgcatttcctttccaattgaattaaagtgtggcctcgtttttagtcatttaaaattgttttctaagtaattgctgcctctattatggcacttcaattttgcactgtcttttgagattcaagaaaaatttctattcttttttttgcatccaattgtgcctgaacttttaaaatatgtaaatgctgccatgttccaaacccatcgtcagtgtgtgtgtttagagctgtgcaccctagaaacaacatattgtcccatgagcaggtgcctgagacacagacccctttgcattcacagagaggtcattggttatagagacttgaattaataagtgacattatgccagtttctgttctctcacaggtgataaacaatgctttttgtgcactacatactcttcagtgtagagctcttgttttatgggaaaaggctcaaatgccaaattgtgtttgatggattaatatgcccttttgccgatgcatactattactgatgtgactcggttttgtcgcagctttgctttgtttaatgaaacacacttgtaaacctcttttgcactttgaaaaagaatccagcgggatgctcgagcacctgtaaacaattttctcaacctatttgatgttcaaataaagaattaaactaaa

SEQ ID NO: 330048 - DNA, 1572 bp, Artificial Sequence
  derived and/or modified sequence
atgaccatgaccctgcacaccaaggccagcggcatggccctgctgcaccagatccagggcaatgagctggagcccccacccctgaacagcgtgagccccagccccctgatgctgctgcaccccccaccccagctgagccccttcctgcagccccacggccagcaggtgccctactacctggagaatgagcccagcggctacacagtgcgggaggccggccccccagccttctaccggcccaacagcgacaacagacggcagggcggccgggagcggctggccagcaccaatgacaagggctccatggccatggagagcgccaaggagacccgctactgtgctgtgtgcaatgactatgccagcggctaccactatggagtgtggagctgtgagggctgcaaggccttcttcaagaggagcatccagggccacaatgactacatgtgcccagccaccaaccagtgcaccatcgacaagaacagaaggaagagctgccaggcctgccgcctgaggaagtgctatgaggtgggcatgatgaagggcggcatcaggaaggacagaagaggaggccgcatgctgaagcacaagaggcagagagatgatggagagggccgcggggaggtgggcagcgctggggacatgagagctgccaacctgtggcccagccccctgatgatcaagaggagcaagaagaacagcctggccctgagcctgacagctgaccagatggtgtctgccctgctggatgctgagccccccatcctgtacagtgaatatgaccccacccggcccttcagcgaggcctccatgatgggcctgctgaccaacctggccgaccgggagctggtgcacatgatcaactgggccaagagggtgcccggctttgtggacctgaccctgcatgaccaggtgcacctgctggagtgtgcctggctggagatcctgatgattggcctggtgtggaggtccatggagcaccctgggaagctgctgtttgcccccaacctgctgctggacaggaaccagggcaaatgtgtggagggcatggtggagatctttgacatgctgctggccaccagcagccgcttcaggatgatgaacctgcagggcgaggagtttgtgtgcctgaagagcatcatcctgctgaacagcggcgtgtacaccttcctgagcagcaccctgaagagcctggaggagaaggaccacatccaccgggtgctggacaagatcacagacaccctcatccacctgatggccaaggccggcctgaccctgcagcagcagcaccagaggctggcccagctgctgctgatcctgagccacatccgccacatgagcaacaagggcatggagcacctgtacagcatgaagtgcaagaatgtggtgcccctgtatgacctgctgctggagatgctggatgcccaccggctgcacgcccccaccagccggggcggggcctctgtggaggagacagaccagagccacctggccacagctggcagcaccagcagccacagcctgcagaagtactacatcactggagaggccgagggcttccctgccaccgtgtag

SEQ ID NO: 330049 - DNA, 1788 bp, Artificial Sequence
  derived and/or modified sequence
atgaccatgaccctgcacaccaaggccagcggcatggccctgctgcaccagatccagggcaatgagcttgagccactgaacagaccccagctgaagatcccactggaacgccccctcggagaggtgtacttagacagttcaaaaccagctgtgtacaattacccggaaggggcggcatacgaatttaacgcagccgcagccgcaaacgcccaagtctacggccaaactgggttaccatatggaccaggctccgaggccgctgccttcggctcaaacggcctggggggattccctcctctcaattcggtctctcctagcccgctgatgttgctgcaccctcctccacagctcagccccttcttgcaaccgcacggacaacaggtgccctactatctagagaatgagccctccggctacaccgtgcgggaggccggcccccccgctttttacagacccaacagcgacaaccggcgacagggaggcagggagagattggcctcaactaatgacaaggggagcatggccatggaatccgctaaggaaacaagatattgcgcagtgtgtaatgattacgcttcgggctatcactatggcgtatggtcctgcgaaggatgcaaagccttcttcaaaaggagtattcagggccacaacgattacatgtgccccgctacgaatcaatgcactatcgataaaaaccggcggaaaagttgccaggcctgtaggctccggaaatgttacgaagtagggatgatgaaggggggcatcaggaaggacaggagaggtggaagaatgctgaagcacaaaaggcagagggacgatggggagggccgcggcgaggtggggagtgcgggcgacatgcgggcggctaacctgtggcctagccctttgatgatcaaacgttcaaagaagaattccctcgctctctccctcacagctgaccagatggtctcggctcttctggacgccgaaccccctatcctttacagcgaatatgaccccaccaggccattctccgaggcgtccatgatgggactgcttactaacttggctgaccgggagctggtgcatatgatcaactgggctaagagagtccccgggttcgttgacctcacactgcacgatcaagtacatctgctggaatgcgcatggctggaaattttaatgatagggttagtgtggcggtctatggagcatcccggcaagcttctgttcgcacctaatctcttgctggatcgaaatcaaggaaagtgcgtggaggggatggtcgagatttttgatatgctgctggcgacctctagtaggttcaggatgatgaatcttcagggcgaagaatttgtatgtctcaagtctatcattcttctgaacagcggggtgtatacattcctgtcttccactttgaagtctctcgaagagaaagaccatattcacagggtgctagacaagatcacggacacattgatacatctcatggccaaggctggtctgacccttcagcagcagcatcagcggttagctcaattactgctgattttgagccacatcaggcatatgtccaataaaggaatggaacacttatattcaatgaagtgtaagaatgtagtacctttgtacgaccttctgctcgaaatgctggacgctcatagactgcatgcccccacgtctcgaggcggggcttccgtcgaagagaccgaccagtcacatctcgccacagccgggtctacgtcctctcattcgttacagaagtattacattacgggggaagccgagggctttcccgcgacggtttag

SEQ ID NO: 330050 - DNA, 1572 bp, Artificial Sequence
  derived and/or modified sequence
atgaccatgaccctgcacaccaaggccagcggcatggccctgctgcaccagatacagggaaacgaactggagcctcccccactgaactcagtctcaccatctcccctgatgcttctacatcccccaccacaactgtcccccttccttcagcctcacggtcagcaagtgccatactacctcgaaaatgagccgtctggatacactgtgcgggaagccggtccgccagccttctatcgccctaactctgataatagacgccagggcggcagggagcggctggccagtacaaatgataaggggagtatggcaatggagtcggctaaagaaacacgttactgtgctgtttgcaatgactatgcctccggatatcactatggcgtgtggagctgtgagggttgcaaagccttcttcaaaaggtccattcagggccataatgactatatgtgtccagccactaaccagtgcacaatagacaaaaacaggaggaagagttgccaggcatgcaggttgcggaagtgctacgaagtcggaatgatgaaaggtggaatcaggaaagaccggagaggcggaagaatgttgaaacataagcggcaacgagatgacggcgagggacgcggcgaggtgggctcggcaggagacatgcgggccgccaacttgtggccgagtcccctaatgattaaacggtcaaagaagaatagcctcgccctgtctttgaccgcagaccagatggtaagtgcactgctagacgctgaaccacccattctctattcggaatacgaccctaccaggcctttcagcgaagccagcatgatgggattgctcaccaatttggcggatagagagctggtgcatatgatcaattgggcgaagagagtgccgggatttgtagatctgacactgcacgaccaagtgcacctcttggagtgtgcatggttagaaattctgatgataggcctggtgtggagatctatggagcacccgggtaaactcttgtttgctcctaatctcctgctggaccgaaaccaaggcaagtgtgtggagggcatggtggaaatatttgatatgctgcttgccactagttctaggtttagaatgatgaacctccagggcgaggaattcgtttgtctcaagtcaattatcctgctcaattcaggcgtctacacctttttatctagtacattaaaatccttggaagaaaaggaccatattcatcgcgttctggacaagatcaccgacaccctgattcacctgatggccaaggcaggcctgacactccagcagcagcaccagcgtctggcccaacttctactgatcctctcgcacattaggcacatgtccaacaagggaatggaacacctctattcgatgaaatgtaagaatgtggtgcccctctacgatctgctgctcgaaatgctggatgcgcaccgcctgcatgccccaacctcacggggcggggcgagcgttgaggagaccgatcagtcccatctggcaaccgctggatccacttcctctcacagcttgcaaaaatactatatcaccggggaagcagaaggatttccagctaccgtttag

SEQ ID NO: 330051 - DNA, 1788 bp, Artificial Sequence
  derived and/or modified sequence
atgaccatgaccctgcacaccaaggccagcggcatggccctgctgcaccaaatccagggcaacgaattggagcctctgaatcggccccagctgaaaatccccctggagcgtccactcggggaggtctacctcgactcttccaaaccggctgtatataactacccagagggagcagcttacgagttcaacgcagcagccgccgccaatgcccaggtctacggtcaaaccggtttgccttacggccctggtagtgaggctgctgcgtttggaagtaatgggttgggcggctttccgccacttaacagcgtgagtcctagtccactcatgttgctgcatcctcccccccagttgtctccgtttctgcagccgcacggccagcaggtgccatactacctggagaacgaaccttctggttacaccgtaagagaggctggcccgccagcattctaccgacctaacagcgataatcgccggcagggtgggcgagagaggctggcttccacaaacgacaaaggctcgatggccatggagagtgccaaagaaacacggtactgtgcggtctgtaacgattatgctagtgggtatcactacggagtctggagttgcgaaggttgtaaggcctttttcaaacggagcatacaggggcacaatgactatatgtgccccgccaccaatcagtgtactatcgataagaaccgcagaaaatcctgccaggcctgtcgcctgcgcaagtgctatgaggttggaatgatgaaagggggcatacgcaaggacagaaggggggggcggatgctgaagcacaaaaggcagcgcgacgacggtgaaggcaggggagaggttggctctgccggtgacatgcgggccgcaaatctgtggccttctccactgatgataaaacgttctaaaaagaactcactggcgttgagcctgacagctgatcagatggttagcgctttgctggacgctgagcctcctatactgtattcggagtatgatccgaccagaccattctctgaggcgagcatgatggggctcttgaccaatttggccgaccgggagttagtacatatgattaattgggccaagcgcgtgcctgggttcgttgacctaacgttgcacgaccaggtccacctgctggaatgtgcatggctggagatcctgatgattggactggtgtggaggagcatggaacaccccggtaagttactcttcgctcctaacctgctactggataggaaccagggcaagtgtgtggaggggatggtggagatctttgacatgctcctcgcaacgagttcacgatttaggatgatgaatctccagggcgaggagttcgtctgcttaaaaagcatcatcctgttgaattccggcgtctacacattcctgagctcaaccctgaagtcactcgaagagaaggaccacatacacagggtgctggacaaaatcaccgatacactgatacacctcatggcaaaggccggactgactctgcagcagcagcaccagcggctggcccaactgctgctgatcctgtcacacatcagacacatgtcaaacaagggaatggagcacctgtactctatgaaatgcaaaaatgtggtccctttgtatgatctcttactggagatgctggatgcccacaggctccacgctcctacaagccgggggggcgccagcgtcgaggaaaccgatcaatctcatttagccacagccggttccaccagcagccacagcctccagaagtactacatcacaggtgaggcagaaggcttccccgctactgtttag

SEQ ID NO: 330052 - DNA, 1788 bp, Artificial Sequence
  derived and/or modified sequence
atgaccatgaccctgcacaccaaggccagcggcatggccctgctgcaccagatccaaggtaacgaattagagccgctcaaccggccccagctaaagattcctcttgagagacctttgggggaagtgtatctcgacagcagcaagcccgcggtgtacaattaccctgaaggggcagcatatgaatttaacgccgctgccgcagctaatgcccaggtttatgggcagactggactcccatacgggcctggctctgaggctgcagcctttggaagtaatggtctggggggattccccccactgaacagtgtcagcccttcaccactgatgctcctgcatcccccaccccaactttctcccttcctccagccacacggtcaacaggtaccctactatctggagaacgagccatcggggtatacggtgagagaggctggtcctcccgcattttaccgccctaacagcgataatcggcgacagggcggtcgggagcggctggccagcacgaacgataagggttccatggctatggaatccgccaaggaaacacggtactgcgccgtgtgcaacgattacgctagcgggtatcactatggtgtctggtcctgtgagggttgcaaggcattttttaagaggtctatccagggccataacgattatatgtgcccagctactaatcaatgcactatagataagaatcggcgaaaatcatgtcaggcttgccggcttcggaaatgctatgaggtggggatgatgaaaggaggcatcagaaaggacagacgaggcgggcgcatgctcaaacataaaaggcagcgggacgacggcgagggtaggggcgaagtgggatcagctggagatatgagagctgcgaacctgtggccgtcaccccttatgatcaagaggtcaaaaaaaaatagccttgccctcagtcttacggccgatcagatggtcagtgccctactcgacgctgaacccccgattttatatagtgagtacgatcctactagacctttctccgaggcatcaatgatgggactgctgaccaatctggcagatcgggagctggtacacatgatcaactgggctaagagagttcctggcttcgtggacctgacacttcacgaccaggttcatctcctcgagtgtgcatggttagagatcctcatgatcggacttgtctggcggagcatggagcacccaggcaagttactgttcgcgccaaatttgctccttgacaggaatcaagggaaatgcgttgagggcatggtcgaaatctttgatatgcttctggccacttcaagtcggtttaggatgatgaacctccagggcgaggagtttgtttgccttaaatctattatcctcctgaactctggagtatacacatttctgtccagtaccctgaagtccctcgaagaaaaagatcacatccaccgggtgctcgataaaattacagacaccctcattcatctgatggccaaggcagggctgaccttgcaacagcaacaccaaagattggctcaactcttactcattctttctcatattagacatatgtcaaataagggcatggaacatctctacagtatgaaatgtaagaacgttgtgcccctctatgacctcttgctcgagatgctggatgcgcaccgattacatgcgccgacatcaagaggaggagcttccgtagaagagactgatcaatcccacctggctacagctgggagtaccagttcccattctttgcagaagtactacataaccggagaggctgagggcttccccgctactgtgtag

SEQ ID NO: 330053 - DNA, 1788 bp, Artificial Sequence
  derived and/or modified sequence
atgacaatgactttacatacgaaggcatcaggcatggcgctgctgcaccagatccagggcaacgagttggaaccgttgaatcgacctcagttgaaaatccctctggagcggccattaggcgaggtgtatctggacagttctaaaccggcagtttataattatccagagggagctgcatacgaattcaacgctgcagccgctgctaacgcccaggtgtacggccagaccggactcccttacgggccaggctcagaggccgctgcgtttgggtccaatggtctaggagggtttcccccactcaacagcgtaagtccctccccactgatgttactccatcctcctccccagctctctccttttctgcagccccatggtcagcaagtgccatattacttagagaacgaacccagcgggtataccgtgcgcgaggccggtccccctgcattctacaggcctaatagcgacaaccggaggcagggcggacgtgaaagactcgcctctacaaacgacaagggctccatggctatggagagtgctaaggagacacgttattgcgccgtctgcaacgactacgctagtgggtaccattacggggtgtggtcctgtgaaggatgtaaggcgttttttaaaagatccattcagggccacaatgactatatgtgcccggcaaccaatcaatgtaccatcgataagaatagaaggaaatcgtgccaagcatgtcgccttagaaagtgttatgaggttggaatgatgaagggcggtattcggaaggaccggagaggtggcaggatgcttaaacacaagcgtcagagggacgacggagaaggtaggggagaggtgggctcagcaggggacatgagggccgctaatctctggccaagccccctcatgattaagcggtcaaaaaaaaactcactggcgctctccttaacagcagatcagatggttagtgcattactggacgcagagcctcctatcctctatagcgagtacgatccaaccaggcctttcagtgaggcgtccatgatgggcctgctgactaatctagctgacagggagctagtgcacatgattaattgggctaagcgcgtgcccggttttgtggacttaacattacatgaccaggtgcatctcctcgagtgcgcctggctcgagatcctcatgattggactggtctggcggagcatggagcaccctgggaaattgctgtttgctccaaacttacttctcgaccggaaccaggggaaatgcgtggaaggcatggtcgagatcttcgatatgcttttagccaccagttctaggttcagaatgatgaacttgcagggtgaggagtttgtgtgtctgaagagtattatccttctgaactctggtgtgtacacctttttgtcctcaaccctgaagtcactcgaggaaaaggaccacattcatcgagttctggacaagataaccgatactttgatccatttgatggcgaaggcaggcctaaccctgcaacagcaacaccagagactcgcccagttgttgcttatcctatcacatatcagacatatgagtaacaaagggatggaacatctctactcgatgaaatgcaagaatgtggtacctctgtacgatctcttactggaaatgttagacgcccatcgcctgcatgcgccaacctctcggggtggggctagtgtggaagaaaccgatcagagtcacttagcaacagccggttcaaccagttcacatagcttgcagaaatactacatcactggcgaggctgagggatttccggcaacagtgtag

SEQ ID NO: 330054 - DNA, 1572 bp, Artificial Sequence
  derived and/or modified sequence
atgactatgactctgcatactaaggcgtctggcatggcactactccatcaaatccaggggaatgaacttgagccccctccactaaattctgtaagtcccagccccctgatgttgctgcatccacctccacagctgagtcccttcctccagccccacgggcagcaggtcccctattatctggagaatgaacctagtggatacactgtccgtgaagcaggccctcccgctttttatcggccaaattctgacaacaggcgccaaggcggtagggagcgtctcgcatccacgaatgacaaggggtccatggctatggaatcagccaaagagacgaggtattgcgctgtgtgcaatgattatgctagtggataccattacggtgtgtggtcgtgcgaaggatgcaaggcattttttaagagatctatccaggggcacaatgattacatgtgccctgcaaccaaccagtgtactattgataaaaatagacgcaaaagttgccaggcctgcaggctacgcaagtgttacgaggtggggatgatgaagggaggcatccgtaaagatcgcagaggtggtcgtatgttgaagcacaagcgccagcgggacgacggcgaagggaggggggaagtgggttccgccggagatatgcgcgcagctaacttgtggccttcacctcttatgattaaacgctccaagaagaattcactcgctctctcacttacggcggaccagatggtcagcgcactcctagacgcagagccaccgattctttactccgaatacgacccaacgcggccatttagcgaggcttctatgatgggcctcctgacaaacctggccgatagggaactggtacacatgatcaactgggccaaaagagtgccaggcttcgtcgaccttaccttgcatgaccaggtccaccttctggaatgcgcctggttagaaatactgatgatcggtttagtgtggaggtccatggagcatcccggaaaactcctgttcgcacccaacctcctgcttgaccgaaaccagggtaagtgcgtggaaggcatggttgagatctttgacatgctgctggccacgagcagccgattcaggatgatgaatctccagggcgaagaattcgtgtgtctcaaaagcattattctgctcaactccggcgtatacaccttcctgtcttccacattgaagtcattagaggagaaggatcacattcacagagttttagataagattacagataccctgatccacttgatggccaaggcaggactgaccctgcagcagcaacaccagagactcgctcagttattgttaattctgagccacatccggcatatgagcaacaagggcatggaacatctttactcaatgaaatgcaaaaatgtagtcccactgtacgatcttcttctagagatgttggacgcacaccgactgcacgccccaaccagcagagggggagcctccgttgaagagaccgaccagtctcacttagctacggccggttcaacaagttcacattctttacagaaatactacataaccggggaggcggagggtttcccagccacggtgtag

SEQ ID NO: 330055 - DNA, 1788 bp, Artificial Sequence
  derived and/or modified sequence
atgacaatgacgttacacaccaaagccagtgggatggccctgctgcatcaaatccaggggaacgagctggagcctctgaacagaccacaactgaaaatcccactcgagcggccactgggcgaagtctacctggattctagtaagcctgcagtttacaattaccctgagggagcagcatacgagttcaatgccgcagctgcagctaatgctcaggtttacgggcagaccggtctcccctacggcccagggtccgaagcagcggctttcggcagtaacggcctcggaggattccccccactgaacagtgttagcccctcacccctgatgctgttgcaccctcctccccagctgagccctttcctgcaaccgcatgggcagcaggtaccttattatctggagaacgagccctccgggtacacggtccgcgaggctggaccaccggcattttacagaccaaattcggataaccgccgtcagggtgggagagagaggctggcctctacaaacgacaaaggcagcatggctatggagtccgctaaagaaacacgttattgtgccgtttgcaacgattatgcctctggctaccattacggagtgtggagttgtgagggctgcaaggcctttttcaagcggtccatccaaggtcacaatgattatatgtgcccagcgacaaatcaatgtaccattgacaaaaaccgtcgaaaatcatgccaggcttgtcggctgcgtaagtgctacgaggtgggcatgatgaagggcggaatccggaaagacaggaggggaggaaggatgctgaagcacaagaggcaacgcgatgacggagaagggagaggcgaagtcggctcagcgggagatatgcgggcagccaacctgtggccaagtcccctcatgatcaaaaggtccaagaagaattcacttgctcttagcctgacagctgaccagatggtctctgctctgcttgatgctgagcctcccattctgtactctgagtacgatcccacgcgtcccttcagtgaggcttctatgatggggctgttaaccaacctggccgaccgggagttagtgcacatgatcaactgggcaaaaagggtgccaggctttgtggatctgacactgcacgatcaggtgcatctgctagaatgcgcatggctggagattttaatgataggcctagtgtggaggagcatggaacatccaggaaagctgctgtttgcacctaaccttctcctggaccggaaccaaggcaagtgtgtggaggggatggtggaaattttcgacatgctgctcgccacctcatcacggtttcgcatgatgaacctgcaaggggaggagtttgtgtgcttaaaatccataattctcctgaactctggagtgtacacatttcttagtagcacactgaagtccctggaggaaaaggaccacatccacagagtgctggacaaaattacagatacgctcatccatttaatggccaaggccggactgaccctgcagcaacaacaccagcgtctggcccagctgctgctcatcctctcccacataaggcacatgtcaaataaaggaatggaacatctctactctatgaagtgtaaaaacgtggttcccctgtatgatctgctgctcgagatgcttgatgcgcaccgcctccatgctcccacatctcgagggggagcctctgtggaagaaacagaccagagtcacctcgctacagcgggtagcacgtccagccatagcttacagaaatactacattaccggagaagcagaagggtttcctgctacagtgtag

SEQ ID NO: 330056 - DNA, 1788 bp, Artificial Sequence
  derived and/or modified sequence
atgactatgactctgcacacaaaggccagtggtatggccctgctccatcaaatccagggaaacgagctggagccactgaatcgacctcagctcaagatcccgctggaacgaccgcttggcgaggtgtatttggattcctctaagccagccgtttataattatcccgaaggcgctgcttacgagtttaacgcagctgccgctgcgaatgctcaggtatacggacagacgggtctgccttacgggcctggtagcgaagccgcagcctttggatctaatgggctcggcggattccccccactgaactccgtgagtcccagcccccttatgctgctgcatccgcctccccagctaagtcctttccttcagccccacgggcaacaagttccatactacctcgagaacgaaccttccggatacacagttcgcgaagccggtcctcctgccttttatagaccaaactctgataaccgcaggcaggggggaagagaacgcttagcttccactaatgacaaagggagcatggctatggaatctgctaaggagaccaggtactgtgcggtgtgcaatgattatgcttccggctaccattacggagtctggtcatgcgagggctgcaaggctttttttaagcgaagtatccagggccacaatgactatatgtgccctgcgaccaatcagtgcactatcgacaagaatcgacgaaaatcctgtcaggcctgccggttgaggaagtgctacgaagtaggtatgatgaaagggggaattcgtaaagatcgaagaggaggtcggatgctcaaacacaaaaggcagcgggacgacggcgaaggcagaggggaggtgggatccgccggagacatgcgagccgcaaacttgtggccttccccactcatgattaaacgatccaaaaagaatagcctggccctgtccctcactgctgaccaaatggtgagcgccctgttagacgctgagcccccaatcctatacagtgagtatgacccgactcgacccttttctgaagcatctatgatggggctgctgacaaacctagctgatcgggaacttgtgcatatgatcaactgggcgaagagagttccaggtttcgttgatctaacccttcacgatcaggtccacctccttgagtgtgcctggttggaaatccttatgattgggcttgtgtggaggtccatggagcatcctggcaaacttctgtttgcaccaaatctactgctcgacaggaaccagggcaagtgtgtggaggggatggtggagatctttgatatgcttttggcgacttccagcagatttcgcatgatgaacctgcaaggggaggaattcgtgtgtttgaagtctatcatactactcaactccggcgtctacaccttcctgagttccacgctcaaatcccttgaggaaaaggaccacatccatcgagtccttgataaaatcactgacactcttatacatctgatggctaaggcaggtttgaccctccagcaacagcatcaacgcctcgcacagctgttacttattctgagtcatataagacacatgagcaacaaaggcatggaacacctttacagcatgaagtgcaagaatgtcgtgccactgtatgacctgctgctagagatgttagacgcacatcggcttcacgctcccacatcacggggaggagcttcagtcgaggagacggaccagtcccacctcgcaaccgccggatctacaagttcacacagcctgcaaaagtattatattaccggggaggctgaaggcttccctgccaccgtgtag

SEQ ID NO: 330057 - protein, 270 aa, Artificial Sequence
  derived and/or modified sequence
MCPATNQCTIDKNRRKSCQACRLRKCYEVGMMKGGIRKDRRGGRMLKHKRQRDDGEGRGEVGSAGDMRAANLWPSPLMIKRSKKNSLALSLTADQMVSALLDAEPPILYSEYDPTRPFSEASMMGLLTNLADRELVHMINWAKRVPGFVDLTLHDQVHLLECAWLEILMIGLVWRSMEHPGKLLFAPNLLLDSNKGMEHLYSMKCKNVVPLYDLLLEMLDAHRLHAPTSRGGASVEETDQSHLATAGSTSSHSLQKYYITGEAEGFPATV

SEQ ID NO: 330058 - DNA, 813 bp, Artificial Sequence
  derived and/or modified sequence
atgtgccccgccaccaaccagtgcaccatcgacaagaacagaagaaagagctgccaggcctgcagactgagaaagtgctacgaggtgggcatgatgaagggcggcatcagaaaggacagaagaggcggcagaatgctgaagcacaagagacagagagacgacggcgagggcagaggcgaggtgggcagcgccggcgacatgagagccgccaacctgtggcccagccccctgatgatcaagagaagcaagaagaacagcctggccctgagcctgaccgccgaccagatggtgagcgccctgctggacgccgagccccccatcctgtacagcgagtacgaccccaccagacccttcagcgaggccagcatgatgggcctgctgaccaacctggccgacagagagctggtgcacatgatcaactgggccaagagagtgcccggcttcgtggacctgaccctgcacgaccaggtgcacctgctggagtgcgcctggctggagatcctgatgatcggcctggtgtggagaagcatggagcaccccggcaagctgctgttcgcccccaacctgctgctggacagcaacaagggcatggagcacctgtacagcatgaagtgcaagaacgtggtgcccctgtacgacctgctgctggagatgctggacgcccacagactgcacgcccccaccagcagaggcggcgccagcgtggaggagaccgaccagagccacctggccaccgccggcagcaccagcagccacagcctgcagaagtactacatcaccggcgaggccgagggcttccccgccaccgtgtag

SEQ ID NO: 330059 - DNA, 933 bp, Artificial Sequence
  derived and/or modified sequence
atggccatggagagcgccaaggagaccagatactgcgccgtgtgcaacgactacgccagcggctaccactacggcgtgtggagctgcgagggctgcaaggccttcttcaagagaagcatccagggccacaacgactacatgtgccccgccaccaaccagtgcaccatcgacaagaacagaagaaagagctgccaggcctgcagactgagaaagtgctacgaggtgggcatgatgaagggcggcatcagaaaggacagaagaggcggcagaatgctgaagcacaagagacagagagacgacggcgagggcagaggcgaggtgggcagcgccggcgacatgagagccgccaacctgtggcccagccccctgatgatcaagagaagcaagaagaacagcctggccctgagcctgaccgccgaccagatggtgagcgccctgctggacgccgagccccccatcctgtacagcgagtacgaccccaccagacccttcagcgaggccagcatgatgggcctgctgaccaacctggccgacagagagctggtgcacatgatcaactgggccaagagagtgcccggcttcgtggacctgaccctgcacgaccaggtgcacctgctggagtgcgcctggctggagatcctgatgatcggcctggtgtggagaagcatggagcaccccggcaagctgctgttcgcccccaacctgctgctggacagaaaccagggcaagtgcgtggagggcatggtggagatcttcgacatgctgctggccaccagcagcagattcagaatgatgaacctgcagggcgaggagttcgtgtgcctgaagagcatcatcctgctgaacagcggcatcagccacgtggaggccaagaagagaatcctgaacctgcaccccaagatcttcggcaacaagtggttccccagagtgtag

SEQ ID NO: 330060 - DNA, 813 bp, Artificial Sequence
  derived and/or modified sequence
atgtgccctgccactaaccagtgcacaatagataagaataggagaaagagctgccaagcctgtagactgaggaagtgctacgaagtgggaatgatgaaagggggcattaggaaagatcgccgcggaggaagaatgttaaagcacaaaaggcagagagatgacggggaaggaaggggcgaggtcggatcggcaggagatatgagggcagccaacctgtggccatcaccactgatgatcaagcggagcaagaaaaattctctagcactttcccttactgcggatcaaatggtaagcgctctgctcgatgccgaaccgcccatcctctactccgagtacgatccgacgaggccctttagcgaggcctcgatgatgggcctcctaacaaatctcgctgatcgcgagctagtgcacatgattaactgggcaaagcgggtgccaggctttgtcgatcttacactgcacgatcaggttcatctgttagaatgcgcctggctggagattctgatgatcgggcttgtatggcgctccatggaacatcccggcaaactattatttgctcccaacttattgctggattcaaataaaggaatggagcatctatattccatgaagtgtaagaatgtggttccgctctatgacctgctcctggaaatgcttgatgcccaccggctgcacgctcctacctccagaggcggggcgtccgtcgaggagacagatcagtcacatctggctaccgccggatccacatcttcacactcactgcagaaatattacatcaccggagaggctgaaggtttcccagcaaccgtatag

SEQ ID NO: 330061 - DNA, 933 bp, Artificial Sequence
  derived and/or modified sequence
atggctatggagagcgcaaaagaaactcggtattgtgccgtctgtaacgattacgcctccggataccactatggcgtgtggtcatgcgaagggtgcaaggctttcttcaaacggagcattcaaggacataacgactacatgtgccctgctaccaatcagtgtaccatcgacaagaacaggagaaaatcctgccaagcatgcaggcttagaaagtgctatgaggtcggcatgatgaaggggggaattaggaaggataggagaggtggtagaatgcttaagcataaaagacagcgagacgatggagagggtagaggcgaggtggggagcgctggggatatgcgggccgctaacctgtggccaagccctctgatgatcaaaaggtcaaaaaagaatagcctggcactgtccctaactgccgaccagatggtgtctgctctccttgatgccgagccccctatactgtatagtgagtacgatcctacccgcccattctctgaggcctccatgatggggctgctgactaacctagctgatcgggagttggtccacatgatcaactgggctaaaagagtccccggattcgtggatctgaccttgcatgaccaagtccacttgctggagtgtgcttggttggaaatcctcatgattggcttagtctggcgcagtatggaacaccccggtaagttgcttttcgcccccaaccttctactggataggaaccaaggaaaatgcgtggagggcatggtggagatcttcgacatgctgcttgcaacaagctctaggtttaggatgatgaacctacagggagaggagttcgtttgcctgaaaagcattatcctgcttaattccggaatctcccatgtggaggccaaaaagagaatcctaaacttgcacccgaagatttttgggaacaaatggttcccacgcgtctag

SEQ ID NO: 330062 - DNA, 813 bp, Artificial Sequence
  derived and/or modified sequence
atgtgcccagccaccaaccagtgcaccatcgacaagaacagaaggaagagctgccaggcctgccgcctgaggaaatgttatgaggtgggcatgatgaagggcggcatcaggaaggaccggcggggcggccgcatgctgaagcacaagaggcagagagatgatggagagggccgcggggaggtgggcagcgctggggacatgagagctgccaacctgtggcccagccccctgatgatcaagaggagcaagaagaacagcctggccctgagcctgacagctgaccagatggtgtctgccctgctggatgctgagccccccatcctgtacagtgaatatgaccccacccggcccttcagcgaggcctccatgatgggcctgctgaccaacctggccgaccgggagctggtgcacatgatcaactgggccaagagggtgcccggctttgtggacctgaccctgcatgaccaggtgcacctgctggagtgtgcctggctggagatcctgatgattggcctggtgtggaggtccatggagcaccctgggaagctgctgtttgcccccaacctgctgctggacagcaacaagggcatggagcacctgtacagcatgaagtgcaagaatgtggtgcccctgtatgacctgctgctggagatgctggatgcccaccggctgcacgcccccaccagcagaggaggagcctctgtggaggagacagaccagagccacctggccacagctggcagcaccagcagccacagcctgcagaagtactacatcaccggggaggccgagggcttccctgccaccgtgtag

SEQ ID NO: 330063 - DNA, 933 bp, Artificial Sequence
  derived and/or modified sequence
atggccatggagagcgccaaggagacccgctactgtgctgtgtgcaatgactatgccagcggctaccactacggcgtgtggagctgtgagggctgcaaggccttcttcaagaggagcatccagggccacaatgactacatgtgcccagccaccaaccagtgcaccatcgacaagaacagaaggaagagctgccaggcctgccgcctgaggaaatgttatgaggtgggcatgatgaagggcggcatcaggaaggaccggcggggcggccgcatgctgaagcacaagaggcagagagatgatggagagggccgcggggaggtgggcagcgctggggacatgagagctgccaacctgtggcccagccccctgatgatcaagaggagcaagaagaacagcctggccctgagcctgacagctgaccagatggtgtctgccctgctggatgctgagccccccatcctgtacagtgaatatgaccccacccggcccttcagcgaggcctccatgatgggcctgctgaccaacctggccgaccgggagctggtgcacatgatcaactgggccaagagggtgcccggctttgtggacctgaccctgcatgaccaggtgcacctgctggagtgtgcctggctggagatcctgatgattggcctggtgtggaggtccatggagcaccctgggaagctgctgtttgcccccaacctgctgctggacaggaaccagggcaaatgtgtggagggcatggtggagatctttgacatgctgctggccaccagcagccgcttcaggatgatgaacctgcagggcgaggagtttgtgtgcctgaagagcatcatcctgctgaacagcggcatcagccacgtggaggccaagaagaggatcctgaacctgcaccccaagatcttcggcaacaagtggttcccccgggtgtag

SEQ ID NO: 330064 - DNA, 813 bp, Artificial Sequence
  derived and/or modified sequence
atgtgccccgccaccaaccagtgcaccatcgacaagaaccggcggaagagttgtcaggcatgcagattgaggaagtgttacgaggtaggtatgatgaagggcggcatcaggaaggacagaagagggggacgaatgcttaagcacaagcggcagagggatgacggagagggccgaggggaagtcggttcagctggggacatgcgcgctgccaatttatggcctagcccattgatgatcaagcggtcaaagaagaatagcttagctcttagcctcactgccgaccagatggtcagcgcactcctggacgccgagccaccaattctatactctgaatacgaccccactcgcccattttctgaagcaagcatgatgggtctgttaacaaatctggcggatcgggaactggtgcacatgatcaattgggctaaaagagttccaggtttcgtggacctcactcttcatgaccaggtgcacttgctcgagtgtgcctggttagagatactcatgatagggctcgtgtggcgttccatggagcatcccggtaagcttctattcgctcccaatctgctactggatagcaataaggggatggagcacctctacagcatgaagtgtaaaaatgtcgtaccgttgtatgacttgctgttagaaatgctggatgcgcatagactgcatgctcccacatcccgaggtggagcttcggtcgaggagacggaccagtctcacctcgctacagccggatccactagcagtcattctctccagaagtactatattacaggggaagcagagggattcccggcaactgtttag

SEQ ID NO: 330065 - DNA, 933 bp, Artificial Sequence
  derived and/or modified sequence
atggccatggagagcgccaaggagacccggtactgcgccgtgtgcaacgattacgcttctgggtatcactacggtgtgtggagctgtgaaggctgtaaggccttcttcaagcgttccatccaggggcacaacgattatatgtgcccagctacaaaccagtgtactattgataagaatcggaggaaaagttgccaggcctgccggctgaggaagtgttacgaggttggaatgatgaagggaggcattcgcaaagataggcgaggcggaaggatgctgaaacataaaagacagagagacgacggcgaaggacggggagaggtcggttcagccggagatatgcgtgccgctaacctgtggccttcacctctcatgattaaaagatcaaagaaaaatagcctcgctctgagcctcacagctgatcagatggtctccgccctgctggacgctgagccgccaattctctactccgaatatgaccccacacggccattttcagaagcctccatgatgggcctactgactaatctggccgatcgagaactggtgcacatgatcaattgggccaaaagagtcccagggttcgtcgacctgacgctccacgatcaagtgcacttgctggaatgcgcatggttggagatcctgatgatcggcctggtgtggagatcgatggaacatccagggaagcttctctttgcacccaatctgctcctggatcggaatcagggcaaatgtgtggagggcatggttgagattttcgatatgctgctcgccaccagtagtagattccgcatgatgaatctgcagggtgaagagttcgtctgtttaaagagcattatcctcttaaacagcgggatctctcatgttgaagccaagaagcgtattttgaacctgcaccctaaaattttcgggaataaatggtttccccgagtctag

SEQ ID NO: 330066 - DNA, 813 bp, Artificial Sequence
  derived and/or modified sequence
atgtgccccgctacaaaccagtgtactattgacaagaaccgacggaagtcatgccaggcatgtcggttgcgcaagtgctacgaagtcgggatgatgaaggggggaatacgtaaagaccggaggggtgggcgaatgctgaaacacaaacgtcagcgggatgatggagagggacggggtgaagtcgggagtgcgggagacatgagagccgctaacttatggccatcacccctcatgattaaacgttccaagaagaatagcctcgctctgagcctaactgccgatcaaatggttagcgccctgttggacgctgagcctccgattttgtacagcgagtacgatcccacacgtcctttcagcgaagcgtctatgatgggcctactgacaaacctggcggacagggagctggtgcacatgatcaattgggccaagcgggtacccggattcgtcgacttaactttacacgaccaggtccatcttctcgaatgtgcgtggctggagatcctgatgatcggcctggtctggaggtctatggagcatcccggaaagctcctttttgcgcctaatttactgctggactctaacaagggaatggaacacctttattcgatgaagtgcaagaacgtggttccactgtatgatttgttgctcgaaatgttagacgcgcaccgattacacgcacccacctcccgtggaggcgctagcgtggaggagacagaccaatcccatctagcaactgccggttccacgagttctcattcccttcagaaatattacatcacaggcgaagctgagggctttccagcaactgtgtag

SEQ ID NO: 330067 - DNA, 933 bp, Artificial Sequence
  derived and/or modified sequence
atggccatggagagtgcaaaggagacccggtattgcgcagtctgtaacgattatgccagtgggtaccactatggggtctggagctgtgaaggctgcaaagccttcttcaaaaggtctatccaaggacacaatgactatatgtgcccggcaaccaatcaatgcaccattgacaagaataggcgtaaatcttgccaggcctgtaggctgcggaaatgttacgaggtggggatgatgaaaggtggtatcaggaaagacaggagaggtggcagaatgttgaagcataaaaggcagagagacgacggggaaggtcgaggtgaagtcgggtccgcgggagatatgcgggctgcaaatctctggccgtccccgctgatgattaagcgcagcaaaaaaaattctttagctctttcgctgacagcggaccagatggtctcagcacttctggacgccgagcctccaattctgtacagtgaatacgacccgaccaggcctttctccgaggcctccatgatgggtctgctgaccaacctggctgaccgtgagctcgttcacatgattaattgggcaaagcgagtccccggtttcgttgacctaacgttacacgaccaggtgcacctgctggaatgcgcttggctagagattctgatgattggacttgtgtggcgaagcatggaacacccaggcaagctgctgttcgctccgaatttgctcctggatagaaaccaggggaaatgcgttgagggcatggtagaaatttttgacatgcttttggcaacaagctctagattccgcatgatgaacctccaaggggaagagttcgtgtgtttgaaaagcatcattctacttaattccggaatcagccacgtggaggccaaaaaaagaattttaaacttgcacccgaagattttcgggaataaatggtttcctcgggtttag

SEQ ID NO: 330068 - protein, 334 aa, Artificial Sequence
  derived and/or modified sequence
MTMTLHTKASGMALLHQIQGNELEPLNRPQLKIPLERPLGEVYLDSSKPAVYNYPEGAAYEFNAAAAANAQVYGQTGLPYGPGSEAAAFGSNGLGGFPPLNSVSPSPLMLLHPPPQLSPFLQPHGQQVPYYLENEPSGYTVREAGPPAFYRNQGKCVEGMVEIFDMLLATSSRFRMMNLQGEEFVCLKSIILLNSGVYTFLSSTLKSLEEKDHIHRVLDKITDTLIHLMAKAGLTLQQQHQRLAQLLLILSHIRHMSNKGMEHLYSMKCKNVVPLYDLLLEMLDAHRLHAPTSRGGASVEETDQSHLATAGSTSSHSLQKYYITGEAEGFPATV

SEQ ID NO: 330069 - protein, 107 aa, Artificial Sequence
  derived and/or modified sequence
HNDYMCPATNQCTIDKNRRKSCQACRLRKCYEVGMMKGGFVDLTLHDQVHLLECAWLEILMIGLVWRSMEHPGKLLFAPNLLLDRNQGKCVEGMVEIFDMLLATSSR

SEQ ID NO: 330070 - DNA, 549 bp, Artificial Sequence
  derived and/or modified sequence
atggagagcgccaaggagaccagatactgcgccgtgtgcaacgactacgccagcggctaccactacggcgtgtggagctgcgagggctgcaaggccttcttcaagagaagcatccagggccacaacgactacatgtgccccgccaccaaccagtgcaccatcgacaagaacagaagaaagagctgccaggcctgcagactgagaaagtgctacgaggtgggcatgatgaagggcggcatcagaaaggacagaagaggcggcagaatgctgaagcacaagctgctgctgatcctgagccacatcagacacatgagcaacaagggcatggagcacctgtacagcatgaagtgcaagaacgtggtgcccctgtacgacctgctgctggagatgctggacgcccacagactgcacgcccccaccagcagaggcggcgccagcgtggaggagaccgaccagagccacctggccaccgccggcagcaccagcagccacagcctgcagaagtactacatcaccggcgaggccgagggcttccccgccaccgtgtag

SEQ ID NO: 330071 - DNA, 1005 bp, Artificial Sequence
  derived and/or modified sequence
atgaccatgaccctgcacaccaaggccagcggcatggccctgctgcaccagatccagggcaacgagctggagcccctgaacagaccccagctgaagatccccctggagagacccctgggcgaggtgtacctggacagcagcaagcccgccgtgtacaactaccccgagggcgccgcctacgagttcaacgccgccgccgccgccaacgcccaggtgtacggccagaccggcctgccctacggccccggcagcgaggccgccgccttcggcagcaacggcctgggcggcttcccccccctgaacagcgtgagccccagccccctgatgctgctgcacccccccccccagctgagccccttcctgcagccccacggccagcaggtgccctactacctggagaacgagcccagcggctacaccgtgagagaggccggcccccccgccttctacagaaaccagggcaagtgcgtggagggcatggtggagatcttcgacatgctgctggccaccagcagcagattcagaatgatgaacctgcagggcgaggagttcgtgtgcctgaagagcatcatcctgctgaacagcggcgtgtacaccttcctgagcagcaccctgaagagcctggaggagaaggaccacatccacagagtgctggacaagatcaccgacaccctgatccacctgatggccaaggccggcctgaccctgcagcagcagcaccagagactggcccagctgctgctgatcctgagccacatcagacacatgagcaacaagggcatggagcacctgtacagcatgaagtgcaagaacgtggtgcccctgtacgacctgctgctggagatgctggacgcccacagactgcacgcccccaccagcagaggcggcgccagcgtggaggagaccgaccagagccacctggccaccgccggcagcaccagcagccacagcctgcagaagtactacatcaccggcgaggccgagggcttccccgccaccgtgtag

SEQ ID NO: 330072 - DNA, 324 bp, Artificial Sequence
  derived and/or modified sequence
cacaacgactacatgtgccccgccaccaaccagtgcaccatcgacaagaacagaagaaagagctgccaggcctgcagactgagaaagtgctacgaggtgggcatgatgaagggcggcttcgtggacctgaccctgcacgaccaggtgcacctgctggagtgcgcctggctggagatcctgatgatcggcctggtgtggagaagcatggagcaccccggcaagctgctgttcgcccccaacctgctgctggacagaaaccagggcaagtgcgtggagggcatggtggagatcttcgacatgctgctggccaccagcagcagatag

SEQ ID NO: 330073 - DNA, 1251 bp, Artificial Sequence
  derived and/or modified sequence
aggagctggcggagggcgttcgtcctgggactgcacttgctcccgtcgggtcgcccggcttcaccggacccgcaggctcccggggcagggccggggccagagctcgcgtgtcggcgggacatgcgctgcgtcgcctctaacctcgggctgtgctctttttccaggtggcccgccggtttctgagccttctgccctgcggggacacggtctgcaccctgcccgcggccacggaccatgaccatgaccctccacaccaaagcatctgggatggccctactgcatcagatccaagggaacgagctggagcccctgaaccgtccgcagctcaagatccccctggagcggcccctgggcgaggtgtacctggacagcagcaagcccgccgtgtacaactaccccgagggcgccgcctacgagttcaacgccgcggccgccgccaacgcgcaggtctacggtcagaccggcctcccctacggccccgggtctgaggctgcggcgttcggctccaacggcctggggggtttccccccactcaacagcgtgtctccgagcccgctgatgctactgcacccgccgccgcagctgtcgcctttcctgcagccccacggccagcaggtgccctactacctggagaacgagcccagcggctacacggtgcgcgaggccggcccgccggcattctacaggaaccagggaaaatgtgtagagggcatggtggagatcttcgacatgctgctggctacatcatctcggttccgcatgatgaatctgcagggagaggagtttgtgtgcctcaaatctattattttgcttaattctggagtgtacacatttctgtccagcaccctgaagtctctggaagagaaggaccatatccaccgagtcctggacaagatcacagacactttgatccacctgatggccaaggcaggcctgaccctgcagcagcagcaccagcggctggcccagctcctcctcatcctctcccacatcaggcacatgagtaacaaaggcatggagcatctgtacagcatgaagtgcaagaacgtggtgcccctctatgacctgctgctggagatgctggacgcccaccgcctacatgcgcccactagccgtggaggggcatccgtggaggagacggaccaaagccacttggccactgcgggctctacttcatcgcattccttgcaaaagtattacatcacgggggaggcagagggtttccctgccacggtctgagagctccctggc

SEQ ID NO: 330074 - DNA, 323 bp, Artificial Sequence
  derived and/or modified sequence
cataacgactatatgtgtccagccaccaaccagtgcaccattgataaaaacaggaggaagagctgccaggcctgccggctccgtaaatgctacgaagtgggaatgatgaaaggtggctttgtggatttgaccctccatgatcaggtccaccttctagaatgtgcctggctagagatcctgatgattggtctcgtctggcgctccatggagcacccagggaagctactgtttgctcctaacttgctcttggacaggaaccagggaaaatgtgtagagggcatggtggagatcttcgacatgctgctggctacatcatctcggtt

SEQ ID NO: 330075 - DNA, 549 bp, Artificial Sequence
  derived and/or modified sequence
atggaatctgccaaagagacgcgttactgtgcggtctgcaatgattatgcttctgggtaccattacggagtctggtcttgtgaggggtgcaaagctttttttaaacgctcaattcagggacacaacgactatatgtgtccagccactaatcagtgtaccattgacaagaacagacgtaaatcgtgccaagcatgcaggctcagaaagtgttacgaggtgggcatgatgaagggtggaattcgaaaagatcggcgcggcggtcgcatgctgaagcacaaactgctacttatcctatcacacatcagacacatgtctaacaaaggtatggaacacttgtatagtatgaaatgcaaaaacgtggtgcccctgtatgacttgttgttggaaatgctggatgcgcacaggctgcacgctcctacctctcgagggggggcctccgtggaagaaactgaccagtctcatctggcgaccgccggctcaaccagctctcatagcctgcagaagtactacattacaggggaggctgagggtttccccgctacagtctag

SEQ ID NO: 330076 - DNA, 1005 bp, Artificial Sequence
  derived and/or modified sequence
atgaccatgacactacatacaaaagcctcaggcatggcattgctgcaccagattcagggaaatgaactggagcctttaaacaggccccagctgaaaataccactggagcggcccctgggcgaggtataccttgatagcagtaaacccgcagtctataattatccggagggtgccgcgtacgaattcaatgcagcggccgcagcaaatgcacaggtgtacggccagaccggccttccatatggccctgggagtgaagcagccgcttttggatcaaacggactcggcggcttccctccgctcaacagcgtctcccctagcccactgatgttgttacatccgccaccccagctgtctccatttcttcaaccacacggtcaacaggtcccatattacttggagaatgagccttctgggtatacagtcagggaggctggtccccccgcattttaccgaaaccagggcaagtgcgtagaaggcatggtggagatctttgacatgctcctggccactagctcgagatttagaatgatgaacttacaaggagaggagtttgtctgtctgaagtccattatcttactgaacagcggcgtttacacattcttaagcagtaccctaaagtccctagaggagaaagatcatatacaccgggtcctcgacaaaatcaccgacactttaatccaccttatggctaaggccggcctgactttacagcagcagcaccagcgtctggcccaactcctcttgattttgagtcatatcaggcatatgtccaacaagggcatggaacacctctatagcatgaagtgtaaaaacgtggtgccactgtatgatttgctcctagaaatgttagatgcgcatcgcctgcatgcacccactagccgaggcggagcaagcgtggaggaaacagatcagagccatctagccaccgccggttccactagttcacattctctccaaaagtactatatcacaggcgaagctgaagggttcccagctacggtgtag

SEQ ID NO: 330077 - DNA, 324 bp, Artificial Sequence
  derived and/or modified sequence
cacaatgattatatgtgtccagccacgaatcaatgtaccattgataaaaatagaagaaaatcatgtcaggcctgccggctgcgcaaatgctacgaggtaggaatgatgaaaggtggatttgtggatctgaccctgcacgaccaggtccatctcctcgaatgcgcctggctagaaatcctaatgattggtcttgtttggaggtcgatggagcatcccggtaaactcctgttcgcgcccaacctcctcctcgaccgcaaccaaggcaagtgcgttgaggggatggtcgaaattttcgacatgctccttgccaccagcagcagatag

SEQ ID NO: 330078 - DNA, 549 bp, Artificial Sequence
  derived and/or modified sequence
atggagagcgccaaggagacccgctactgtgctgtgtgcaatgactatgccagcggctaccactacggcgtgtggagctgtgagggctgcaaggccttcttcaagaggagcatccagggccacaatgactacatgtgcccagccaccaaccagtgcaccatcgacaagaacagaaggaagagctgccaggcctgccgcctgaggaaatgttatgaggtgggcatgatgaagggcggcatcaggaaggaccggcggggcggccgcatgctgaagcacaagctgctgctgatcctgagccacatccgccacatgagcaacaagggcatggagcacctgtacagcatgaagtgcaagaatgtggtgcccctgtatgacctgctgctggagatgctggatgcccaccggctgcacgcccccaccagcagaggaggagcctctgtggaggagacagaccagagccacctggccacagctggcagcaccagcagccacagcctgcagaagtactacatcaccggggaggccgagggcttccctgccaccgtgtag

SEQ ID NO: 330079 - DNA, 1005 bp, Artificial Sequence
  derived and/or modified sequence
atgaccatgaccctgcacaccaaggccagcggcatggccctgctgcaccagatccagggcaatgagctggagcccctgaaccggccccagctgaagatccccctggagcggcccctgggggaggtgtacctggacagcagcaagccagctgtgtacaactacccagagggcgccgcctatgagttcaatgctgctgctgctgccaatgcccaggtgtatggccagacaggcctgccctacggccctggcagcgaggccgccgccttcggcagcaatggcctgggcggcttcccccccctgaacagcgtgagccccagccccctgatgctgctgcaccccccaccccagctgagccccttcctgcagccccacggccagcaggtgccctactacctggagaatgagcccagcggctacacagtgcgggaggccggccccccagccttctacagaaaccagggcaaatgtgtggagggcatggtggagatctttgacatgctgctggccaccagcagccgcttcaggatgatgaacctgcagggcgaggagtttgtgtgcctgaagagcatcatcctgctgaacagcggcgtgtacaccttcctgagcagcaccctgaagagcctggaggagaaggaccacatccaccgggtgctggacaagatcacagacaccctcatccacctgatggccaaggccggcctgaccctgcagcagcagcaccagaggctggcccagctgctgctgatcctgagccacatccgccacatgagcaacaagggcatggagcacctgtacagcatgaagtgcaagaatgtggtgcccctgtatgacctgctgctggagatgctggatgcccaccggctgcacgcccccaccagcagaggaggagcctctgtggaggagacagaccagagccacctggccacagctggcagcaccagcagccacagcctgcagaagtactacatcaccggggaggccgagggcttccctgccaccgtgtag

SEQ ID NO: 330080 - DNA, 324 bp, Artificial Sequence
  derived and/or modified sequence
cacaatgactacatgtgcccagccaccaaccagtgcaccatcgacaagaacagaaggaagagctgccaggcctgccgcctgaggaaatgttatgaggtgggcatgatgaagggcggctttgtggacctgaccctgcatgaccaggtgcacctgctggagtgtgcctggctggagatcctgatgattggcctggtgtggaggtccatggagcaccctgggaagctgctgtttgcccccaacctgctgctggacaggaaccagggcaaatgtgtggagggcatggtggagatctttgacatgctgctggccaccagcagcaggtag

SEQ ID NO: 330081 - DNA, 549 bp, Artificial Sequence
  derived and/or modified sequence
atggagagcgccaaggagacccggtactgcgccgtgtgcaacgactacgcttctggataccactacggtgtctggagttgtgaaggatgcaaggccttcttcaagaggtcaattcaaggacataacgactatatgtgccctgccactaatcagtgtacaatcgacaaaaatcggagaaaatcttgccaagcgtgtcgcttaagaaaatgctacgaagtgggaatgatgaaaggaggtattcgcaaggatagacggggggggaggatgttaaagcataaactgctgttgatcctgtcgcacatccggcacatgtccaataaaggtatggagcacctctacagcatgaagtgcaaaaacgtggtccctctctacgacctgctcctcgagatgcttgacgcccacaggttgcacgcccctacatcccgcgggggcgcctctgtggaagagacggatcaatcccatcttgcaaccgcaggttcaacaagcagccattctcttcagaagtactacataactggagaggcggaggggttcccggcaaccgtgtag

SEQ ID NO: 330082 - DNA, 1005 bp, Artificial Sequence
  derived and/or modified sequence
atgaccatgaccctgcacaccaaggccagcggcatggccctgctgcatcagatccaggggaatgagctagagccccttaatcggccccagctgaaaatacctctcgaaaggccactgggcgaggtgtacctggattcatcaaagcccgccgtgtacaattaccctgaaggagcagcgtatgaatttaacgctgccgcagccgccaatgcccaagtgtatggccaaaccgggttgccttacgggcccggatccgaagcagctgcctttggctcaaacggtctcggtggctttcctccattaaacagcgtctctccaagtccattgatgcttctccacccgcctccccaactcagtccatttctgcaaccccacggccagcaggtgccatattatctggaaaacgagccctcgggctacaccgtccgcgaggcaggacccccggcattctacagaaatcaaggcaaatgcgtggagggaatggtggagatcttcgatatgctgctggctacttcaagcaggtttcggatgatgaacctccagggcgaggagttcgtctgtctaaagtctatcatcctactcaactcgggagtgtataccttcctttcaagtacgcttaagtcacttgaagaaaaggaccatatccaccgcgttttggataaaatcacggacactctgatccacctgatggccaaagcaggacttacactacaacagcaacatcaacgactagcccagttattgctgattctatcccacatccgccacatgtccaataagggcatggagcacctatactctatgaaatgcaagaatgtagtaccattatacgatctattactggaaatgctcgatgctcacaggctgcacgccccgacttcaagggggggtgcctcagttgaagagacagatcagtcgcacctagccacagccggtagcacctctagccacagcctgcagaagtactacataaccggtgaggccgaagggtttccagctacagtgtag

SEQ ID NO: 330083 - DNA, 324 bp, Artificial Sequence
  derived and/or modified sequence
cacaacgactacatgtgccccgccaccaaccagtgcaccatcgacaaaaacagacggaagtcctgccaggcgtgtagactccggaagtgctacgaggtgggtatgatgaaaggcggttttgtcgacctaactctccacgatcaggtacatctgttggagtgtgcgtggttggaaattctgatgatcggccttgtgtggagaagtatggagcaccctgggaagcttctcttcgccccgaatcttctcctggatagaaaccaaggtaaatgcgtagaaggtatggtggagattttcgatatgctgcttgctacttcatcacgctag

SEQ ID NO: 330084 - DNA, 549 bp, Artificial Sequence
  derived and/or modified sequence
atggagtccgctaaagagactcgatactgtgcagtttgcaacgactacgcttccggctaccattacggtgtctggtcttgcgaaggttgcaaagcttttttcaaacgcagcatacagggacacaatgattacatgtgccctgccaccaaccagtgtactatcgacaaaaacaggcgaaagagctgccaagcctgcaggctgagaaagtgttatgaggtgggaatgatgaaaggaggaattcgcaaagatagacgaggcggtcgcatgctcaagcacaagttacttctgattctgtcccacataaggcacatgagtaacaaaggcatggaacacctctactcaatgaaatgtaagaacgtggtcccactatacgatctattacttgagatgctcgatgcacaccgactacacgccccaacatcgcgaggtggggcatctgtcgaagaaaccgaccagtctcatctggccaccgcagggtcgactagttcccactctctgcagaaatactacattactggggaggccgaagggttccctgcgaccgtgtag

SEQ ID NO: 330085 - DNA, 1005 bp, Artificial Sequence
  derived and/or modified sequence
atgactatgaccctgcacactaaagcctccggcatggcgctcctgcaccagatccagggcaatgagcttgaacctctcaacagaccgcagctgaaaattcctctggaaagacctttaggggaagtctacctggattcgagcaaaccggctgtttacaactaccccgagggcgcagcttacgagtttaatgccgctgcggctgccaacgcacaggtatacgggcagacagggttgccctatggacccggatcggaagcagcggcattcgggagcaacggcttgggcggtttcccccctctcaatagtgtgtctcccagccccttgatgttattacacccacccccacagttaagccctttcctgcagccacacggacagcaggtgccttactacctggagaacgagcctagcggatatacagttcgagaagcgggaccccctgcattttaccggaaccaggggaaatgcgtcgagggaatggtggaaatcttcgacatgctgcttgcgacctcttcccgattcagaatgatgaacttgcagggcgaagagtttgtgtgtctgaagtctatcatcctactcaattccggtgtgtacaccttcttgtcttctactcttaagtctctggaagaaaaagaccatattcacagggtgttggacaaaattacagacacactcattcacttgatggctaaggccggactcaccctccaacaacagcaccagcggttggcccagttgcttctgatactctctcatatcagacatatgagcaataaaggaatggaacacctttactctatgaaatgcaaaaatgtggtgccactgtatgacctgctactcgagatgctagatgcacaccgtctccatgccccaacatcgcgcggaggcgcaagcgtggaagaaaccgaccaatcgcatctagcgacggctggtagtaccagctcccactctctgcaaaagtattacatcacaggcgaagctgagggtttccccgctactgtgtag

SEQ ID NO: 330086 - DNA, 324 bp, Artificial Sequence
  derived and/or modified sequence
cacaacgactacatgtgcccagcgaccaaccagtgtaccatcgataaaaaccgtcgcaagtcctgtcaggcatgccgcttgagaaaatgttacgaggtcgggatgatgaaggggggatttgttgatctcactctgcacgaccaggtccacttgcttgagtgcgcgtggttggagatccttatgataggtcttgtctggaggagcatggagcaccccggaaagctcttgtttgcgccaaatctcctgctggacagaaaccaaggtaaatgcgtagagggaatggtggagatttttgacatgctcctggccaccagtagccgctag

SEQ ID NO: 330087 - protein, 362 aa, Artificial Sequence
  derived and/or modified sequence
MKERKRHLGDTKHFCPVVLKENFILQPGNTEEAAKYREKIYYFSSAEAKEKFLEHPEDYVAHEEPLKAPPLRICLVGPQGSGKTMCGRQLAEKLNIFHIQFEEVLQEKLLLKTEKKVGPEFEEDSENEQAAKQELEELAIQANVKVEEENTKKQLPEVQLTEEEEVIKSSLMENEPLPPEILEVILSEWWLKEPIRSTGFILDGFPRYPEEAQFLGDRGFFPDAAVFIQVDDQDIFDRLLPAQIEKWKLKQKKKLERKKLIKDMKAKIRVDTIAKRRAELILERDKKRREPNKEKRKRGISENTTCYKCNHMSPWCEYAGLPYRGLLILYSATATATAGTKHCRSGAKVIVALSKQNIHNQK

SEQ ID NO: 330088 - DNA, 3929 bp, Artificial Sequence
  derived and/or modified sequence
gaggtcgggtagaggctcccgggacctgcgtgctgccgagagaggaagcgaagggcaccatctttgtattttgtgtcatgacttctcaagagaagacagaagagtatccttttgcagatatatttgatgaagatgaaactgaaaggaattttttgttgtccaaacctgtttgctttgttgtatttgggaaaccaggtgttgggaaaacaacattagcccgttacataacacaggcatggaaatgtattcgtgttgaagctttgccaattttagaagaacagattgctgctgaaaccgaatcaggagttatgttgcaatcaatgttgatcagcggtcaaagcattccagatgaacttgtcataaagctaatgttggagaagctcaactccccagaagtctgtcactttggttatattatcactgaaataccatcactttcacaggatgccatgactaccttacagcaaatagaattaattaaaaacttaaacctgaaacctgatgttataatcaatataaagtgtcctgactatgatttgtgccagagaatttctgggcaaagacagcacaataatacgggatacatatacagtagagaccagtgggatcctgaagtcattgagaatcataggaaaaagaagaaagaagcccaaaaggacggaaaaggagaagaggaagaagaggaagaagagcaagaagaagaagaggcatttattgccgaaatgcagatggtggctgaaattcttcatcatctagttcagaggcctgaagattatttggaaaatgttgaaaacattgttaagctttataaggaaacaattctccaaactttagaagaagtaatggctgaacacaatccccagtatctcattgagctaaatggaaataaaccagcagaggagctctttatgattgttatggatcgacttaaatatctgaacctaaaaagagcagctattctaaccaaacttcagggtgcagaggaagaaattaatgacacaatggaaaatgatgagctatttcgtactcttgcatcttataaacttattgcaccaagatacagatggcaaagaagtaaatggggacgtacatgtcctgtgaatttaaaagatggtaacatttattcaggattaccagattattctgtgagttttctaggtaaaatctactgtctttcatcagaagaagcattaaaaccatttttgttgaacccacgtccctatctgcttccacctatgccaggaccaccatgtaaagtattcatacttggacctcaatattcagggaaaacaacactttgcaatatgcttgcagaaaattacaaaggaaaggtagtcgactatgcccaacttgttcagccacgttttgataaagcccgtgaaacattagtagaaaataccatagctgaggccactgcagcagcaattaaagttgtgaaagaaaagcttctcagggaactgcaagctagaaaacaagctgaaacagctttaagagaatttcaaaggcaatatgaaaaaatggagtttggagtattcccaatggaggcaacacactcatcaattgatgaagaagggtacattcaaggctcccaaagggacagaggcagctctttagtggacaccgaagaagccaaaacaaagtcagaaaatgtcctccatgatcaagctgctaaagttgataaagatgatggaaaagaaactggtgaaacattcacatttaaaaggcattctcaagatgctagtcaagatgtaaagttgtattcagatacagccccaacagaagacttgatagaagaggtaactgcagatcatccagaggttgtgaccatgattgaagagactataaaaatgtcacaggatataaactttgaacagccatatgaaaaacatgctgaaatcttacaggaagtccttggagaggtaatggaagaaaacaaggataggtttcctggtgccccaaaatatggaggctggattgtggacaactgccctattgtaaaagaattgtggatggccttaatcaagaaaggaattatacctgatttggtcatctatttatcagatacagaaaacaatggaaaatgtttatttaatagaatatatttacagaagaaatctgaaattgactctaagattttagaaagattattagaagaactacaaaagaaaaaaaaagaagaagaagaagcaagaaaagccacagaagaggaattgagactcgaagaagaaaatcgaaggctactggaacttatgaaagtgaaggcaaaagaagctgaagagactgataatgaggatgaagaggagattgaaggtgatgagttggaagttcacgaagagcctgaggcatctcacgatacccgagggtcatggttacctgaggagtttgaagcatctgaggtccctgaaactgagcctgaagcagtatctgagcctatcgaggaaactacagtggaaacagaaatcccaaaaggatccaaagagggcctggaaattgaaaaattatctgaaacagttgtactacctgagtttccagaagactcttatcctgatgttcccgaaatggagccatttaaagagaagattggttctttcatcatcctctggaaacagctagaagcaacaattagtgaggcttacattaaaattttaaacttggagattgctgacagaactccacaggaattacttcaaaaagtagttgagactatggaaaaaccatttcaatatactgcatgggagttaactggggaagattatgaggaagaaacagaagactaccagactgaagcagaggttgatgaggagctagaggaagaggaagaggaagagggtgaagataaaatgaaggagagaaagaggcatttgggagacacaaaacacttttgtccggtggtcctcaaagaaaacttcatcctgcaaccaggaaacacagaagaagcagccaagtatcgagaaaagatctactacttttcaagtgctgaggctaaagaaaagtttttggagcatcctgaggattatgtggctcatgaagaaccattgaaggctcctccattaagaatatgccttgtcggcccccagggctctggcaaaactatgtgtggaagacagttggcagaaaaattaaacatttttcacattcagtttgaagaagttcttcaagaaaaactactactcaaaactgaaaagaaagtgggacctgaatttgaggaagattctgagaacgagcaagctgccaaacaagaacttgaagagcttgcaattcaggccaatgtcaaagttgaggaagaaaatacaaaaaagcagcttccagaagtacaacttacagaagaagaagaagtaatcaaatcaagtctaatggaaaatgagcccttgcctcctgaaattcttgaagtaattctttctgagtggtggcttaaggaaccaatacgttccacaggttttatattagatggtttcccacgatatccagaagaggcccagtttttgggagatcgtggatttttcccagatgcagctgtttttatacaagttgatgatcaagatatttttgatcgcctccttcctgcccaaattgaaaagtggaaactaaaacaaaagaagaaattagaaaggaagaaactgatcaaagacatgaaggcaaaaatcagggttgatacgattgctaaaagaagggctgaacttatattagagagagataaaaaaaggagggagccaaacaaggagaagagaaaaagaggaatatcagaaaatacaacttgctacaagtgcaaccacatgtcaccctggtgtgaatatgctggacttccgtacagaggactgctgatattgtacagtgcaactgcaactgcaactgcaggcacaaagcattgcagaagcggggccaaagtaattgttgctttgtcaaaacaaaatattcacaaccaaaagtag

SEQ ID NO: 330089 - protein, 227 aa, Artificial Sequence
  derived and/or modified sequence
MLQSMLISGQSIPDELVIKLMLEKLNSPEVCHFGYIITEIPSLSQDAMTTLQQIELIKNLNLKPDVIINIKCPDYDLCQRISGQRQHNNTGYIYSRDQWDPEVIENHRKKKKEAQKDGKGEEEEEEEEQEEEEAFIAEMQMVAEILHHLVQRPEDYLENVENIVKLYKETILQTLEEVMAEHNPQYLIELNGNKPAEELFMIVMDRLKYLNLKRAAILTKLQGAEEE

SEQ ID NO: 330090 - DNA, 1089 bp, Artificial Sequence
  derived and/or modified sequence
atgaaggagagaaagagacacctgggcgacaccaagcacttctgccccgtggtgctgaaggagaacttcatcctgcagcccggcaacaccgaggaggccgccaagtacagagagaagatctactacttcagcagcgccgaggccaaggagaagttcctggagcaccccgaggactacgtggcccacgaggagcccctgaaggccccccccctgagaatctgcctggtgggcccccagggcagcggcaagaccatgtgcggcagacagctggccgagaagctgaacatcttccacatccagttcgaggaggtgctgcaggagaagctgctgctgaagaccgagaagaaggtgggccccgagttcgaggaggacagcgagaacgagcaggccgccaagcaggagctggaggagctggccatccaggccaacgtgaaggtggaggaggagaacaccaagaagcagctgcccgaggtgcagctgaccgaggaggaggaggtgatcaagagcagcctgatggagaacgagcccctgccccccgagatcctggaggtgatcctgagcgagtggtggctgaaggagcccatcagaagcaccggcttcatcctggacggcttccccagataccccgaggaggcccagttcctgggcgacagaggcttcttccccgacgccgccgtgttcatccaggtggacgaccaggacatcttcgacagactgctgcccgcccagatcgagaagtggaagctgaagcagaagaagaagctggagagaaagaagctgatcaaggacatgaaggccaagatcagagtggacaccatcgccaagagaagagccgagctgatcctggagagagacaagaagagaagagagcccaacaaggagaagagaaagagaggcatcagcgagaacaccacctgctacaagtgcaaccacatgagcccctggtgcgagtacgccggcctgccctacagaggcctgctgatcctgtacagcgccaccgccaccgccaccgccggcaccaagcactgcagaagcggcgccaaggtgatcgtggccctgagcaagcagaacatccacaaccagaagtag

SEQ ID NO: 330091 - DNA, 1089 bp, Artificial Sequence
  derived and/or modified sequence
atgaaggagagaaaacgtcatctgggcgatacgaaacatttctgccccgtcgtgctgaaggagaatttcatactgcaaccaggcaacacggaggaagcggcgaaataccgagaaaagatctattacttttcttcagctgaagccaaagagaaatttcttgagcaccctgaagactacgttgcgcacgaagaaccattgaaagcacccccgctgcggatctgtttggtcgggccccagggatccgggaaaacaatgtgcggacgtcagttagccgaaaagctgaacatcttccatattcaattcgaagaggtcctgcaagagaagcttctcctaaagacagaaaaaaaagtaggccctgagtttgaagaagattctgagaatgagcaggcagcgaaacaggagcttgaggagctcgctatccaggctaatgtgaaggtcgaagaagaaaacacaaagaaacagctgcccgaagttcagttgaccgaggaggaagaggttataaagagctccctgatggagaatgagcccttgcctccagaaatcctggaggtgatcctttcagagtggtggctcaaagaaccgattcggagtacgggattcattttggatggatttcctcgatacccagaggaagctcagtttttgggtgaccggggttttttccccgacgccgcggtatttattcaggtcgatgatcaggatatcttcgatcggctcctgccggctcagattgaaaaatggaagctgaagcagaaaaagaagctagagcgcaagaagctgattaaagatatgaaggccaaaattcgcgttgatactatcgcgaaacgcagagccgagctcatcctggaaagagacaagaaacggcgagagcctaacaaagaaaaaagaaagagagggatctccgagaataccacgtgctataaatgcaatcacatgtcgccatggtgcgaatacgcaggcctcccctatcgaggactgcttatattgtattctgccactgctactgccacagcaggcactaaacactgtcggtcgggggctaaggtgattgtcgccctgagcaagcagaatattcacaaccaaaagtag

SEQ ID NO: 330092 - DNA, 1089 bp, Artificial Sequence
  derived and/or modified sequence
atgaaggagaggaagaggcacctgggggacaccaagcacttctgccctgtggtgctgaaggagaacttcatcctgcagcccggcaacacagaggaggccgccaagtaccgggagaagatctactacttcagcagcgctgaggccaaggagaagttcctggagcacccagaagattatgtggcccacgaggagcccctgaaggccccacccctgcgcatctgcctggtgggcccccagggcagcggcaagaccatgtgtggccggcagctggccgagaagctgaacatcttccacatccagtttgaggaggtgctgcaggagaagctgctgctgaagacagagaagaaggtgggccctgagtttgaagaagattctgaaaatgagcaggccgccaagcaggagctggaggagctggccatccaggccaacgtgaaggtggaggaggagaacaccaagaagcagctgcctgaggtgcagctgacagaggaggaggaggtgatcaagagcagcctgatggagaatgagcccctgcccccagagatcctggaggtgatcctgtctgagtggtggctgaaggagcccatccgcagcacaggcttcatcctggatggcttcccccgctacccagaggaggcccagttcctgggggaccggggcttcttcccagatgctgctgtgttcatccaggtggatgaccaggacatctttgaccggctgctgcctgcccagatcgagaagtggaagctgaagcagaagaagaagctggagaggaagaagctgatcaaggacatgaaggccaagatccgggtggacaccatcgccaagagaagagctgagctgatcctggagcgggacaagaagaggcgggagcccaacaaggagaagaggaagaggggcatcagcgagaacaccacctgctacaagtgcaaccacatgagcccctggtgtgaatatgccggcctgccctaccggggcctgctgatcctgtacagcgccacagccacagccacagctggcaccaagcactgccgcagcggggccaaggtgattgtggccctgagcaagcagaacatccacaaccagaagtag

SEQ ID NO: 330093 - DNA, 1089 bp, Artificial Sequence
  derived and/or modified sequence
atgaaggagcggaagcggcacctgggcgacaccaagcacttctgccccgttgtcctgaaggaaaactttattctgcaaccagggaacactgaggaggcagcgaaataccgagaaaaaatatactattttagttcagccgaggccaaggagaaattcttggagcatcctgaggactacgtggctcatgaagaacctctgaaagctccgcctctgcgcatctgcctggtcggcccgcagggctccggcaagaccatgtgcgggcggcagctagcagagaagctgaacatctttcatattcagtttgaagaggtactgcaagaaaagttgcttctcaagacagaaaagaaagtagggcccgaattcgaggaggatagtgagaatgagcaggccgccaaacaagaactcgaggaattagccattcaggccaatgtgaaggtggaggaggagaatacaaaaaaacagcttcctgaggtccagctcacagaagaggaagaagtgataaagtcctcattaatggaaaatgagcctctgccacccgagattttagaggtgattctgtccgagtggtggctcaaggagcctatccggtcgacaggcttcatcctcgacggatttccaaggtatcctgaggaggcgcagttcttgggagaccgggggtttttccctgatgccgccgtcttcattcaggtagatgaccaagatatctttgatagacttctcccagcgcaaatcgaaaaatggaagcttaaacaaaaaaagaaactcgagcggaagaagctcatcaaagacatgaaagccaaaattagagtcgatactatcgccaagcggagagcagagctgattctggaacgtgacaagaagcgccgcgagcccaataaggagaagcgcaaaagaggcatcagtgagaacactacctgctataagtgcaaccacatgtccccttggtgcgaatacgccggcctgccgtacagaggtcttcttattctttatagtgcgaccgctaccgcgacagctggcacaaagcactgccgctcgggggccaaagtcatagtggcccttagcaaacagaatatacacaatcagaagtag

SEQ ID NO: 330094 - DNA, 1089 bp, Artificial Sequence
  derived and/or modified sequence
atgaaggaaaggaaaagacacttaggagacactaaacacttctgccctgtcgtcttgaaagagaacttcatactgcaacctggcaacaccgaagaggcagcaaagtaccgcgaaaagatctactacttctcctctgctgaggctaaggagaagttcctggagcatcccgaagactacgttgcccatgaggagcctcttaaggcaccccctctgagaatttgtctggtagggccacaaggtagtgggaaaacaatgtgcgggagacagctggcagagaagcttaacatcttccatatccaatttgaagaagtgctccaggagaaacttttgctcaaaacggaaaaaaaagtaggcccagagtttgaagaagattcagagaatgagcaggccgctaagcaagaactcgaggaattagcaatccaggcaaacgtgaaggttgaagaggaaaataccaagaagcagctacctgaggtgcagcttactgaggaggaagaggtgatcaaaagttcattaatggagaatgaacccctgccccctgagattcttgaagtcatactcagcgagtggtggttgaaagaacccatacggtcaaccgggttcatcctcgacggattccccagataccccgaggaagcccaatttctgggcgaccgcggtttctttccagatgccgcagtgttcatccaagtggacgaccaggatattttcgaccgcctgttgccggctcagattgagaagtggaaattgaagcagaagaaaaaactcgagcgtaagaaactgattaaggatatgaaggccaagatccgcgtggataccatcgcaaaacggagagcagagcttatcctcgagagggacaagaagaggcgggaacccaataaagagaaaaggaaacgcggtatttccgaaaacacaacatgctataagtgtaaccatatgagtccatggtgtgaatacgctgggctaccctaccgcggtctcctgatcctctactccgccactgctactgccaccgccggtactaagcattgtcgttcaggtgcaaaggtgatcgtggctctctctaaacagaacatccataatcagaaatag

SEQ ID NO: 330095 - protein, 421 aa, Artificial Sequence
  derived and/or modified sequence
MTSQEKTEEYPFADIFDEDETERNFLLSKPVCFVVFGKPGVGKTTLARYITQAWKCIRVEALPILEEQIAAETESGVMLQSMLISGQSIPDELVIKLMLEKLNSPEVCHFGYIITEIPSLSQDAMTTLQQIELIKNLNLKPDVIINIKCPDYDLCQRISGQRQHNNTGYIYSRDQWDPEVIENHRKKKKEAQKDGKGEEEEEEEEQEEEEAFIAEMQMVAEILHHLVQRPEDYLENVENIVKLYKETILQTLEEVMAEHNPQYLIELNGNKPAEELFMIVMDRLKYLNLKRAAILTKLQGAEEEINDTMENDELFRTLASYKLIAPRYRWQRSKWGRTCPVNLKDGNIYSGLPDYSVSFLGKIYCLSSEEALKPFLLNPRPYLLPPMPGPPCKVFILGPQYSGKTTLCNMLAENYKGKVTN

SEQ ID NO: 330096 - protein, 736 aa, Artificial Sequence
  derived and/or modified sequence
MTSQEKTEEYPFADIFDEDETERNFLLSKPVCFVVFGKPGVGKTTLARYITQAWKCIRVEALPILEEQIAAETESGVMLQSMLISGQSIPDELVIKLMLEKLNSPEVCHFGYIITEIPSLSQDAMTTLQQIELIKNLNLKPDVIINIKCPDYDLCQRISGQRQHNNTGYIYSRDQWDPEVIENHRKKKKEAQKDGKGEEEEEEEEQEEEEAFIAEMQMVAEILHHLVQRPEDYLENVENIVKLYKETILQTLEEVMAEHNPQYLIELNGNKPAEELFMIVMDRLKYLNLKRAAILTKLQGAEEEINDTMENDELFRTLASYKLIAPRYRWQRSKWGRTCPVNLKDGNIYSGLPDYSVSFLGKIYCLSSEEALKPFLLNPRPYLLPPMPGPPCKVFILGPQYSGKTTLCNMLAENYKGKVVDYAQLVQPRFDKARETLVENTIAEATAAAIKVVKEKLLRELQARKQAETALREFQRQYEKMEFGVFPMEATHSSIDEEGYIQGSQRDRGSSLVDTEEAKTKSENVLHDQAAKVDKDDGKETGETFTFKRHSQDASQDVKLYSDTAPTEDLIEEVTADHPEVVTMIEETIKMSQDINFEQPYEKHAEILQEVLGEVMEENKDRFPGAPKYGGWIVDNCPIVKELWMALIKKGIIPDLVIYLSDTENNGKCLFNRIYLQKKSEIDSKILERLLEELQKKKKEEEEARKATEEELRLEEENRRLLELMKVKAKGKHRLL

SEQ ID NO: 330097 - DNA, 2211 bp, Artificial Sequence
  derived and/or modified sequence
atgaccagccaggagaagaccgaggagtaccccttcgccgacatcttcgacgaggacgagaccgagagaaacttcctgctgagcaagcccgtgtgcttcgtggtgttcggcaagcccggcgtgggcaagaccaccctggccagatacatcacccaggcctggaagtgcatcagagtggaggccctgcccatcctggaggagcagatcgccgccgagaccgagagcggcgtgatgctgcagagcatgctgatcagcggccagagcatccccgacgagctggtgatcaagctgatgctggagaagctgaacagccccgaggtgtgccacttcggctacatcatcaccgagatccccagcctgagccaggacgccatgaccaccctgcagcagatcgagctgatcaagaacctgaacctgaagcccgacgtgatcatcaacatcaagtgccccgactacgacctgtgccagagaatcagcggccagagacagcacaacaacaccggctacatctacagcagagaccagtgggaccccgaggtgatcgagaaccacagaaagaagaagaaggaggcccagaaggacggcaagggcgaggaggaggaggaggaggaggagcaggaggaggaggaggccttcatcgccgagatgcagatggtggccgagatcctgcaccacctggtgcagagacccgaggactacctggagaacgtggagaacatcgtgaagctgtacaaggagaccatcctgcagaccctggaggaggtgatggccgagcacaacccccagtacctgatcgagctgaacggcaacaagcccgccgaggagctgttcatgatcgtgatggacagactgaagtacctgaacctgaagagagccgccatcctgaccaagctgcagggcgccgaggaggagatcaacgacaccatggagaacgacgagctgttcagaaccctggccagctacaagctgatcgcccccagatacagatggcagagaagcaagtggggcagaacctgccccgtgaacctgaaggacggcaacatctacagcggcctgcccgactacagcgtgagcttcctgggcaagatctactgcctgagcagcgaggaggccctgaagcccttcctgctgaaccccagaccctacctgctgccccccatgcccggccccccctgcaaggtgttcatcctgggcccccagtacagcggcaagaccaccctgtgcaacatgctggccgagaactacaagggcaaggtggtggactacgcccagctggtgcagcccagattcgacaaggccagagagaccctggtggagaacaccatcgccgaggccaccgccgccgccatcaaggtggtgaaggagaagctgctgagagagctgcaggccagaaagcaggccgagaccgccctgagagagttccagagacagtacgagaagatggagttcggcgtgttccccatggaggccacccacagcagcatcgacgaggagggctacatccagggcagccagagagacagaggcagcagcctggtggacaccgaggaggccaagaccaagagcgagaacgtgctgcacgaccaggccgccaaggtggacaaggacgacggcaaggagaccggcgagaccttcaccttcaagagacacagccaggacgccagccaggacgtgaagctgtacagcgacaccgcccccaccgaggacctgatcgaggaggtgaccgccgaccaccccgaggtggtgaccatgatcgaggagaccatcaagatgagccaggacatcaacttcgagcagccctacgagaagcacgccgagatcctgcaggaggtgctgggcgaggtgatggaggagaacaaggacagattccccggcgcccccaagtacggcggctggatcgtggacaactgccccatcgtgaaggagctgtggatggccctgatcaagaagggcatcatccccgacctggtgatctacctgagcgacaccgagaacaacggcaagtgcctgttcaacagaatctacctgcagaagaagagcgagatcgacagcaagatcctggagagactgctggaggagctgcagaagaagaagaaggaggaggaggaggccagaaaggccaccgaggaggagctgagactggaggaggagaacagaagactgctggagctgatgaaggtgaaggccaagggcaagcacagactgctgtag

SEQ ID NO: 330098 - DNA, 2478 bp, Artificial Sequence
  derived and/or modified sequence
atagagaggtcgggtagaggctcccgggacctgcgtgctgccgagagaggaagcgaagggcaccatctttgtattttgtgtcatgacttctcaagagaagacagaagagtatccttttgcagatatatttgatgaagatgaaactgaaaggaattttttgttgtccaaacctgtttgctttgttgtatttgggaaaccaggtgttgggaaaacaacattagcccgttacataacacaggcatggaaatgtattcgtgttgaagctttgccaattttagaagaacagattgctgctgaaaccgaatcaggagttatgttgcaatcaatgttgatcagcggtcaaagcattccagatgaacttgtcataaagctaatgttggagaagctcaactccccagaagtctgtcactttggttatattatcactgaaataccatcactttcacaggatgccatgactaccttacagcaaatagaattaattaaaaacttaaacctgaaacctgatgttataatcaatataaagtgtcctgactatgatttgtgccagagaatttctgggcaaagacagcacaataatacgggatacatatacagtagagaccagtgggatcctgaagtcattgagaatcataggaaaaagaagaaagaagcccaaaaggacggaaaaggagaagaggaagaagaggaagaagagcaagaagaagaagaggcatttattgccgaaatgcagatggtggctgaaattcttcatcatctagttcagaggcctgaagattatttggaaaatgttgaaaacattgttaagctttataaggaaacaattctccaaactttagaagaagtaatggctgaacacaatccccagtatctcattgagctaaatggaaataaaccagcagaggagctctttatgattgttatggatcgacttaaatatctgaacctaaaaagagcagctattctaaccaaacttcagggtgcagaggaagaaattaatgacacaatggaaaatgatgagctatttcgtactcttgcatcttataaacttattgcaccaagatacagatggcaaagaagtaaatggggacgtacatgtcctgtgaatttaaaagatggtaacatttattcaggattaccagattattctgtgagttttctaggtaaaatctactgtctttcatcagaagaagcattaaaaccatttttgttgaacccacgtccctatctgcttccacctatgccaggaccaccatgtaaagtattcatacttggacctcaatattcagggaaaacaacactttgcaatatgcttgcagaaaattacaaaggaaaggtagtcgactatgcccaacttgttcagccacgttttgataaagcccgtgaaacattagtagaaaataccatagctgaggccactgcagcagcaattaaagttgtgaaagaaaagcttctcagggaactgcaagctagaaaacaagctgaaacagctttaagagaatttcaaaggcaatatgaaaaaatggagtttggagtattcccaatggaggcaacacactcatcaattgatgaagaagggtacattcaaggctcccaaagggacagaggcagctctttagtggacaccgaagaagccaaaacaaagtcagaaaatgtcctccatgatcaagctgctaaagttgataaagatgatggaaaagaaactggtgaaacattcacatttaaaaggcattctcaagatgctagtcaagatgtaaagttgtattcagatacagccccaacagaagacttgatagaagaggtaactgcagatcatccagaggttgtgaccatgattgaagagactataaaaatgtcacaggatataaactttgaacagccatatgaaaaacatgctgaaatcttacaggaagtccttggagaggtaatggaagaaaacaaggataggtttcctggtgccccaaaatatggaggctggattgtggacaactgccctattgtaaaagaattgtggatggccttaatcaagaaaggaattatacctgatttggtcatctatttatcagatacagaaaacaatggaaaatgtttatttaatagaatatatttacagaagaaatctgaaattgactctaagattttagaaagattattagaagaactacaaaagaaaaaaaaagaagaagaagaagcaagaaaagccacagaagaggaattgagactcgaagaagaaaatcgaaggctactggaacttatgaaagtgaaggcaaaaggcaagcacagattgctatgactgatgatgtgtcatggtattgttactgcaagcaattgcagtatttcaagtgaattatagactgggtgatcacatttcccaatttgtccatgagagcccaggtttatgcctatattcttgaagtctttatagtaccttttattcttaaagtgttccagtttgtatactaaataatattgttactg

SEQ ID NO: 330099 - DNA, 2211 bp, Artificial Sequence
  derived and/or modified sequence
atgacgtcacaagagaagacagaagagtacccctttgcagatattttcgatgaagacgagaccgagcgcaactttctgctctctaaaccggtctgcttcgtggtgttcgggaagcctggtgtaggtaaaactactctcgctcggtatattacccaagcttggaaatgcattcgcgtcgaagcactgcctatccttgaagagcagatcgcagcggaaacagagtcaggggttatgcttcagtctatgctgatctccggacagtccatacccgatgaactggttattaagctgatgctggaaaagctcaattcccccgaagtgtgtcattttggctacatcattaccgagattcctagcctgtcacaggatgcaatgactacccttcagcaaatcgagctcatcaagaatctgaaccttaaaccagatgttatcatcaatatcaagtgccctgactacgatctgtgccagagaattagtgggcagcgacaacacaataataccggctatatatactcgcgagaccaatgggacccggaggtgatagaaaatcacagaaaaaaaaaaaaggaggcacaaaaggacggcaagggagaggaagaagaggaagaggaagagcaggaggaagaagaggcatttatcgctgaaatgcaaatggtggcagaaatattacaccatcttgttcaacgccctgaggattacctggagaatgtggagaatattgttaaactgtataaagaaactatcctgcagactctggaagaggtcatggctgaacacaatcctcagtatcttatcgagctgaacggaaacaaaccagccgaagagttgttcatgattgtgatggaccgcctgaaatatttgaacctcaagagagcagcgatcctcacaaaattgcagggagctgaggaagaaataaatgacacaatggagaatgatgagttgttccggactctggcgagctacaagctgattgccccacgctatcggtggcagcggagcaagtgggggaggacatgcccagtcaatctgaaagatggtaacatatatagtggcttacctgattattctgttagttttctaggtaagatatattgcctgagctccgaagaggctctaaagccatttctgctgaatcccagaccctatctgctgccccccatgccagggccgccctgcaaagtgttcatcctgggcccacagtacagcgggaaaactaccctgtgtaatatgttagctgagaattataaaggaaaagtggtcgattatgcccagctggtgcagcctcggttcgataaggcacgggagaccctggtcgaaaatactattgcagaggcaaccgctgctgcgataaaggtggttaaagaaaagctgcttcgcgagttgcaagcccgaaaacaggccgaaactgcgctgagggaattccaaaggcagtacgagaagatggagttcggagtcttccccatggaagctactcacagtagcattgatgaggagggctatatccaagggtcccaaagggacaggggatcctcactggttgatactgaagaggccaaaacgaaatccgaaaacgtgctacacgaccaggcagcgaaagtggataaggatgacggtaaagagacgggcgaaaccttcacattcaagcgccatagccaggatgcctctcaggatgtgaaactttactcagatactgccccgaccgaggaccttatagaggaagtgacagcagatcacccagaggtggtgaccatgatcgaggaaacaatcaagatgagccaggatattaatttcgagcagccctatgagaagcacgccgagatcttgcaggaagtgcttggggaggttatggaggagaacaaggataggtttcctggcgcaccaaaatacggaggatggatagttgataactgtccaattgttaaagagctgtggatggccctcatcaagaaaggaatcattcccgacctggtgatttacctgtcagatacggagaacaacgggaaatgtctgttcaatcgaatctacttgcagaagaagtcggagattgatagcaaaatcctggaacgactgcttgaagagcttcagaaaaaaaagaaagaagaagaggaagctaggaaggccactgaggaggagcttcggttagaggaagagaacaggcgtttacttgagctgatgaaggttaaagcaaaggggaagcatcgccttctgtag

SEQ ID NO: 330100 - DNA, 2211 bp, Artificial Sequence
  derived and/or modified sequence
atgaccagccaggagaagacagaggagtacccctttgctgacatctttgatgaagatgaaacagaaagaaacttcctgctgagcaagcctgtgtgctttgtggtgtttgggaagccaggagtgggcaagaccaccctggcccgctacatcacccaggcctggaagtgcatccgggtggaggccctgcccatcctggaggagcagattgctgctgagacagaaagtggagtgatgctgcagagcatgctgatcagcggccagagcatcccagatgagctggtgatcaagctgatgctggagaagctgaacagccctgaggtgtgccacttcggctacatcatcacagagatccccagcctgagccaggatgccatgaccaccctgcagcagatcgagctgatcaagaacctgaacctgaagccagatgtgatcatcaacatcaagtgcccagactatgacctgtgccagaggatcagcggccagaggcagcacaacaacacaggctacatctacagccgggaccagtgggaccctgaggtgattgagaaccacaggaagaagaagaaggaggcccagaaggatggcaagggggaggaggaggaggaggaggaggagcaggaggaggaggaggccttcatcgccgagatgcagatggtggccgagatcctgcaccacctggtgcagaggcctgaggactacctggagaatgtggagaacatcgtgaagctgtacaaggagaccatcctgcagaccctggaggaggtgatggccgagcacaacccccagtacctgattgagctgaatggaaacaagccagctgaggagctgttcatgattgtgatggaccggctgaagtacctgaacctgaagagagctgccatcctgaccaagctgcagggcgctgaggaggagatcaatgacaccatggagaatgatgagctgttccgcaccctggccagctacaagctgattgccccccgctaccgctggcagaggagcaagtggggccgcacctgccctgtgaacctgaaggatggcaacatctacagcggcctgcctgactacagcgtgtccttcctgggcaagatctactgcctgagcagcgaggaggccctgaagcccttcctgctgaacccccggccctacctgctgccccccatgcctggccccccctgcaaggtgttcatcctgggcccccagtacagcggcaagaccaccctgtgcaacatgctggccgagaactacaagggcaaggtggtggactatgcccagctggtgcagcccaggtttgacaaggcccgggagaccctggtggagaacaccatcgccgaggccacagctgctgccatcaaggtggtgaaggagaagctgctgcgggagctgcaggccaggaagcaggccgagacagccctgcgggagttccagaggcagtatgagaagatggagtttggagtcttccccatggaggccacccacagcagcattgatgaggagggctacatccagggcagccagagggaccggggcagcagcctggtggacacagaggaggccaagaccaagtcagaaaatgtgctgcatgaccaggccgccaaggtggacaaggatgatggcaaggagactggagagaccttcaccttcaagaggcacagccaggatgccagccaggatgtgaagctgtacagcgacacagcccccacagaggacctgattgaggaggtgacagctgaccaccctgaggtggtgaccatgattgaggagaccatcaagatgagccaggacatcaactttgagcagccctatgagaagcatgctgagatcctgcaggaggtgctgggggaggtgatggaggagaacaaggaccgcttccctggggcccccaagtatggaggctggatcgtggacaactgccccatcgtgaaggagctgtggatggccctgatcaagaagggcatcatcccagacctggtgatctacctgagtgacacagagaacaacgggaagtgcctcttcaaccgcatctacctgcagaagaagtcagaaattgacagcaagatcctggagcggctgctggaggagctgcagaagaagaagaaggaggaggaggaggccaggaaggccacagaggaggagctgcggctggaggaggagaacagaaggctgctggagctgatgaaggtgaaggccaagggcaagcaccggctgctgtag

SEQ ID NO: 330101 - DNA, 2211 bp, Artificial Sequence
  derived and/or modified sequence
atgaccagccaggagaagaccgaggagtaccccttcgccgacatctttgacgaggatgaaacagaacggaatttccttttgtctaaacccgtctgtttcgtggtattcggtaaaccaggcgtgggtaagacaacgctcgcgcggtacatcacacaggcttggaagtgcatccgcgtcgaagcgttgcctatccttgaggaacaaatagccgcggaaacggagagcggggtgatgcttcaatcgatgctgatctccgggcagagcatccccgacgaacttgttattaagctgatgctcgagaagctgaactcgccggaggtttgccattttggttatatcatcaccgagatccccagtctcagtcaagatgccatgactacattgcagcaaatcgaattaatcaaaaatcttaacctgaagcctgatgtgattatcaatatcaaatgtccagactacgatctgtgccagcgtatttcaggtcagaggcagcacaacaatacgggctacatttactctcgtgatcaatgggacccagaagtcatcgaaaaccacagaaaaaagaagaaagaagctcagaaagacggaaagggagaggaggaggaggaggaagaggagcaggaggaagaagaggccttcatcgcagaaatgcagatggttgccgaaatcctccaccacttagtgcagaggcccgaggactacttagaaaatgtggagaacattgtaaagctttacaaggagacaatcttgcagactctggaggaagtcatggcggagcacaatccccaatacctcatcgaactgaatggcaacaagcctgcagaagaactcttcatgattgtcatggataggctgaaatatcttaacctgaagagggctgccatcctcacaaagctgcagggagctgaggaggagattaacgacacaatggaaaacgacgagttgtttcggaccctggcctcatacaaacttatcgccccacgctataggtggcagcgcagcaagtggggcagaacatgtccagtgaacctgaaggatggcaacatctattccggcctccctgattactcagttagcttcctcggtaagatctattgtcttagctccgaagaagccctcaaaccgttcctattgaacccccgcccctatcttctgccaccaatgcccgggcccccatgtaaagtgtttattcttgggccacagtattcggggaagactacgctgtgtaacatgttagccgaaaattacaagggaaaagtcgttgactacgctcagttagtgcagccccgttttgacaaggcaagggagacactcgtcgaaaacactatagccgaggccacggctgccgccataaaggtggtgaaagagaaactcctgcgagagttgcaggccaggaagcaggccgagacggctctgcgggaattccaacgacaatatgagaaaatggagttcggagtctttcccatggaagcaacccatagcagtattgatgaagaaggctacatccagggaagccagcgtgatagaggctcctcactagtcgatactgaggaagctaaaactaaatctgaaaacgtgctgcatgatcaagcagcaaaagtagataaggacgatggcaaagaaacaggtgagaccttcactttcaagagacactcccaggacgcgtctcaggacgtgaagctttactccgatacagcccccacggaggatcttattgaggaagtaaccgccgatcaccccgaggttgttaccatgatcgaggaaacaattaaaatgagtcaggacatcaacttcgagcagccctacgagaagcacgcagaaattctgcaggaggttctgggagaggtcatggaggaaaataaggaccgtttcccaggcgcaccaaagtatgggggctggatagtcgataattgtccgatcgtcaaagagctgtggatggccttaatcaagaagggtatcattcctgatctagtcatttatctgagtgataccgaaaacaacggaaagtgtctgttcaatagaatctatctgcagaaaaaatccgagattgactccaaaatacttgaaaggctgttagaggagctccagaagaaaaaaaaagaagaggaggaagcccgaaaggccaccgaagaagagctgcgcttggaggaggaaaatcggcggttactggaattgatgaaggtcaaggcaaagggaaagcatcgacttctttag

SEQ ID NO: 330102 - DNA, 2211 bp, Artificial Sequence
  derived and/or modified sequence
atgacatctcaggagaaaaccgaggagtatccctttgcagacatctttgatgaggatgaaacagagcgaaactttctcctgtcaaagccagtgtgcttcgtggttttcggtaagcctggggtggggaaaactacactggcaagatacattacgcaagcctggaaatgcattagagtggaggcacttcccattctggaagagcagatcgctgcggagaccgagtcaggcgtcatgctccagtctatgttaatcagtggccaatctatacccgacgagctggtgataaaattgatgcttgagaagttaaacagccccgaagtctgtcacttcggttatatcatcacagaaattccgagtctttctcaagatgccatgaccaccttgcagcagatagaattgatcaaaaatctgaatctgaagcccgacgtgattatcaatattaaatgccccgattacgacctctgccagagaatatctggccagcgccagcataataataccggctatatctacagcagagaccaatgggaccccgaggtcattgaaaaccatcggaagaaaaaaaaggaagcacaaaaagatggaaagggtgaagaggaagaagaggaagaggagcaagaggaagaggaggccttcatcgccgagatgcagatggtggccgagattcttcaccatctggtccaacgtccagaagattatctcgagaacgtggaaaatatcgtgaaactgtacaaagagactatcttacagaccctggaagaggtaatggccgaacacaaccctcaatatttgattgaattgaacggtaacaagcctgcagaagaattgtttatgatcgtgatggatcgcttgaaatatcttaatctgaaacgagcagctatactgacaaagcttcagggagcagaggaagagatcaatgatacgatggaaaatgacgaactctttcgaaccctagcatcatacaaattgattgctccacgctatcgatggcagcgatcaaagtgggggagaacttgccctgttaacctgaaggatggtaacatttactcaggccttcctgactattccgtttccttcctggggaagatctactgtctttcctcagaggaggcgttaaagccctttcttctgaatccacgcccatacctgctgcccccaatgcctggtccaccttgtaaggtgtttattctaggccctcagtactccggcaagacgactctgtgcaatatgctcgcagaaaattataaggggaaggttgtagactacgctcagctggtgcagcctaggttcgataaagcaagagagaccctggttgagaacacaatagccgaggcaacagctgcagctatcaaggtagtaaaggagaagctgctgcgcgagctgcaggccaggaagcaagcggagaccgctctaagggagttccagcggcaatacgagaagatggagttcggggtgtttcccatggaggctactcacagttccattgatgaagaagggtatatacaagggtcccagagagacaggggaagtagtttggtggacacagaagaggccaagacgaaatcagagaacgtgctacatgatcaggcagccaaagtggataaagacgatggcaaagagaccggagagacttttacgtttaaaaggcacagtcaagacgcatcccaagacgtcaaactctattcagataccgcccctactgaggatctgatcgaggaggtgacagccgaccaccctgaggtggtgacaatgatagaggagacaatcaaaatgagccaggacattaatttcgagcaaccgtacgaaaaacacgcagaaatcctccaggaggttctgggagaggtcatggaggagaacaaggatcggttcccaggcgcacccaagtacggagggtggattgtggataattgccctatagtaaaagagctatggatggctctgataaaaaagggtatcattcccgacctcgtgatctatctttccgacaccgagaataacggcaagtgtctgtttaataggatctatctgcagaaaaagagtgaaattgatagcaaaattctggagagactgctcgaggagctgcagaaaaaaaaaaaagaagaggaagaagccagaaaagctactgaggaagagttgcgtcttgaagaagaaaatagacggctgttagagttgatgaaagtcaaggccaagggaaagcatcgtctgctttag

SEQ ID NO: 330103 - protein, 102 aa, Artificial Sequence
  derived and/or modified sequence
MSQQDAVAALSERLLVAAYKGQTENVVQLINKGARVAVTKHGRTPLHLAANKGHLPVVQILLKAGCDLDVQDDGDQTALHRATVVGNTEIIAALIHEGCALD

SEQ ID NO: 330104 - protein, 498 aa, Artificial Sequence
  derived and/or modified sequence
MLPRAKRGRSAECLHTTRHSRKSERSSIQKQTRKGTASDAERMHRQRSPTQSPPADTSFSSRRGRQLPQVPVRSGSIEQEQEKYNSSTKASLVVEERTRQMKMKVHRFKQTTGSGSSQELDREQYSKYNIHKDQYRSCDNVSAKSSDSDVSDVSAISRTSSASRLSSTSFMSEQSERPRGRISSFTPKMQGRRMGTSGRSIMKSTSVSGEMYTLEHNDGSQSDTAVGTVGAGGKKRRSSLSAKVVAIVSRRSRSTSQLSQTESGHKKLKSTIQRSTETGMAAEMRKMVRQPSRESTDGSINSYSSEGNLIFPGVRLGADSQFSDFLDGLGPAQLVGRQTLATPAMGDIQIGMEDKKGQLEVEVIRARSLTQKPGSKSTPAPYVKVYLLENGACIAKKKTRIARKTLDPLYQQSLVFDESPQGKVLQVIVWGDYGRMDHKCFMGVAQILLEELDLSSMVIGWYKLFPPSSLVDPTLTPLTRRASQSSLESSTGPPCIRS

SEQ ID NO: 330105 - DNA, 1497 bp, Artificial Sequence
  derived and/or modified sequence
atgttacctagggctaaaagggggcgatcggcagagtgtctccacactacccgacattctcgcaaatcagagaggagtagcatacaaaaacagaccagaaaaggtaccgcgagcgatgcagagcgaatgcataggcagcgaagtccgactcagagtccccctgccgacactagtttttcaagccggcgcgggcgacagctccctcaggttccagtgcgctcaggatccattgaacaggaacaggagaagtataatagctcgaccaaagcctcgctggtggtggaagagcggaccaggcagatgaagatgaaagtgcaccgctttaagcaaaccactggtagtggcagctctcaggaactggaccgcgagcagtacagcaagtataatatacacaaagatcaatatagatcgtgtgataatgtgagtgccaaatcgtcagatagtgatgtcagcgatgtgagcgctattagcaggactagcagcgcttcccgcctctcttcgacgtctttcatgtctgagcaatccgagcgccccagaggccggatctcaagttttacgcctaaaatgcaaggaagacggatgggaacgtcgggtcgttccataatgaagagtacttcggtttcaggagagatgtacaccttggaacataacgacggttctcagtccgacaccgccgtggggacggtcggggctggaggaaaaaagcgcaggagctccctctccgcaaaagtcgtggcgatcgtgagccgtaggagtagatccacttcccagttgtcacagactgaatcagggcataagaaactgaaatcaaccattcaaaggtcaactgagacgggtatggccgcagaaatgagaaaaatggtgagacagcctagtcgggagagcacagatggtagcattaattcctacagcagcgagggcaaccttatcttcccgggagtcaggttaggcgccgactcgcaattctccgacttcctggacggtcttggacccgcgcagcttgtggggcggcaaaccctcgccaccccagcgatgggagatatccagatcggaatggaggataaaaagggacagttagaggtcgaggtgatccgcgcaaggtccctgacacagaagcctggatctaagagtactcctgcgccgtacgttaaagtttatctgcttgaaaacggagcatgcatcgcgaaaaaaaaaactagaatcgcaagaaaaacactggatcctttgtatcagcagtctctggttttcgatgaatcaccacagggcaaagtgttgcaggtgattgtatggggcgattacggccgtatggatcacaaatgttttatgggagtggcccagattctcctggaggagcttgacctgtcctccatggtcatcgggtggtataagctttttcctccttcttcgcttgtagaccccacactgaccccactgactagacgggccagtcagtcctccctggaatctagcaccgggcctccctgtatccgctcttag

SEQ ID NO: 330106 - DNA, 1497 bp, Artificial Sequence
  derived and/or modified sequence
atgctgccccgggccaagaggggccgctctgctgagtgcctgcacaccaccaggcacagcaggaagtctgagaggagcagcatccagaagcagaccaggaagggcacagccagtgatgctgagaggatgcaccggcagaggagccccacccagagccccccagctgacaccagcttcagcagccggcggggccggcagctgccccaggtgcctgtgcgcagcggcagcattgagcaggagcaggagaagtacaacagcagcaccaaggccagcctggtggtggaggagaggacccggcagatgaagatgaaggtgcaccgcttcaagcagaccaccggcagcggcagcagccaggagctggaccgggagcagtacagcaagtacaacatccacaaggaccagtaccgcagctgtgacaacgtgtctgccaagagcagtgacagtgatgtgtctgatgtgtctgccatcagcaggaccagcagcgccagccggctgagcagcaccagcttcatgtctgagcagagcgagcggccccggggccgcatcagcagcttcacccccaagatgcagggccgcaggatgggcaccagcggccgcagcatcatgaagagcacctctgtgtctggagagatgtacaccctggagcacaatgatggcagccagagcgacacagctgtgggcaccgtgggcgccggcggcaagaagaggaggagcagcctgagcgccaaggtggtggccatcgtgagccgccgcagccgcagcaccagccagctgagccagacagaaagtggccacaagaagctgaagagcaccatccagaggagcacagagaccggcatggctgctgagatgaggaagatggtgcggcagcccagccgggagagcacagatggcagcatcaacagctacagcagcgagggcaacctgatcttccctggggtgcggctgggcgctgacagccagttcagtgacttcctggatggcctgggccctgcccagctggtgggccggcagaccctggccaccccagccatgggagacatccagatcggcatggaggacaagaagggccagctggaggtggaggtgatccgggcccggagcctgacccagaagccaggcagcaagagcaccccagccccctacgtgaaggtgtacctgctggagaatggagcctgcatcgccaagaagaagaccagaattgccaggaagaccctggaccccctgtaccagcagagcctggtgtttgatgagagcccccagggcaaggtgctgcaggtgattgtgtggggagactatggccgcatggaccacaagtgcttcatgggcgtggcccagatcctgctggaggagctggacctgagctccatggtgattggctggtacaagctgttcccccccagcagcctggtggaccccaccctgacccccctgacccggcgggccagccagagcagcctggagagcagcactggaccaccctgcatccgctcctag

SEQ ID NO: 330107 - DNA, 1497 bp, Artificial Sequence
  derived and/or modified sequence
atgctgccccgggccaagcggggccggagcgccgagtgcctgcacaccacgagacactccaggaagtctgagagatcctcaattcaaaagcaaacgcggaaggggacagctagtgatgccgaacggatgcaccgacagagaagcccaacacagtcgccacccgccgacacaagtttctcctcgagaagaggccggcaactgcctcaggtccccgtgcggtctggatcaatagaacaggaacaggaaaaatacaactctagtacaaaagcatcacttgtggtcgaagaacgcactcgccagatgaagatgaaagttcaccggttcaagcaaacaaccggctctgggtccagtcaggaactggatagggagcaatacagcaagtacaatatacacaaggaccagtatcgatcctgtgataatgtcagcgcaaaaagctcagacagcgatgtctcagacgttagtgccatcagtcgcaccagctccgcttccaggctttctagtacaagctttatgagcgagcagtctgagagaccgagaggccggatttcctcatttacgcccaagatgcagggtcgtaggatgggaacctccggcaggagtatcatgaagagcaccagcgtgtccggcgagatgtacacgctcgagcataacgacggaagccagtcagataccgctgttggaacagttggagcaggcgggaaaaaaagaagatcttccctcagcgccaaggttgttgctatcgtgtctcgcagatcccgatcaacttcccagctgagtcagactgaatctggccataagaaacttaagtccaccattcagagaagcacggagactgggatggcagcagagatgcgtaaaatggtacgtcagccatcccgtgagtctacagacggatctatcaattcatatagtagcgaaggaaatctcatcttccctggcgtccgactcggcgccgattcacagttctcagacttcctcgacggtctgggcccggcacagctcgtcggcaggcagactttggcaactcctgccatgggagatattcagatcggcatggaagacaaaaaagggcaattagaggtggaggtcatacgagctagatccctgacccagaagccgggtagcaaaagcacccctgccccttacgtcaaagtgtatctcctggaaaacggtgcatgtatcgcaaagaagaaaacaagaattgctcgaaaaacactggatcctctctaccagcaatctctggtttttgacgaatctcctcagggtaaagttcttcaagtcattgtgtggggcgattatggccgcatggatcacaagtgtttcatgggggtcgctcaaattctgctcgaggagctcgacttgagctctatggtcattggctggtataagctgttcccccccagtagcctggtagatccgactctgacacccctcaccagaagggctagccaatcctcactggaatcgagtaccggtccgccgtgtatccgttcatag

SEQ ID NO: 330108 - DNA, 1497 bp, Artificial Sequence
  derived and/or modified sequence
atgctgccacgcgctaagaggggaaggtctgctgagtgtctgcacaccaccaggcatagtcgcaaaagcgagaggtctagcattcaaaaacaaacacggaagggaacagcatccgatgctgaaaggatgcaccgtcagcggtcccctacccaatccccaccggcagacacttctttctcctcccggagaggaaggcagctgccacaggttcccgtccggagtggatcaatcgaacaggaacaggaaaaatataacagctcaacgaaggcaagtctcgtggtcgaggaacgaacccggcagatgaagatgaaagtgcaccggttcaaacagacgacgggtagcgggagctcacaggagctcgaccgcgaacaatattctaaatacaatatccacaaagaccagtaccgatcatgtgacaatgtgtctgctaaaagtagtgattctgacgtgtctgatgtgtccgccatatcgagaaccagcagtgctagtcgactctcttccaccagtttcatgtctgagcagtcagaaaggccacggggtcgcatatctagcttcactcccaagatgcaaggcagaaggatgggaaccagtggccgaagtatcatgaagagcacaagcgtctccggagaaatgtatacactcgaacacaacgatggaagtcaatcagacaccgctgtgggtacggtgggggcaggcggtaaaaaaagacgaagttctcttagcgcgaaggtagtggcgatagtgtctcgccgaagcaggtcgacttcacaacttagccaaaccgagagcgggcacaagaagctcaaaagcacgattcagaggtccactgagactggtatggccgctgagatgaggaaaatggtgcggcagcccagcagagaaagcacggacggatctattaacagctactcttccgaagggaatctgatatttcccggtgtccgccttggagctgattcacaattctctgattttctggacggactgggtccagctcagctcgtaggccgacagacactcgccaccccggcaatgggcgacattcaaattgggatggaggataagaaagggcaactcgaggtggaggttattcgtgcgagaagtctgactcaaaaaccagggagtaagagcaccccagctccatatgtgaaagtgtatctcctggagaatggagcttgtatcgctaaaaaaaaaacacgaattgcaagaaagacactcgatccgctttatcagcagagcctggtgttcgatgagtctccccagggcaaggtgctgcaggtaatcgtgtggggagattacggtcgaatggaccataagtgctttatgggcgtggcccagattctgctcgaagagttagacctttcgagtatggtgatcgggtggtacaaattgtttcctccttcttcactggtggaccccaccctgaccccactaacaagaagggccagccagtccagcctggaatcttcaaccggcccaccttgtatacgttcatag

SEQ ID NO: 330109 - DNA, 2285 bp, Artificial Sequence
  derived and/or modified sequence
cagattatgaggttgatgatggtattggcgtagttcctccagtaggctataggtctagtgctagagaaagtaaatctacaacattaactgtgccagaacagcaaagaacaactcatcaccgctcacgttcagtatctcctcatcgcggcaatgatcagggaaagccgcgttcacgtttaccaaatgtgccattacagaggagtttagatgaaattcatccaacaagaaggtcacgttctccaaccagacaccatgatgcctcccgaagtccagttgatcatagaaccagagatgtggatagtcagtatttatcagaacaagacagtgagcttcttatgctgcccagagcaaaacgaggacgaagtgcagaatgcctacatactaccaggcactccagaaagtctgaaagatctagcatccaaaaacagactaggaaaggcactgcctctgatgcagaaagaatgcaccgacagagaagtccaacacaatctcctccagcagacacatcgttcagcagtcgcaggggaagacagctcccacaagtgccagtgagaagcggcagtatagaacaagaacaagaaaaatataactcttccacaaaagcaagcttagtagtggaggagcgaacaagacagatgaaaatgaaagtgcatcgatttaagcagacaacagggtctggttctagtcaagaacttgatcgcgagcaatattccaagtataacatacataaagatcagtacagaagctgtgataacgtctctgccaaatcatcagatagtgatgtcagtgatgtttccgccatttcccgaaccagcagtgcctcacgcctcagcagcacaagctttatgtcagagcaatctgagcgccccaggggtagaatcagttcatttacccccaaaatgcaaggcagacggatggggacttcaggaagatccatcatgaagagcaccagtgtcagtggagagatgtacacactggagcataatgacggcagccagtcagacacagctgtgggtacagttggagcaggtggaaagaaacggagatccagccttagtgccaaagtggttgccatagtgtctcgaaggagtagaagcacatcccagcttagtcaaacagagtcgggccacaaaaagttaaaaagtaccatccagagaagcacagaaacaggcatggcagctgaaatgagaaagatggtaaggcagccgagccgagagtctactgatggcagcatcaacagttacagctctgagggcaatttaatatttcctggagtgcgactgggagctgacagtcaattcagtgattttcttgatggattgggaccagcccagcttgttggccgccaaacccttgccacccctgcaatgggtgatatacaaataggaatggaggacaaaaagggccaattagaagtggaagtcattagagcacgaagcctcacacaaaagcctggttccaaatctacacctgctccatatgtcaaagtatatcttttggaaaatggggcctgtatagccaagaagaagacaagaattgcacgaaaaacccttgatcctttgtatcagcagtctctggtttttgatgaaagtccacagggtaaagttcttcaggtgattgtctggggagactatggcagaatggaccacaaatgctttatgggtgtggctcagatcttgttggaagaactcgacctgtccagcatggtgatcggatggtacaaattgttcccaccgtcctcactggtggatcccacactcactcccctcacccggcgggcttcccagtcatctctggaaagttcaactgggcctccctgtattcgatcatagtgaactcataccagagtcattccaataaaactctacttttcaggataataatctgaaccagatatttcatgatcgaaagcattgttggagacagacaatcaacttgtgttttgcctgtagtagtttttcaataatatgtcccaattgttatttaaaacatggcttcatatgacagaacaaggcaatctatcaaatttacaggaagaatcaacatgctggtgagagtcactgatgcttctaacaaatagaaaaagaggaaactttaaatccacgcatacacgtacacacacacatgcacacacacacacaccaaattgaacaaactggaaactctcactctgtgaaaagttgtattctacacatttctgcacagaccacaagcagtgttatttccctgatgtttgagttgttttgttcttttgtgtgttttgtttatttgtgtgttgtttgttg

SEQ ID NO: 330110 - DNA, 1497 bp, Artificial Sequence
  derived and/or modified sequence
atgctgcccagagccaagagaggcagaagcgccgagtgcctgcacaccaccagacacagcagaaagagcgagagaagcagcatccagaagcagaccagaaagggcaccgccagcgacgccgagagaatgcacagacagagaagccccacccagagcccccccgccgacaccagcttcagcagcagaagaggcagacagctgccccaggtgcccgtgagaagcggcagcatcgagcaggagcaggagaagtacaacagcagcaccaaggccagcctggtggtggaggagagaaccagacagatgaagatgaaggtgcacagattcaagcagaccaccggcagcggcagcagccaggagctggacagagagcagtacagcaagtacaacatccacaaggaccagtacagaagctgcgacaacgtgagcgccaagagcagcgacagcgacgtgagcgacgtgagcgccatcagcagaaccagcagcgccagcagactgagcagcaccagcttcatgagcgagcagagcgagagacccagaggcagaatcagcagcttcacccccaagatgcagggcagaagaatgggcaccagcggcagaagcatcatgaagagcaccagcgtgagcggcgagatgtacaccctggagcacaacgacggcagccagagcgacaccgccgtgggcaccgtgggcgccggcggcaagaagagaagaagcagcctgagcgccaaggtggtggccatcgtgagcagaagaagcagaagcaccagccagctgagccagaccgagagcggccacaagaagctgaagagcaccatccagagaagcaccgagaccggcatggccgccgagatgagaaagatggtgagacagcccagcagagagagcaccgacggcagcatcaacagctacagcagcgagggcaacctgatcttccccggcgtgagactgggcgccgacagccagttcagcgacttcctggacggcctgggccccgcccagctggtgggcagacagaccctggccacccccgccatgggcgacatccagatcggcatggaggacaagaagggccagctggaggtggaggtgatcagagccagaagcctgacccagaagcccggcagcaagagcacccccgccccctacgtgaaggtgtacctgctggagaacggcgcctgcatcgccaagaagaagaccagaatcgccagaaagaccctggaccccctgtaccagcagagcctggtgttcgacgagagcccccagggcaaggtgctgcaggtgatcgtgtggggcgactacggcagaatggaccacaagtgcttcatgggcgtggcccagatcctgctggaggagctggacctgagcagcatggtgatcggctggtacaagctgttcccccccagcagcctggtggaccccaccctgacccccctgaccagaagagccagccagagcagcctggagagcagcaccggccccccctgcatcagaagctag

SEQ ID NO: 330111 - DNA, 2283 bp, Artificial Sequence
  derived and/or modified sequence
atgccgaaagacagcggtgcgttgctcggcctgaaggtggtcggcggcaagatgaccgacctgggcagacttggtgcatttatcacaaaggttaaaaagggaagcctggcagacgtcgtcggacatctgcgcgccggggatgaagttctggagtggaacgggaagcccctccctggagctactaatgaggaggtctataatattatcttggaatctaagagcgagccacaggtggagattattgtgagtcgccctatcggtgacatcccaagaataccagaatcctcacaccctcctctagagagctcctccagctctttcgaaagtcagaagatggagcgaccttccatcagtgtcataagtccgacaagtccaggggcccttaaagatgctcctcaggtgttgccaggacaactgagcgtgaagctatggtatgacaaggtcgggcaccagctgattgtgaacgtcttacaggccacagacctgccggctcgcgtggacggccgccctcgcaatccttacgtcaagatgtattttttgccggatcgcagcgacaaatctaagaggaggacaaagactgtcaagaaaatcctggagccaaaatggaatcagactttcgtttacagccatgtacaccggagggatttcagggaaagaatgctggagatcactgtgtgggatcagccaagggtacaagaagaagagtcagagtttctaggggaaattctgatcgagctcgagacagcactactggatgacgaaccacattggtataaacttcagacccatgacgaatcttcattacccctgcctcaaccaagtcctttcatgccacgaagacatatacacggcgaaagctcttccaagaagttgcaacgcagccagagaattagcgatagcgacatctccgactacgaggtagacgatgggattggcgtggttcccccggtcgggtacagaagctctgcgagagaatccaagtccaccacactcaccgtaccggaacagcaacgcaccacccaccaccggtcacggtcggtgtcgccccataggggcaacgaccagggcaagccacggtcccgcctgccaaacgtcccacttcagagaagtttggatgagatccaccctacgcggcgaagtcgtagtcctaccagacaccacgatgcttcaagatcccctgtcgatcacagaaccagagacgtggatagccaatatctcagcgaacaggacagtgaactgctgatgctcccaagagcaaagagaggtaggagtgcagagtgcctacatacgacctcagaacttcaaccattcctagacagagccaggtcagcctccacgaattgcctgcgccccgatacctcactgcactccccagagcgggagcggcactctcgcaaatccgagaggtccagcattcagaagcagacgaggaagggcacagcctcagatgccgagcgcatgcaccgccagaggtcgcccactcagtctcccccagctgacaccagtttttcatccagacggggccggcaactgccgcaggtcccagtccgtagtggatctatcgaacaggaaagcggacataagaagctaaaatcaactatacagaggagtacagagaccggcatggcggcagagatgaggaagatggtacgccagccttctagagagagcactgacgggagcattaatagttactcctctgaaggcaatttgatctttcccggtgtcagactgggcgccgacagtcagttctccgattttctggatggtctcggacctgcgcagctggtcggacggcagacacttgctacacctgcaatgggcgatattcaaatcggcatggaagacaagaaaggccagctggaggtcgaagtaatcagagcgcggtcactgactcaaaaaccaggctccaagagcaccccagcaccttatgttaaggtatatctgttagaaaatggcgcctgcatcgcaaaaaaaaagacacggattgcccgtaagacacttgaccctctctaccaacagagcttggtctttgacgaaagcccccaagggaaagtattacaggtcattgtgtggggagattatggtcgtatggatcacaaatgttttatgggtgtggcacaaattctcctcgaagagctcgatctctcctcgatggtcatcggttggtataaacttttccctccaagctccttggtggacccgactctgacccccttaactagacgcgcctcacaatcctccctagagagtagcactggtcccccttgtatcagaagctag

SEQ ID NO: 330112 - DNA, 2283 bp, Artificial Sequence
  derived and/or modified sequence
atgcccaaggacagcggggccctgctgggcctgaaggtggtgggcggcaagatgacagacctgggccgcctgggcgccttcatcaccaaggtgaagaagggcagcctggctgatgtggtgggccacctgcgggctggagatgaggtgctggagtggaatggcaagcccctgcccggggccaccaatgaggaggtgtacaacatcatcctggagagcaagtctgagccccaggtggagatcatcgtgtcccggcccatcggggacatcccccgcatccctgagagcagccacccccccctggagagcagcagcagcagctttgagagccagaagatggagcggcccagcatcagcgtcatcagccccaccagccctggggccctgaaggatgccccccaggtgctgcccggccagctgtctgtgaagctgtggtatgacaaggtgggccaccagctgattgtgaatgtgctgcaggccacagacctgcctgcccgggtggatggccggcccaggaacccctacgtgaagatgtacttcctgcctgacagaagtgacaagagcaagaggaggaccaagacagtgaagaagatcctggagcccaagtggaaccagacctttgtgtacagccacgtgcacagaagagacttccgggagaggatgctggagatcaccgtgtgggaccagccccgggtgcaggaggaggagagcgagttcctgggggagatcctgattgagctggagacagccctgctggatgatgagccccactggtacaagctgcagacccatgatgagagcagcctgcccctgccccagcccagccccttcatgcccaggaggcacatccatggagagagcagcagcaagaagctgcagaggagccagaggatcagtgacagcgacatcagtgactatgaggtggatgatggcattggagtggtgccccctgtgggctaccgcagcagcgcccgggagagcaagagcaccaccctgactgtgcctgagcagcagaggaccacccaccacaggagccgctctgtgagcccccacagaggaaatgaccagggcaagcccaggagccggctgcccaacgtgcccctgcagaggagcctggatgagatccaccccacccggcgcagccgcagccccaccaggcaccatgatgccagccgcagccctgtggaccacaggaccagagatgtggacagccagtacctgtctgagcaggacagcgagctgctgatgctgccccgggccaagaggggccgctctgctgagtgcctgcacaccaccagcgagctgcagcccttcctggaccgggcccggagcgccagcaccaactgcctgcggccagacaccagcctgcacagccctgagcgggagcggcacagcaggaagtctgagaggagcagcatccagaagcagaccaggaagggcacagccagtgatgctgagaggatgcaccggcagaggagccccacccagagccccccagctgacaccagcttcagcagccggcggggccggcagctgccccaggtgcctgtgcgcagcggcagcattgagcaggagagcggccacaagaagctgaagagcaccatccagaggagcacagagaccggcatggctgctgagatgaggaagatggtgcggcagcccagccgggagagcacagatggcagcatcaacagctacagcagcgagggcaacctgatcttccctggggtgcggctgggcgctgacagccagttcagtgacttcctggatggcctgggccctgcccagctggtgggccggcagaccctggccaccccagccatgggagacatccagatcggcatggaggacaagaagggccagctggaggtggaggtgatccgggcccggagcctgacccagaagccaggcagcaagagcaccccagccccctacgtgaaggtgtacctgctggagaatggagcctgcatcgccaagaagaagaccagaattgccaggaagaccctggaccccctgtaccagcagagcctggtgtttgatgagagcccccagggcaaggtgctgcaggtgattgtgtggggagactatggccgcatggaccacaagtgcttcatgggcgtggcccagatcctgctggaggagctggacctgagctccatggtgattggctggtacaagctgttcccccccagcagcctggtggaccccaccctgacccccctgacccggcgggccagccagagcagcctggagagcagcactggaccaccctgcatccgctcctag

SEQ ID NO: 330113 - DNA, 2283 bp, Artificial Sequence
  derived and/or modified sequence
atgcccaaggacagcggcgccctgctgggcctgaaggtggtgggcggaaagatgaccgacctcgggcgacttggggcattcatcactaaagtgaagaaggggtcattggccgacgtggtaggacatctacgtgcaggcgatgaggtgctggaatggaacggcaaaccactcccgggggcaactaatgaagaggtgtataatataatactcgagtcaaaaagtgagcctcaagtagaaataattgtgagtagacccatcggagacatcccacgcatacccgagtcaagccacccaccactggagagcagcagctcgtcctttgagagtcagaagatggaacgcccaagcatttcagttatctcgccaacctcgccaggggccctcaaagacgcgcctcaggtccttcccggtcagttgtctgtgaagttgtggtacgacaaagtaggacaccagctcatagtgaacgttctccaggcgaccgatctcccagccagagtagatgggcgtccacggaatccctatgtcaagatgtattttctgcctgacagaagcgacaagagcaaaagacgcaccaaaacagtcaagaaaattttggagcccaagtggaaccagacgttcgtttactcccacgtgcataggagggattttcgtgaacgaatgctggagatcactgtgtgggaccagccccgagtgcaagaggaagaatcagagtttctgggagagatcctgatcgagttggagaccgccctactggacgatgaacctcactggtacaaactgcagacgcatgatgagagctccctgccactcccccagccaagtccttttatgccccgtagacacatccacggagaatcgtccagtaagaagctacagcgctcccagcggatatccgactcagacataagcgactacgaggtagacgacgggatcggcgtcgtgccacctgttggctaccgctcgtctgcgagggaatcaaagtctactaccctcactgtcccagagcagcagaggaccacacaccatcgctctcggtctgtaagcccccaccgcggaaacgatcagggtaaacccagatccagattgcctaacgtacctcttcagagaagcctggacgagatccacccaacgcgtcggagccgaagtcccacaagacaccacgacgccagccggtcgccagttgaccacagaacccgcgacgtcgattcccaatatctcagcgaacaggactctgagctgctgatgttgccacgcgctaaacgcggccgctcagccgaatgcttgcacacaacctccgaattgcaacctttccttgaccgcgccaggagtgcctcgacgaactgcttgcgaccggacacatctctgcacagcccagagcgagaacgacactcacgtaagagcgagcggagttcgatccagaagcagacgagaaaggggacagcctctgatgccgagcgcatgcaccgccagcgtagtccgacccagtctcccccagcagacacttcattctcctccaggcgagggcggcagctcccccaggtacccgttaggtccgggtccatcgagcaggaatccggccacaaaaagcttaaatctacaatccaacgcagcaccgaaaccgggatggccgccgagatgcgtaaaatggtaagacagcccagccgggagagtaccgacgggtccataaacagttattccagcgaaggcaacttaattttccccggtgtgaggctgggcgctgactctcagttttccgacttcctcgacgggctgggcccagctcagctggtgggccggcaaaccctggccactcctgccatgggggacatccagataggaatggaggataaaaaaggccaactggaggtggaagtgattcgagcccgaagcctaacccagaagccaggatccaaatccacaccagcgccttatgttaaggtgtatttgttggagaacggcgcctgcattgccaaaaaaaagacccggattgctagaaagacgctcgatcccctgtatcagcagtctctcgttttcgatgaatctcctcagggtaaggttctgcaggtgatagtttggggggattatggccgaatggatcataaatgcttcatgggggttgcccagatcctgctcgaggagctggacctttccagtatggtaatcggttggtataagctcttccccccttcttctctcgtagatcctactctgacccccctgacaagaagggcctcccagtcatcgttggaatcgtctacaggacctccctgcatacgcagttag

SEQ ID NO: 330114 - DNA, 2283 bp, Artificial Sequence
  derived and/or modified sequence
atgcccaaggatagtggcgctctcctgggactcaaggtggtaggtggaaagatgaccgacttgggtaggctcggagccttcattacaaaggtgaaaaaaggaagtcttgcagacgtggtaggtcaccttcgtgccggtgatgaggtactggagtggaatggcaaaccactgcctggtgctacgaatgaggaagtatacaatatcatcctggaatcaaagtcagaaccacaggtggaaataattgtgagtaggccaattggagatattccgcgaatccccgagtcttctcaccccccactggagtctagcagttctagtttcgagtctcagaaaatggagagaccgagcattagcgtgatctcaccgacctcacccggagcacttaaggacgccccacaggttctgcctggccagttatcggttaaattatggtacgacaaggttggacatcagcttatcgttaatgttctgcaggccaccgaccttccagctcgcgtcgacggcagacccaggaacccgtacgttaagatgtattttctccccgaccgctcagataagagcaagcgtagaaccaagacagtgaagaaaatactggaacccaagtggaaccagacctttgtgtatagccatgtacacaggcgcgacttcagagagcgcatgctggagattacagtttgggatcagcctagggtccaggaggaggagtccgagtttctcggcgagattttaatcgaactggaaacagccttgttagacgatgagccccattggtataaacttcagacccacgacgaatcgtctctgccattgccacaaccgtcacccttcatgccaaggcgacacattcacggagagagctcttcgaagaagctgcagaggtcccagagaatcagcgactctgatatcagtgactatgaagtggacgatggtattggagtggttcctccagtgggctatagaagttccgctagggaatccaagtccactactctaaccgtgcctgagcagcagcgtaccactcaccacagatcgcggtctgtaagtcctcacaggggcaatgaccagggcaagcctcgatcaaggttgccaaatgtgcctctgcagagatctttagacgaaatccacccgacacggaggtccaggtcgcccactcggcaccacgacgcctcaagatcccccgtagatcacagaacccgcgatgttgactcccagtacctgagtgaacaggactctgaactgctgatgctgccacgcgctaaacgcggtaggtcggctgagtgtcttcataccaccagtgaactacaaccctttttggatagggctaggtccgccagtaccaattgtctgcggcctgatacctcccttcactcacctgagcgcgagaggcactctcggaagagcgagagatcctctattcagaaacaaaccagaaaaggaacagctagcgacgccgagagaatgcatcgccagcgatctcccactcagtctcccccagctgacacgtcattcagttctaggagaggacgtcagttaccacaggtccccgtcagatccggttcgatcgagcaggagtcaggccataagaaacttaagtcaacgattcagcgatctacagagaccggcatggcagcggagatgcgcaaaatggtgcggcagccatctcgggagtctacagacggcagcatcaacagctatagttccgaggggaacctaatcttccctggggtgcgattgggagcagattcccaattcagtgattttctggacgggcttgggccagcacaacttgttggaagacagactttggcgactccggcaatgggtgacatccagatcggtatggaagataagaaagggcagctcgaggttgaagtgatcagggcacggtctttaacccagaagcccggatctaagtccaccccagccccatacgtgaaagtttacctattggaaaatggcgcttgcattgccaaaaagaaaacacgtattgcgaggaagactttagacccgctgtatcagcagtccctcgtctttgacgaaagcccacagggaaaggtgctccaggtcattgtttggggtgactacggcaggatggatcacaagtgctttatgggagtcgcacagattctgctggaggaactggatctgtccagcatggtgattgggtggtacaagcttttcccgccaagctcactcgtggacccaaccctaacacccctgaccagacgcgctagtcagtctagcctggagtcctcaaccggccctccctgtatcaggagttag

SEQ ID NO: 330115 - DNA, 2283 bp, Artificial Sequence
  derived and/or modified sequence
atgcccaaggacagcggcgccctgctgggcctgaaggtggtgggcggcaagatgaccgacctgggcagactgggcgccttcatcaccaaggtgaagaagggcagcctggccgacgtggtgggccacctgagagccggcgacgaggtgctggagtggaacggcaagcccctgcccggcgccaccaacgaggaggtgtacaacatcatcctggagagcaagagcgagccccaggtggagatcatcgtgagcagacccatcggcgacatccccagaatccccgagagcagccacccccccctggagagcagcagcagcagcttcgagagccagaagatggagagacccagcatcagcgtgatcagccccaccagccccggcgccctgaaggacgccccccaggtgctgcccggccagctgagcgtgaagctgtggtacgacaaggtgggccaccagctgatcgtgaacgtgctgcaggccaccgacctgcccgccagagtggacggcagacccagaaacccctacgtgaagatgtacttcctgcccgacagaagcgacaagagcaagagaagaaccaagaccgtgaagaagatcctggagcccaagtggaaccagaccttcgtgtacagccacgtgcacagaagagacttcagagagagaatgctggagatcaccgtgtgggaccagcccagagtgcaggaggaggagagcgagttcctgggcgagatcctgatcgagctggagaccgccctgctggacgacgagccccactggtacaagctgcagacccacgacgagagcagcctgcccctgccccagcccagccccttcatgcccagaagacacatccacggcgagagcagcagcaagaagctgcagagaagccagagaatcagcgacagcgacatcagcgactacgaggtggacgacggcatcggcgtggtgccccccgtgggctacagaagcagcgccagagagagcaagagcaccaccctgaccgtgcccgagcagcagagaaccacccaccacagaagcagaagcgtgagcccccacagaggcaacgaccagggcaagcccagaagcagactgcccaacgtgcccctgcagagaagcctggacgagatccaccccaccagaagaagcagaagccccaccagacaccacgacgccagcagaagccccgtggaccacagaaccagagacgtggacagccagtacctgagcgagcaggacagcgagctgctgatgctgcccagagccaagagaggcagaagcgccgagtgcctgcacaccaccagcgagctgcagcccttcctggacagagccagaagcgccagcaccaactgcctgagacccgacaccagcctgcacagccccgagagagagagacacagcagaaagagcgagagaagcagcatccagaagcagaccagaaagggcaccgccagcgacgccgagagaatgcacagacagagaagccccacccagagcccccccgccgacaccagcttcagcagcagaagaggcagacagctgccccaggtgcccgtgagaagcggcagcatcgagcaggagagcggccacaagaagctgaagagcaccatccagagaagcaccgagaccggcatggccgccgagatgagaaagatggtgagacagcccagcagagagagcaccgacggcagcatcaacagctacagcagcgagggcaacctgatcttccccggcgtgagactgggcgccgacagccagttcagcgacttcctggacggcctgggccccgcccagctggtgggcagacagaccctggccacccccgccatgggcgacatccagatcggcatggaggacaagaagggccagctggaggtggaggtgatcagagccagaagcctgacccagaagcccggcagcaagagcacccccgccccctacgtgaaggtgtacctgctggagaacggcgcctgcatcgccaagaagaagaccagaatcgccagaaagaccctggaccccctgtaccagcagagcctggtgttcgacgagagcccccagggcaaggtgctgcaggtgatcgtgtggggcgactacggcagaatggaccacaagtgcttcatgggcgtggcccagatcctgctggaggagctggacctgagcagcatggtgatcggctggtacaagctgttcccccccagcagcctggtggaccccaccctgacccccctgaccagaagagccagccagagcagcctggagagcagcaccggccccccctgcatcagaagctag

SEQ ID NO: 330116 - protein, 219 aa, Artificial Sequence
  derived and/or modified sequence
MAAEMRKMVRQPSRESTDGSINSYSSEGNLIFPGVRLGADSQFSDFLDGLGPAQLVGRQTLATPAMGDIQIGMEDKKGQLEVEVIRARSLTQKPGSKSTPAPYVKVYLLENGACIAKKKTRIARKTLDPLYQQSLVFDESPQGKVLQVIVWGDYGRMDHKCFMGVAQILLEELDLSSMVIGWYKLFPPSSLVDPTLTPLTRRASQSSLESSTGPPCIRS

SEQ ID NO: 330117 - DNA, 1787 bp, Artificial Sequence
  derived and/or modified sequence
agttcacaggcagctcagacagatattccagccagccaccgcacaagttatttaaaccaggtcaaagcttctttggcattcagttttccccagagaacaatttaatgctgatacttaattttttcaagatagacaagagtcgggccacaaaaagttaaaaagtaccatccagagaagcacagaaacaggcatggcagctgaaatgagaaagatggtaaggcagccgagccgagagtctactgatggcagcatcaacagttacagctctgagggcaatttaatatttcctggagtgcgactgggagctgacagtcaattcagtgattttcttgatggattgggaccagcccagcttgttggccgccaaacccttgccacccctgcaatgggtgatatacaaataggaatggaggacaaaaagggccaattagaagtggaagtcattagagcacgaagcctcacacaaaagcctggttccaaatctacacctgctccatatgtcaaagtatatcttttggaaaatggggcctgtatagccaagaagaagacaagaattgcacgaaaaacccttgatcctttgtatcagcagtctctggtttttgatgaaagtccacagggtaaagttcttcaggtgattgtctggggagactatggcagaatggaccacaaatgctttatgggtgtggctcagatcttgttggaagaactcgacctgtccagcatggtgatcggatggtacaaattgttcccaccgtcctcactggtggatcccacactcactcccctcacccggcgggcttcccagtcatctctggaaagttcaactgggcctccctgtattcgatcatagtgaactcataccagagtcattccaataaaactctacttttcaggataataatctgaaccagatatttcatgatcgaaagcattgttggagacagacaatcaacttgtgttttgcctgtagtagtttttcaataatatgtcccaattgttatttaaaacatggcttcatatgacagaacaaggcaatctatcaaatttacaggaagaatcaacatgctggtgagagtcactgatgcttctaacaaatagaaaaagaggaaactttaaatccacgcatacacgtacacacacacatgcacacacacacacaccaaattgaacaaactggaaactctcactctgtgaaaagttgtattctacacatttctgcacagaccacaagcagtgttatttccctgatgtttgagttgttttgttcttttgtgtgttttgtttatttgtgtgttgtttgttggttttcgtttcttgagtttttgttttgttttcaccacatctgttatttccactagtttttttttggctgtgtcatgacaggcctcatgatgctaacagagattcttcccttcttttttccaaaagcaccaaaaaaaagggctgaagtagtctctgtagcatctccccaaagtgttaaacagctacataaggtgaagccaaggaagggtttcactagctttcattttataattatttaaagtcttatgtgtggatacccaagagacaaaaagttatcttccaaaataaataatcacagaagtacttttttaatgaagagcctatctgtttgcattctagaaaattaatttatggtttccattgttttgcatggaagacttttaaagaagtcaatctgcaactaatgctggggactaaaactaactgcataattgtactttgaaaacactccttgtaatgcctttttcttcctgatattaaaaaaa

SEQ ID NO: 330118 - DNA, 2553 bp, Artificial Sequence
  derived and/or modified sequence
gagtggacagtctccacaaggtaaacatggtttggaagggctgaagcggacgtagggtacaaaatttaagaaattaccagttacttctgactggcacggcacctctgaaatacttttttaaagtttgaaatcctttcctggaaggggccgccctggaaccttttggcttaaagtatatgatgctcggaaaacaaactccatccggcacaacctgtcactgcatagtcgattcatgcgggtccagaatgagggaactggcaagagctcttggtggatcatcaaccctgatggggggaagagcggaaaagccccccggcggcgggctgtctccatggacaatagcaacaagtataccaagagccgtggccgcgcagccaagaagaaggcagccctgcagacagcccccgaatcagctgacgacagtccctcccagctctccaagtggcctggcagccccacgtcacgcagcagtgatgagctggatgcgtggacggacttccgttcacgcaccaattctaacgccagcacagtcagtggccgcctgtcgcccatcatggcaagcacagagttggatgaagtccaggacgatgatgcgcctctctcgcccatgctctacagcagctcagccagcctgtcaccttcagtaagcaagccgtgcacggtggaactgccacggctgactgatatggcaggcaccatgaatctgaatgatgggctgactgaaaacctcatggacgacctgctggataacatcacgctcccgccatcccagccatcgcccactgggggactcatgcagcggagctctagcttcccgtataccaccaagggctcgggcctgggctccccaaccagctcctttaacagcacggtgttcggaccttcatctctgaactccctacgccagtctcccatgcagaccatccaagagaacaagccagctaccttctcttccatgtcacactatggtaaccagacactccaggacctgctcacttcggactcacttagccacagcgatgtcatgatgacacagtcggaccccttgatgtctcaggccagcaccgctgtgtctgcccagaattcccgccggaacgtgatgcttcgcaatgatccgatgatgtcctttgctgcccagcctaaccagggaagtttggtcaatcagaacttgctccaccaccagcaccaaacccagggcgctcttggtggcagccgtgccttgtcgaattctgtcagcaacatgggcttgagtgagtccagcagccttgggtcagccaaacaccagcagcagtctcctgtcagccagtctatgcaaaccctctcggactctctctcaggctcctccttgtactcaactagtgcaaacctgcccgtcatgggccatgagaagttccccagcgacttggacctggacatgttcaatgggagcttggaatgtgacatggagtccattatccgtagtgaactcatggatgctgatgggttggattttaactttgattccctcatctccacacagaatgttgttggtttgaacgtggggaacttcactggtgctaagcaggcctcatctcagagctgggtgccaggctgaaggatcactgaggaaggggaagtgggcaaagcagaccctcaaactgacacaagacctacagagaaaaccctttgccaaatctgctctcagcaagtggacagtgataccgtttacagcttaacacctttgtgaatcccacgccattttcctaacccagcagagactgttaatggccccttaccctgggtgaagcacttacccttggaacagaactctaaaaagtatgcaaaatcttccttgtacagggtggtgagccgcctgccagtggaggacagcacccctcagcaccacccaccctcattcagagcacaccgtgagcccccgtcggccattctgtggtgttttaatattgcgatggtttatgggacgttttaagtgttgttcttgtgtttgttttcctttgactttctgagtttttcacatgcattaacttgcggtatttttctgttaaaatgttaaccgtccttcccctagcaaatttaaaaacagaaagaaaatgttgtaccagttaccattccgggttcgagcatcacaagcttttgagcgcatggaactccataaactaacaaattacataaactaaagggggattttctttcttcttttgtttggtagaaaattatccttttctaaaaactgaacaatggcacaattgtttgctatgtgcacccgtccaggacagaaccgtgcataggcaaaaggagtggagcacagcgtccggcccagtgtgtttccggttctgagtcagggtgatctgtggacgggaccccagcaccaagtctacgggtgccagatcagtagggcctgtgatttcctgtcagtgtcctcagctaatgtgaacagtgttggtctgctggttagaaactagaatattgatattttcaggaaagaaatcagctcagctctccactcattgccaaatgtcactaaagggtttagttttaaggagaaagaaaagg

SEQ ID NO: 330119 - protein, 433 aa, Artificial Sequence
  derived and/or modified sequence
MRVQNEGTGKSSWWIINPDGGKSGKAPRRRAVSMDNSNKYTKSRGRAAKKKAALQTAPESADDSPSQLSKWPGSPTSRSSDELDAWTDFRSRTNSNASTVSGRLSPIMASTELDEVQDDDAPLSPMLYSSSASLSPSVSKPCTVELPRLTDMAGTMNLNDGLTENLMDDLLDNITLPPSQPSPTGGLMQRSSSFPYTTKGSGLGSPTSSFNSTVFGPSSLNSLRQSPMQTIQENKPATFSSMSHYGNQTLQDLLTSDSLSHSDVMMTQSDPLMSQASTAVSAQNSRRNVMLRNDPMMSFAAQPNQGSLVNQNLLHHQHQTQGALGGSRALSNSVSNMGLSESSSLGSAKHQQQSPVSQSMQTLSDSLSGSSLYSTSANLPVMGHEKFPSDLDLDMSMGAWNVTWSPLSVVNSWMLMGWILTLIPSSPHRMLLV

SEQ ID NO: 330120 - DNA, 1302 bp, Artificial Sequence
  derived and/or modified sequence
atgagagtgcagaacgagggcaccggcaagagcagctggtggatcatcaaccccgacggcggcaagagcggcaaggcccccagaagaagagccgtgagcatggacaacagcaacaagtacaccaagagcagaggcagagccgccaagaagaaggccgccctgcagaccgcccccgagagcgccgacgacagccccagccagctgagcaagtggcccggcagccccaccagcagaagcagcgacgagctggacgcctggaccgacttcagaagcagaaccaacagcaacgccagcaccgtgagcggcagactgagccccatcatggccagcaccgagctggacgaggtgcaggacgacgacgcccccctgagccccatgctgtacagcagcagcgccagcctgagccccagcgtgagcaagccctgcaccgtggagctgcccagactgaccgacatggccggcaccatgaacctgaacgacggcctgaccgagaacctgatggacgacctgctggacaacatcaccctgccccccagccagcccagccccaccggcggcctgatgcagagaagcagcagcttcccctacaccaccaagggcagcggcctgggcagccccaccagcagcttcaacagcaccgtgttcggccccagcagcctgaacagcctgagacagagccccatgcagaccatccaggagaacaagcccgccaccttcagcagcatgagccactacggcaaccagaccctgcaggacctgctgaccagcgacagcctgagccacagcgacgtgatgatgacccagagcgaccccctgatgagccaggccagcaccgccgtgagcgcccagaacagcagaagaaacgtgatgctgagaaacgaccccatgatgagcttcgccgcccagcccaaccagggcagcctggtgaaccagaacctgctgcaccaccagcaccagacccagggcgccctgggcggcagcagagccctgagcaacagcgtgagcaacatgggcctgagcgagagcagcagcctgggcagcgccaagcaccagcagcagagccccgtgagccagagcatgcagaccctgagcgacagcctgagcggcagcagcctgtacagcaccagcgccaacctgcccgtgatgggccacgagaagttccccagcgacctggacctggacatgagcatgggcgcctggaacgtgacctggagccccctgagcgtggtgaacagctggatgctgatgggctggatcctgaccctgatccccagcagcccccacagaatgctgctggtgtag

SEQ ID NO: 330121 - DNA, 1362 bp, Artificial Sequence
  derived and/or modified sequence
atgagagtgcagaacgagggcaccggcaagagcagctggtggatcatcaaccccgacggcggcaagagcggcaaggcccccagaagaagagccgtgagcatggacaacagcaacaagtacaccaagagcagaggcagagccgccaagaagaaggccgccctgcagaccgcccccgagagcgccgacgacagccccagccagctgagcaagtggcccggcagccccaccagcagaagcagcgacgagctggacgcctggaccgacttcagaagcagaaccaacagcaacgccagcaccgtgagcggcagactgagccccatcatggccagcaccgagctggacgaggtgcaggacgacgacgcccccctgagccccatgctgtacagcagcagcgccagcctgagccccagcgtgagcaagccctgcaccgtggagctgcccagactgaccgacatggccggcaccatgaacctgaacgacggcctgaccgagaacctgatggacgacctgctggacaacatcaccctgccccccagccagcccagccccaccggcggcctgatgcagagaagcagcagcttcccctacaccaccaagggcagcggcctgggcagccccaccagcagcttcaacagcaccgtgttcggccccagcagcctgaacagcctgagacagagccccatgcagaccatccaggagaacaagcccgccaccttcagcagcatgagccactacggcaaccagaccctgcaggacctgctgaccagcgacagcctgagccacagcgacgtgatgatgacccagagcgaccccctgatgagccaggccagcaccgccgtgagcgcccagaacagcagaagaaacgtgatgctgagaaacgaccccatgatgagcttcgccgcccagcccaaccagggcagcctggtgaaccagaacctgctgcaccaccagcaccagacccagggcgccctgggcggcagcagagccctgagcaacagcgtgagcaacatgggcctgagcgagagcagcagcctgggcagcgccaagcaccagcagcagagccccgtgagccagagcatgcagaccctgagcgacagcctgagcggcagcagcctgtacagcaccagcgccaacctgcccgtgatgggccacgagaagttccccagcgacctggacctggacatgttcaacggcagcctggagtgcgacatggagagcatcatcagaagcgagctgatggacgccgacggcctggacttcaacttcgacagcctgatcagcacccagaacgtggtgggcctgaacgtgggcaacttcaccggcgccaagcaggccagcagccagagctgggtgcccggctag

SEQ ID NO: 330122 - DNA, 1302 bp, Artificial Sequence
  derived and/or modified sequence
atgcgggtgcagaatgaaggcacgggcaaatccagctggtggatcataaatcctgatggcggaaaaagcgggaaggcccctaggagaagagcagtttcaatggataattcaaataagtatactaagtctagaggcagagccgctaaaaaaaaagccgccctgcagacagctcccgaatcggcagacgacagcccaagccagctatcgaaatggccgggtagcccgacatctcgatcgagtgatgaactggacgcttggaccgacttccgttcaagaaccaactcaaatgcgagcaccgtgagtggacgcctgagtcccatcatggcctcaacggaactcgacgaagtgcaagatgatgatgccccgctgagcccgatgttatactccagtagcgcgtctctttcgccgtccgtcagcaagccctgtactgttgaattacctagattgacagacatggccggaacaatgaatctaaacgatggactgacggaaaatctcatggacgatctcctggacaatatcactctacccccatctcagccttctcctacagggggcctgatgcagagaagctccagttttccctacacaactaaaggttccgggcttggatctcctacgtccagttttaatagcaccgtatttggcccatcctccttgaacagcctgcgccagtctcccatgcagaccatacaagaaaataaacctgccactttttcctctatgagtcattatggcaatcagactctgcaagacctgctgacgagtgactccttatcccattcagacgtcatgatgacacagtcagacccactaatgagccaggcctcaaccgccgtgtccgcacagaactcgcgacggaatgttatgttacggaacgaccccatgatgtccttcgcggcacagcccaatcagggatctctcgtcaatcagaacctcctgcaccatcagcatcagacacagggcgccctgggcggttccagagccctgagtaacagcgtgtctaatatgggcttatcggagtcctcttcactcgggagtgccaaacaccaacagcaatctccggtgagccagtcaatgcagaccctgtccgactccttgagcggctccagcctctacagcaccagcgctaacctacctgtaatggggcacgagaagtttccaagtgacctggatcttgacatgagcatgggcgcatggaatgtcacatggtcaccactctcagtcgtcaatagttggatgcttatgggttggatcttaacactcataccctcctcccctcaccgcatgctcttagtttag

SEQ ID NO: 330123 - DNA, 1362 bp, Artificial Sequence
  derived and/or modified sequence
atgagagtgcagaatgaaggcaccgggaagagcagctggtggatcatcaatcctgacgggggaaagagcgggaaggccccccggcgaagggccgtgagcatggataactcgaacaagtacacaaaatcacgcggaagggccgccaagaagaaggccgccttgcagacggccccggagtcagccgatgactctccatcccaacttagtaagtggccaggttctcctacttctagaagctccgacgaactcgatgcttggacagactttcggagccggactaattcgaacgcttcgactgtcagcggccggctgagccctattatggctagtacagagctggacgaagtccaggatgacgacgccccactgagccctatgctctactcatctagcgcttctctgtctccctctgttagtaagccttgtacagtcgaattgccaagactgacggatatggccggcacgatgaaccttaacgacggccttactgaaaatctgatggatgatttgttagacaacattacgttacccccgagtcagccctctcccacgggaggcctgatgcagcgtagttcttcatttccctacacaaccaagggcagtggcctgggaagcccaacatcttcctttaatagcacggtcttcggcccatctagcctgaactccctgaggcagagcccaatgcagacaatccaggaaaacaaacccgccaccttctcttcaatgtcccattacggcaatcagaccctccaggacctgctgacttccgactcgctcagtcatagcgacgtaatgatgacgcagagcgacccgctcatgtctcaagcgtcaactgccgtgtctgctcaaaatagcaggcgcaacgttatgctgcgaaacgatcctatgatgtctttcgcagcgcagcctaatcaaggcagccttgtcaatcagaacctgctccaccaccagcatcagacccaaggagccctgggcgggtctcgcgcactgtctaattccgtgtccaatatgggtctgagcgagagctcctccttgggtagcgccaagcaccaacagcagtcaccggtgtctcagagcatgcaaacattgagcgatagcctctccgggtcctcactttacagcacatcggcgaacttgccagtcatgggacatgagaaatttccctctgatttagacctagacatgtttaacggttctctcgagtgtgacatggagtctataattagatctgagctgatggatgctgatggcttggattttaactttgattccctgatatccacccagaacgtggtaggccttaatgtggggaattttaccggcgccaagcaggcgtccagccagtcctgggttccaggctag

SEQ ID NO: 330124 - DNA, 1302 bp, Artificial Sequence
  derived and/or modified sequence
atgagggtgcagaatgaaggcaccgggaagagctcctggtggatcatcaacccagatggcggcaagagcggcaaggcccccaggagaagagctgtgtccatggacaacagcaacaagtacaccaagagccggggccgggccgccaagaagaaggccgccctgcagacagcccctgagagcgcagatgacagccccagccagctgagcaagtggccaggcagccccaccagccgcagcagtgatgagctggatgcctggacagacttccgcagcaggaccaacagcaatgccagcacagtgtctggccgcctgagccccatcatggccagcacagagctggatgaggtgcaggatgatgatgcccccctgagccccatgctgtacagcagcagcgccagcctgagccccagcgtgtccaagccctgcaccgtggagctgccccggctgacagacatggccggcaccatgaacctgaatgatggcctgacagagaacctgatggatgacctgctggacaacatcaccctgccccccagccagcccagccccaccggcggcctgatgcagaggagcagcagcttcccctacaccaccaagggcagcggcctgggcagccccaccagcagcttcaacagcacagtgtttggccccagcagcctgaacagcctgcggcagagccccatgcagaccatccaggagaacaagccagccaccttcagctccatgagccactacggcaaccagaccctgcaggacctgctgaccagtgacagcctgagccacagtgatgtgatgatgacccagagcgaccccctgatgagccaggccagcacagctgtgtctgcccagaacagcagaagaaatgtgatgctgagaaatgaccccatgatgagctttgctgcccagcccaaccagggcagcctggtgaaccagaacctgctgcaccaccagcaccagacccagggcgccctgggcggcagccgggccctgagcaacagcgtgagcaacatgggcctgtctgagagcagcagcctgggcagcgccaagcaccagcagcagagccctgtgtcccagagcatgcagaccctgagtgacagcctgagcggcagcagcctgtacagcaccagcgccaacctgcctgtgatgggccacgagaagttccccagcgacctggacctggacatgtccatgggcgcctggaatgtgacctggagccccctgtctgtggtgaacagctggatgctgatgggctggatcctgaccctcatccccagcagcccccacaggatgctgctggtgtag

SEQ ID NO: 330125 - DNA, 1362 bp, Artificial Sequence
  derived and/or modified sequence
atgagggtgcagaatgaaggcaccgggaagagctcctggtggatcatcaacccagatggcggcaagagcggcaaggcccccaggagaagagctgtgtccatggacaacagcaacaagtacaccaagagccggggccgggccgccaagaagaaggccgccctgcagacagcccctgagagcgcagatgacagccccagccagctgagcaagtggccaggcagccccaccagccgcagcagtgatgagctggatgcctggacagacttccgcagcaggaccaacagcaatgccagcacagtgtctggccgcctgagccccatcatggccagcacagagctggatgaggtgcaggatgatgatgcccccctgagccccatgctgtacagcagcagcgccagcctgagccccagcgtgtccaagccctgcaccgtggagctgccccggctgacagacatggccggcaccatgaacctgaatgatggcctgacagagaacctgatggatgacctgctggacaacatcaccctgccccccagccagcccagccccaccggcggcctgatgcagaggagcagcagcttcccctacaccaccaagggcagcggcctgggcagccccaccagcagcttcaacagcacagtgtttggccccagcagcctgaacagcctgcggcagagccccatgcagaccatccaggagaacaagccagccaccttcagctccatgagccactacggcaaccagaccctgcaggacctgctgaccagtgacagcctgagccacagtgatgtgatgatgacccagagcgaccccctgatgagccaggccagcacagctgtgtctgcccagaacagcagaagaaatgtgatgctgagaaatgaccccatgatgagctttgctgcccagcccaaccagggcagcctggtgaaccagaacctgctgcaccaccagcaccagacccagggcgccctgggcggcagccgggccctgagcaacagcgtgagcaacatgggcctgtctgagagcagcagcctgggcagcgccaagcaccagcagcagagccctgtgtcccagagcatgcagaccctgagtgacagcctgagcggcagcagcctgtacagcaccagcgccaacctgcctgtgatgggccacgagaagttccccagcgacctggacctggacatgtttaatggcagcctggagtgtgacatggagagcatcatccgctctgagctgatggatgctgatggcctggacttcaactttgacagcctcatcagcacccagaatgtggtgggcctgaatgtgggcaacttcaccggggccaagcaggccagcagccagagctgggtgcccggctag

SEQ ID NO: 330126 - DNA, 1302 bp, Artificial Sequence
  derived and/or modified sequence
atgcgggtgcagaacgagggcaccggcaagagcagctggtggatcataaacccagatgggggtaagtcaggcaaagctccacgcagacgagctgtttcgatggacaactccaataagtacaccaagtcccgcggcagagccgctaagaagaaggcagcgttgcagaccgcccctgagtccgcagatgactctcccagtcagttgagcaaatggcctggatcccccactagcagatcatccgacgaactcgatgcatggacagacttccgctcaaggacaaattccaacgctagtaccgtcagcggaagactgagccccataatggcctctacagagctagacgaggtgcaggatgacgacgcacctctttctcccatgctttacagctcgtcggccagcctctcgccatcggtttctaagccttgcacagtcgaactgcccagattgacagatatggccggcaccatgaatctaaatgacggcctgaccgagaatcttatggatgatctgctggacaatatcactctccctccctcccagcctagccccacaggcgggctgatgcaaaggtcaagttcattcccttacacaacaaaagggtcggggctggggagcccgaccagcagtttcaatagtaccgtatttggtccttcatctctgaactcccttcggcagtcgcccatgcaaaccatccaagagaacaagccggcgaccttctcctcaatgagccactacggaaaccaaactcttcaggacctgctaaccagtgattccctgtcccactcagacgtgatgatgactcagtctgatccactcatgtctcaggcttcgacagctgtgtccgcacagaattccaggaggaacgttatgttgcggaatgatccaatgatgtcatttgcagctcagcctaatcagggttcgttagtcaatcagaacctgctgcaccatcagcatcagacgcagggagctctcgggggctcacgcgccttaagcaatagcgtgagtaacatgggcctgagtgagtcttcctctctggggagcgcaaagcaccagcagcagtctccggtgtctcagtctatgcagactctgtccgattcactttccggatccagtctgtattccaccagcgcgaatttgcccgttatgggccacgaaaagttcccatctgacctcgacctagatatgtctatgggagcctggaatgtcacgtggagtcccctgtctgtcgttaacagttggatgctgatgggctggattctgactctaatcccttcttccccccatcggatgctactggtgtag

SEQ ID NO: 330127 - DNA, 1362 bp, Artificial Sequence
  derived and/or modified sequence
atgcgggtgcagaacgagggcaccggcaagagcagctggtggatcattaaccctgatggtggcaaaagtggcaaggccccccgtcgtcgcgcagtatccatggacaactcgaacaaatacacaaaatccaggggcagggctgccaagaaaaaggccgcccttcagaccgctcccgagtctgcggacgacagcccctcccagctcagtaaatggccaggttcaccgacctcccggtcctcagatgaactcgatgcatggacggacttcaggtcgaggacaaacagcaatgccagtaccgtgtcgggtagactgagccctatcatggccagcacggagctggatgaggtgcaggatgacgacgcacctctgagcccaatgctgtatagctcttctgcctccctgtctcctagcgtaagtaaaccatgcactgtagaattaccgagacttacagacatggccggcaccatgaatttgaatgacggcttgactgagaacctcatggatgacctattggacaatattacattgcctcctagtcagccgtcccccaccggtgggctgatgcagagaagctctagttttccctatactaccaaaggaagtggtttaggctctccaactagctcctttaactccaccgtgtttggccctagctctcttaactccttgcgacagagccctatgcagaccatccaggagaacaaaccagcgacttttagcagcatgagccattacgggaaccagactttgcaggaccttctgacgagtgatagcctttcccactcagatgttatgatgacccagtccgatcctttgatgtcccaggcctctaccgccgtgagcgcccaaaatagtcggcgtaatgttatgctgcgaaacgacccaatgatgtcttttgctgcgcagcccaaccagggatccctcgtcaatcagaacctgctgcatcatcagcaccagacacaaggcgctctggggggatctagagctctgagcaactcagtatcgaacatgggtctgtctgagtcttccagtctcggatccgccaaacaccagcagcagagccccgtgagtcagtcaatgcaaacgctttccgactcgctgtctggtagctccttatacagcacttccgcaaacctgcctgttatgggacatgaaaaattcccatcagatctcgatttggacatgttcaacggcagccttgaatgcgatatggagtcaatcatccgctcggagttgatggacgccgacggactggatttcaacttcgattccctcattagtactcagaatgtcgtgggcctgaacgtcggaaactttacaggcgcaaagcaggcctctagccagtcttgggtccctggatag

SEQ ID NO: 330128 - DNA, 1302 bp, Artificial Sequence
  derived and/or modified sequence
atgcgggtgcagaatgaggggaccggaaagtccagttggtggatcatcaacccagatggaggcaaaagcggaaaggcccctcgaaggagggctgtgtccatggacaacagcaataagtacaccaaatctagaggacgggcagccaaaaagaaggctgctctgcagacagcacctgagagtgccgatgactccccttcacagctgtctaaatggcctgggagccccacttctcggagctctgacgagttagacgcttggaccgatttccgctctaggaccaattctaatgcttccaccgtgtccggccgactctctcctataatggcttccaccgagctcgacgaggtgcaggatgacgacgctcctctctcccctatgctgtatagctctagcgcatctctctctccctctgtgtccaagccctgcaccgtcgaactgcccagactcacagacatggcgggaaccatgaacctcaacgatggcctgaccgaaaatttaatggatgacttgttggataatatcaccctgcctccaagccagccgtcgcctacaggcggtctgatgcaacgctcctcttctttcccgtatacgacgaagggctctggccttggctcgcccacttcctcttttaatagcaccgtcttcggaccctctagcttaaactcattaagacagagccccatgcagaccattcaagagaacaaacctgccacgttcagttctatgtcccattacggaaatcagacattacaagacctgctgacaagcgattccctttctcacagtgatgtcatgatgacccagagtgatcccctgatgtcccaggcttctaccgccgtgtcagcacagaacagtcggcgaaacgtcatgctacgtaacgatccaatgatgtcttttgctgcacagcccaatcaggggagcctggtgaaccaaaatctcctgcaccatcagcaccaaactcagggagccttggggggttcgagagccctaagcaatagtgtgtcaaatatgggcttgagtgagtcctccagcctgggctccgccaaacatcagcagcagagtcctgtgtcacagtccatgcaaacactgtccgattctctctcaggatcaagcctgtattcaaccagtgccaacctgccagtgatgggacacgaaaaatttccaagcgaccttgatctggacatgtccatgggtgcctggaatgtgacgtggagccctctttccgtggtgaacagttggatgcttatgggatggatactcacactaatcccgtcttctccacataggatgctgctggtgtag

SEQ ID NO: 330129 - DNA, 1362 bp, Artificial Sequence
  derived and/or modified sequence
atgcgggtgcaaaatgagggtactggcaagtcttcttggtggattataaatcccgacggtgggaagtcggggaaggctcccaggaggagagccgtgagtatggataactccaataaatatactaagtctaggggcagagctgcgaagaagaaagctgcacttcaaacagcacccgaatcagcagatgacagcccctcacagctgtctaaatggcccggatcccctacgagtagaagcagcgacgagctggacgcctggaccgactttcgcagccgcactaacagcaacgcctcaacagtgagtggcagattatcccccatcatggcttccacggagctggacgaggtccaagacgatgatgctcctctgtccccaatgctctactcgagctcagcaagcttaagcccaagtgtaagcaaaccctgtactgtcgaattgcccaggctgaccgatatggccggaacaatgaacttaaacgatgggctgaccgaaaacctgatggatgatctcttagacaatataacgcttcccccaagccagccttctccaacgggcggtctgatgcagcgttcttcgtcctttccctacactacgaaaggcagcggccttggctcaccgacatcctcattcaatagcacagtgtttggccctagtagccttaattcactgcggcagagccctatgcagactatccaggaaaacaaacccgctacattctcctcaatgtctcattacggtaaccagaccttgcaggatctgctaacgtctgactctctgagccactccgacgtcatgatgactcagagcgaccccctaatgtcccaggcctccaccgccgttagcgcacagaattcacggcgtaatgtaatgctgagaaatgatcctatgatgagttttgcggctcaaccaaatcagggcagcttggtgaatcagaatctgctgcaccaccagcaccagacacagggcgctctagggggaagccgggcactgtcgaactctgttagtaatatggggctctctgagtcctcttccttgggatcggcgaagcatcaacaacagtcgcccgtgtcccagtccatgcagactctctcagactccctttcaggaagttccttgtattcgacttccgcaaacctaccggttatgggacacgaaaagtttccttcagatctggacttggatatgttcaacggaagtctggagtgcgatatggaatccatcatcaggagcgagctcatggatgccgacggcttagatttcaactttgactctttaattagtacgcaaaatgtagtcgggctaaatgtcggcaacttcacgggagctaaacaggcgtccagccagagttgggtgcctggatag

SEQ ID NO: 330130 - protein, 657 aa, Artificial Sequence
  derived and/or modified sequence
MGTWMGLLNNKVGTFKFIYVDVLSEDEEKPKRPTRRRRKGRPPQPKSVEDLLDRINLKEHMPTFLFNGYEDLDTFKLLEEEDLDELNIRDPEHRAVLLTAVELLQEYDSNSDQSGSQEKLLVDSQGLSGCSPRDSGCYESSENLENGKTRKASLLSAKSSTEPSLKSFSRNQLGNYPTLPLMKSGDALKQGQEEGRLGGGLAPDTSKSCDPPGVTGLNKNRRSLPVSICRSCETLEGPQTVDTWPRSHSLDDLQVEPGAEQDVPTEVTEPPPQIVPEVPQKTTASSTKAQPLEQDSAVDNALLLTQSKRFSEPQKLTTKKLEGSIAASGRGLSPPQCLPRNYDAQPPGAKHGLARTPLEGHRKGHEFEGTHHPLGTKEGVDAEQRMQPKIPSQPPPVPAKKSRERLANGLHPVPMGPSGALPSPDAPCLPVKRGSPASPTSPSDCPPALAPRPLSGQAPGSPPSTRPPPWLSELPENTSLQEHGVKLGPALTRKVSCARGVDLETLTENKLHAEGIDLTEEPYSDKHGRCGIPEALVQRYAEDLDQPERDVAANMDQIRVKQLRKQHRMAIPSGGLTEICRKPVSPGCISSVSDWLISIGLPMYAGTLSTAGFSTLSQVPSLSHTCLQEAGITEERHIRKLLSAARLFKLPPGPEAM

SEQ ID NO: 330131 - protein, 84 aa, Artificial Sequence
  derived and/or modified sequence
MEEQDCRDGSLGNIDDLAQQYADYYNTCFSDVCERMEELRKRRVSQDLEVEKPDASPTSLQLRSQIEESLGFCSAVSTPEVERK

SEQ ID NO: 330132 - protein, 82 aa, Artificial Sequence
  derived and/or modified sequence
QAQDFKDGSLGNIDDLAQQYADYYNTCFSDVCERMEELRKRRVSQDLEVEKPDASPTSLQLRSQIEESLGFCSAVSTPEVER

SEQ ID NO: 330133 - DNA, 255 bp, Artificial Sequence
  derived and/or modified sequence
atggaggagcaggactgcagagacggcagcctgggcaacatcgacgacctggcccagcagtacgccgactactacaacacctgcttcagcgacgtgtgcgagagaatggaggagctgagaaagagaagagtgagccaggacctggaggtggagaagcccgacgccagccccaccagcctgcagctgagaagccagatcgaggagagcctgggcttctgcagcgccgtgagcacccccgaggtggagagaaagtag

SEQ ID NO: 330134 - DNA, 249 bp, Artificial Sequence
  derived and/or modified sequence
caggcccaggacttcaaggacggcagcctgggcaacatcgacgacctggcccagcagtacgccgactactacaacacctgcttcagcgacgtgtgcgagagaatggaggagctgagaaagagaagagtgagccaggacctggaggtggagaagcccgacgccagccccaccagcctgcagctgagaagccagatcgaggagagcctgggcttctgcagcgccgtgagcacccccgaggtggagagatag

SEQ ID NO: 330135 - DNA, 255 bp, Artificial Sequence
  derived and/or modified sequence
atggaagaacaagactgcagagatggatccctcggcaatatagacgacctcgcccaacagtacgctgattactataatacgtgcttttctgacgtctgtgagcgtatggaggagttgcgtaagcggcgagtctcccaggacttggaagtggagaagcctgacgctagtccaacctcactccagctgcggagccaaatcgaagagtcactgggtttttgctccgccgtgtcgacgcccgaagtggagcggaaatag

SEQ ID NO: 330136 - DNA, 249 bp, Artificial Sequence
  derived and/or modified sequence
caggcacaggatttcaaggacgggagccttggaaacatcgatgacctggctcagcagtacgcggactactataacacctgtttttcagatgtatgcgagcgcatggaagaactcagaaagagaagggtctctcaggatctcgaggttgaaaagcctgacgctagtccaaccagccttcagctcagaagccaaattgaggaatcactggggttttgcagtgccgtgagtaccccagaagtcgagcgatag

SEQ ID NO: 330137 - DNA, 255 bp, Artificial Sequence
  derived and/or modified sequence
atggaggagcaggactgcagagatggcagcctgggcaacattgatgacctggcccagcagtatgctgactactacaacacctgcttcagtgatgtgtgtgagaggatggaggagctgaggaagagaagagtgtcccaggacctggaggtggagaagccagatgccagccccaccagcctgcagctgcggagccagatcgaggagagcctgggcttctgcagcgctgtgtccaccccagaggtggagaggaagtag

SEQ ID NO: 330138 - DNA, 249 bp, Artificial Sequence
  derived and/or modified sequence
caggcccaggacttcaaggatggcagcctgggcaacattgatgacctggcccagcagtatgctgactactacaacacctgcttcagtgatgtgtgtgagaggatggaggagctgaggaagagaagagtgtcccaggacctggaggtggagaagccagatgccagccccaccagcctgcagctgcggagccagatcgaggagagcctgggcttctgcagcgctgtgtccaccccagaggtggagaggtag

SEQ ID NO: 330139 - DNA, 255 bp, Artificial Sequence
  derived and/or modified sequence
atggaggagcaggactgccgggacggcagcctgggcaacatcgacgacctggcccagcagtacgcagactattataatacgtgtttttccgatgtgtgtgagcggatggaggagctgagaaaacgtagggttagccaggatctggaagtggaaaaacctgacgcctctcccacatccctgcagcttcgaagtcaaatcgaggaatctctcgggttctgttcagccgtgtcaactcccgaggtggagcgaaaatag

SEQ ID NO: 330140 - DNA, 249 bp, Artificial Sequence
  derived and/or modified sequence
caggcccaggacttcaaggacggcagcctgggcaacatcgacgacttggcccaacaatatgctgactattacaacacttgtttctccgacgtgtgcgagcggatggaagagctgcggaagcgcagagtctcacaggacctcgaggtggaaaagcccgatgcgtctcccacctccctccagcttaggtcacagatcgaggagtcactgggattttgcagcgctgtcagtacacccgaggttgaaaggtag

SEQ ID NO: 330141 - DNA, 255 bp, Artificial Sequence
  derived and/or modified sequence
atggaagaacaggattgtcgggatggcagtttaggaaatatcgacgatcttgcacagcagtacgcggactattacaacacctgcttcagtgatgtctgcgagaggatggaggagctccgtaagaggcgagtatcccaggacttggaggttgagaagccagatgccagcccaacttccctgcagctgagaagccaaatcgaagagtcactgggcttttgttcagccgtgagcactccagaggtggagaggaagtag

SEQ ID NO: 330142 - DNA, 249 bp, Artificial Sequence
  derived and/or modified sequence
caggctcaggatttcaaagatggttctctcggcaatatcgatgacttagctcagcagtacgccgactactataatacctgtttctcagatgtgtgcgagcgcatggaggaacttcggaaaagacgcgtgagccaagacctagaagtggagaagcccgatgccagtccaacctccctgcagctaagaagccagatagaggagagtctgggtttctgttctgccgtgagtacacctgaggtcgagcgctag

SEQ ID NO: 330143 - DNA, 591 bp, Artificial Sequence
  derived and/or modified sequence
gagtcagagaggaagtcagagaccatttgaacgtatggccagcagctcacttcatggaggaacaagattgcagggacggttcactgggaaacatcgatgacctggcgcagcagtatgcagattattacaacacctgtttctccgacgtgtgcgagaggatggaggagctgcggaaacggcgggtttcccaggacctggaagtggagaaacccgatgctagccccacgtcacttcagctgcggtcccagatcgaagagtcgcttggcttctgtagcgccgtgtcaaccccagaagtggaaagaaagtaagtctttctccctctgcccaggaccaccttccaagaaggtgtcttttaggtccatgctgacggaaatcaaacaggcgatcatgtgcgtatgtactatggagttatgcgatgtcattttccttaacatgttgcatgcatgtgtgtgtatctaggtggctaagagtgtgttttgtaatgcagttggtgatgtctgaggattttgtgaagagttactgattttacacttattgtgaataaaccctaaataaatctccggaaatagaaagggaaaggataggtgcatt

SEQ ID NO: 330144 - DNA, 537 bp, Artificial Sequence
  derived and/or modified sequence
caggcccaggattttaaagacggttcactgggaaacatcgatgacctggcgcagcagtatgcagattattacaacacctgtttctccgacgtgtgcgagaggatggaggagctgcggaaacggcgggtttcccaggacctggaagtggagaaacccgatgctagccccacgtcacttcagctgcggtcccagatcgaagagtcgcttggcttctgtagcgccgtgtcaaccccagaagtggaaagaaagaaccctcttcataaatcaaactcagaagacagctctgtaggaaaaggagactggaagaagaaaaataagtatttctggcagaacttccgaaagaaccagaaaggaataatgagacagacttcaaaaggagaagacgttggttatgttgccagtgaaataacgatgagcgatgaggagcggattcagctaatgatgatggtcaaagaaaagatgatcacaattgaggaagcacttgctaggctcaaggaatacgaggcccagcaccggcagtcggctgccctggaccct

SEQ ID NO: 330145 - protein, 8409 aa, Artificial Sequence
  derived and/or modified sequence
MATSRGASRCPRDIANVMQRLQDEQEIVQKRTFTKWINSHLAKRKPPMVVDDLFEDMKDGVKLLALLEVLSGQKLPCEQGRRMKRIHAVANIGTALKFLEGRKIKLVNINSTDIADGRPSIVLGLMWTIILYFQIEELTSNLPQLQSLSSSASSVDSIVSSETPSPPSKRKVTTKIQGNAKKALLKWVQYTAGKQTGIEVKDFGKSWRSGVAFHSVIHAIRPELVDLETVKGRSNRENLEDAFTIAETELGIPRLLDPEDVDVDKPDEKSIMTYVAQFLKHYPDIHNASTDGQEDDEILPGFPSFANSVQNFKREDRVIFKEMKVWIEQFERDLTRAQMVESNLQDKYQSFKHFRVQYEMKRKQIEHLIQPLHRDGKLSLDQALVKQSWDRVTSRLFDWHIQLDKSLPAPLGTIGAWLYRAEVALREEITVQQVHEETANTIQRKLEQHKRKLRNVIDLLQNTDAHKRAFHEIYRTRSVNGIPVPPDQLEDMAERFHFVSSTSELHLMKMEFLELKYRLLSLLVLAESKLKSWIIKYGRRESVEQLLQNYVSFIENSKFFEQYEVTYQILKQTAEMYVKADGSVEEAENVMKFMNETTAQWRNLSVEVRSVRSMLEEVISNWDRYGNTVASLQAWLEDAEKMLNQSENAKKDFFRNLPHWIQQHTAMNDAGNFLIETCDEMVSRDLKQQLLLLNGRWRELFMEVKQYAQADEMDRMKKEYTDCVVTLSAFATEAHKKLSEPLEVSFMNVKLLIQDLEDIEQRVPVMDAQYKIITKTAHLITKESPQEEGKEMFATMSKLKEQLTKVKECYSPLLYESQQLLIPLEELEKQMTSFYDSLGKINEIITVLEREAQSSALFKQKHQLRILKCKWCNSSQKMTLCLVLGSMISMLSTAKITIAGYKSEVEVSELLACQENCKKTLTLIEKGSQSVQKFVTLSNVLKHFDQTRLQTDCRYSCCFSVMRKQHHIMIVFHIKSMVKKTGDWKKHVETNSRLMKKFEESRAELEKVLRIAQEGLEEKGDPEELLRRHTEFFSQLDQRVLNAFLKACDELTDILPEQEQQGLQEAVRKLHKQWKDLQGEAPYHLLHLKIDVEKNRFLASVEECRTELDRETKLMPQEGSEKIIKEHRVFFSDKGPHHLCEKRLQLIEELCVKLPVRDPVRDTPGTCHVTLKELRAAIDSTYRKLMEDPDKWKDYTSRFSEFSSWISTNETQLKGIKGEAIDTANHGEVKRAVEEIRNGVTKRGETLSWLKSRLKVLTEVSSENEAQKQGDELAKLSSSFKALVTLLSEVEKMLSNFGDCVQYKEIVKNSLEELISGSKEVQEQAEKILDTENLFEAQQLLLHHQQKTKRISAKKRDVQQQIAQAQQGEGGLPDRGHEELRKLESTLDGLERSRERQERRIQVTLRKWERFETNKETVVRYLFQTGSSHERFLSFSSLESLSSELEQTKEFSKRTESIAVQAENLVKEASEIPLGPQNKQLLQQQAKSIKEQVKKLEDTLEEEYVIDNKTMEMVKTKWDHFGSNFETLSVWITEKEKELNALETSSSAMDMQISQIKVTIQEIESKLSSIVGLEEEAQSFAQFVTTGESARIKAKLTQIRRYGEELREHAQCLEGTILGHLSQQQKFEENLRKIQQSVSEFEDKLAVPIKICSSATETYKVLQEHMDLCQALESLSSAITAFSASARKVVNRDSCVQEAAALQQQYEDILRRAKERQTALENLLAHWQRLEKELSSFLTWLERGEAKASSPEMDISADRVKVEASKDDVKMMKLHLEQLDERWRDLPQIINKRINFLQSVVAEHQQFDELLLSFSVWIKLFLSELQTTSEISIMDHQVALTRHKDHAAEVESKKGELQSLQGHLAKLGSLGRAEDLHLLQGKAEDCFQLFEEASQVVERRQLALSHLAEFLQSHASLSGILRQLRQTVEATNSMNKNESDLIEKDLNDALQNAKALESAAVSLDGILSKAQYHLKIGSSEQRTSCRATADQLCGEVERIQNLLGTKQSEADALAVLKKAFQDQKEELLKSIEDIEERTDKERLKEPTRQALQQRLRVFNQLEDELNSHEHELCWLKDKAKQIAQKDVAFAPEVDREINRLEVTWDDTKRLIHENQGQCCGLIDLMREYQNLKSAVSKVLENASSVIVTRTTIKDQEDLKWAFSKHETAKNKMNYKQKDLDNFTSKGKHLLSELKKIHSSDFSLVKTDMESTVDKWLDVSEKLEENMDRLRVSLSIWDDVLSTRDEIEGWSNNCVPQMAENISNLDNHLRAEELLKEFESEVKNKALRLEELHSKVNDLKELTKNLETPPDLQFIEADLMQKLEHAKEITEVAKGTLKDFTAQSTQVEKFINDITTWFTKVEESLMNCAQNETCEALKKVKDIQKELQSQQSNISSTQENLNSLCRKYHSAELESLGRAMTGLIKKHEAVSQLCSKTQASLQESLEKHFSEESMQEFQEWFLGAKAAAKESSDRTGDSKVLEAKLHDLQQNILDSVSDGQSKLDAVTQEGQTLYAHLSKQIVSSIQEQITKANEEFQAFLKQCLKDKQALQDCASELGSFEDQHRKLNLWIHEMEERFNTENLGESKQHIPEKKNEVHKVEMFLGELLAARESLDKLSQRGQLLSEEGHGAGQEGRLCSQLLTSHQNLLRMTKEKLRSCQVALQEHEALEEALQSMWFWVKAIQDRLACAESTLGSKDTLEKRLSQIQDILLMKGEGEVKLNMAIGKGEQALRSSNKEGQRVIQTQLETLKEVWADIMSSSVHAQSTLESVISQWNDYVERKNQLEQWMESVDQKIEHPLQPQPGLKEKFVLLDHLQSILSEAEDHTRALHRLIAKSRELYEKTEDESFKDTAQEELKTQFNDIMTVAKEKMRKVEEIVKDHLMYLDAVHEFTDWLHSAKEELHRWSDMSGDSSATQKKLSKIKELIDSREIGASRLSRVESLAPEVKQNTTASGCELMHTEMQALRADWKQWEDSVFQTQSCLENLVSQMALSEQEFSGQVAQLEQALEQFSALLKTWAQQLTLLEGKNTDEEIVECWHKGQEILDALQKAEPRTEDLKSQLNELCRFSRDLSTYSGKVSGLIKEYNCLCLQASKGCQNKEQILQQRFRKAFRDFQQWLVNAKITTAKCFDIPQNISEVSTSLQKIQEFLSESENGQHKLNMMLSKGELLSTLLTKEKAKGIQAKVTAAKEDWKNFHSNLHQKESALENLKIQMKDFEVSAEPIQDWLSKTEKMVHESSNRLYDLPAKRREQQKLQSVLEEIHCYEPQLNRLKEKAQQLWEGQAASKSFRHRVSQLSSQYLALSNLTKEKVSRLDRIVAEHNQFSLGIKELQDWMTDAIHMLDSYCHPTSDKSVLDSRTLKLEALLSVKQEKEIQMKMIVTRGESVLQNTSPEGIPTIQQQLQSVKDMWASLLSAGIRCKRVRLPCAYIALKLRVHQHAELRDKTTMLGKAKEAVTKSEKLVRLHQEYQRDLKAFEVWLGQEQEKLDQYSVLEGDAHTHETTLRDLQELQVHCAEGQALLNSVLHTREDVIPSGIPQAEDRALESLRQDWQAYQHRLSETRTQFNNVVNKLRLMEQKFQQVDEWLKTAEEKVSPRTRRQSNRATKEIQLHQMKKWHEEVTAYRDEVEEVGARAQEILDESHVNSRMGCQATQLTSRYQALLLQVLEQIKFLEEEIQSLEESESSLSSYSDWYGSTHKNFKNVATKIDKVDTVMMGKKLKTLEVLLKDMEKGHSLLKSAREKGERAVKYLEEGEAERLRKEIHDHMEQLKELTSTVRKEHMTLEKSLQQTVLSHEPSVKSVREKGEALLELVQDVTLKDKIDQLQSDYQDLCSIGKEHVFSLEAKVKDHEDYNSELQEVEKWLLQMSGRLVAPDLLETSSLETITQQLAHHKMYQSLEHELQKHVSRQDTLQQCQAWLSAVQPDLEPSPQPPLSRAEAIKQVKHFRALQEQARTYLDLLCSMCDLSNASVKTTAKDIQQTEQTIEQKLVQAQNLTQGWEEIKHLKSELWIYLQDADQQLQNMKRRHSELELNIAQNMVSQVKDFVKKLQSKQASVNTIIEKVNKLTKKEESPEHKEINHLNDQWLDLCRQSNNLCLQREEDLQRTRDYHDCMNVVEVFLEKFTTEWDNLARSDAESTAVHLEALKKLALALQERKYAIEDLKDQKQKMIEHLNLDDKELVKEQTSHLEQRWFQLEDLIKRKIQVSVTNLEELNVVQSRFQELMEWAEEQQPNIAEALKQSPPPDMAQNLLMDHLAICSELEAKQMLLKSLIKDADRVMADLGLNERQVIQKALSDAQSHVNCLSDLVGQRRKKHFKEDFDKACHWLKQADIVTFPEINLMNESSELHTQLAKYQNILEQSPEYENLLLTLQRTGQTILPSLNEVDHSYLSEKLNALPRQFNVIVALAKDKFYKVQEAILARKEYASLIELTTQSLSELEAQFLRMSKVPTDLAVEEALSLQDGCRAILDEVAGLGEAVDELNQKKEGFRSTGQPWQPDKMLHLVTLYHRLKRQTEQRVSLLEDTTSAYQEHEKMCQQLERQLKSVKEEQSKVNEETLPAEEKLKMYHSLAGSLQDSGIVLKRVTIHLEDLAPHLDPLAYEKARHQIQSWQGELKLLTSAIGETVTECESRMVQSIDFQTEMSRSLDWLRRVKAELSGPVYLDLNLQDIQEEIRKIQIHQEEVQSSLRIMNALSHKEKEKFTKAKELISADLEHSLAELSELDGDIQEALRTRQATLTEIYSQCQRYYQVFQAANDWLEDAQELLQLAGNGLDVESAEENLKSHMEFFSTEDQFHSNLEELHSLVATLDPLIKPTGKEDLEQKVASLELRSQRMSRDSGAQALVSVVNSFHEKIVALEEKASQLEKTGNDASKATLSRSMTTVWQRWTRLRAVAQDQEKILEDAVDEWTGFNNKVKKATEMIDQLQDKLPGSSAEKASKAELLTLLEYHDTFVLELEQQQSALGMLRQQTLSMLQDGAAPTPGEEPPLMQEITAMQDRCLKMVETQINSVKCWVQETKEYLGNPTIEIDAQLEELQILLTEATNHRQNIEKMAEEQKEKYLGLYTILPSELSLQLAEVALDLKIRDQIQDKIKEVEQSKATSQELSRQIQKLAKDLTTILTKLKAKTDNVVQAKTDQKAASHLEEYNEMLELILKWIEKAKVLAHGTIAWNSASQLREQYILHQTLLEESKEIDSELEAMTEKLQYLTSVYCTEKMSQQVAELGRETEELRQMIKIRLQNLQDAAKDMKKFEAELKKLQAALEQAQATLTSPEVGRLSLKEQLSHRQHLLSEMESLKPKVQAVQLCQSALRIPEDVVASLPLCHAALRLQEEASRLQHTAIQQCNIMQEAVVQYEQYEQEMKHLQQLIEGAHREIEDKPVATSNIQELQAQISRHEELAQKIKGYQEQIASLNSKCKMLTMKAKHATMLLTVTEVEGLAEGTEDLDGELLPTPSAHPSVVMMTAGRCHTLLSPVTEESGEEGTNSEISSPPACRSPSPVANTDASVNQDIAYYQALSAERLQTDAAKIHPSTSASQEFYEPGLEPSATAKLGDLQRSWETLKNVISEKQRTLYEALERQQKYQDSLQSISTKMEAIELKLSESPEPGRSPESQMAEHQALMDEILMLQDEINELQSSLAEELVSESCEADPAEQLALQSTLTVLAERMSTIRMKASGKRQLLEEKLNDQLEEQRQEQALQRYRCEADELDSWLLSTKATLDTALSPPKEPMDMEAQLMDCQNMLVEIEQKVVALSELSVHNENLLLEGKAHTKDEAEQLAGKLRRLKGSLLELQRALHDKQLNMQGTAQEKEESDVDLTATQSPGVQEWLAQARTTWTQQRQSSLQQQKELEQELAEQKSLLRSVASRGEEILIQHSAAETSGDAGEKPDVLSQELGMEGEKSSAEDQMRMKWESLHQEFSTKQKLLQNVLEQEQEQVLYSRPNRLLSGVPLYKGDVPTQDKSAVTSLLDGLNQAFEEVSSQSGGAKRQSIHLEQKLYDGVSATSTWLDDVEERLFVATALLPEETETCLFNQEILAKDIKEMSEEMDKNKNLFSQAFPENGDNRDVIEDTLGCLLGRLSLLDSVVNQRCHQMKERLQQILNFQNDLKVLFTSLADNKYIILQKLANVFEQPVAEQIEAIQQAEDGLKEFDAGIIELKRRGDKLQVEQPSMQELSKLQDMYDELMMIIGSRRSGLNQNLTLKSQYERALQDLADLLETGQEKMAGDQKIIVSSKEEIQQLLDKHKEYFQGLESHMILTETLFRKIISFAVQKETQFHTELMAQASAVLKRAHKRGVELEYILETWSHLDEDQQELSRQLEVVESSIPSVGLVEENEDRLIDRITLYQHLKSSLNEYQPKLYQVLDDGKRLLISISCSDLESQLNQLGECWLSNTNKMSKELHRLETILKHWTRYQSESADLIHWLQSAKDRLEFWTQQSVTVPQELEMVRDHLNAFLEFSKEVDAQSSLKSSVLSTGNQLLRLKKVDTATLRSELSRIDSQWTDLLTNIPAVQEKLHQLQMDKLPSRHAISEVMSWISLMENVIQKDEDNIKNSIGYKAIHEYLQKYKGFKIDINCKQLTVDFVNQSVLQISSQDVESKRSDKTDFAEQLGAMNKSWQILQGLVTEKIQLLEGLLESWSEYENNVQCLKTWFETQEKRLKQQHRIGDQASVQNALKDCQDLEDLIKAKEKEVEKIEQNGLALIQNKKEDVSSIVMSTLRELGQTWANLDHMVGQLKILLKSVLDQWSSHKVAFDKINSYLMEARYSLSRFRLLTGSLEAVQVQVDNLQNLQDDLEKQERSLQKFGSITNQLLKECHPPVTETLTNTLKEVNMRWNNLLEEIAEQLQSSKALLQLWQRYKDYSKQCASTVQQQEDRTNELLKAATNKDIADDEVATWIQDCNDLLKGLGTVKDSLFFLHELGEQLKQQVDASAASAIQSDQLSLSQHLCALEQALCKQQTSLQAGVLDYETFAKSLEALEAWIVEAEEILQGQDPSHSSDLSTIQERMEELKGQMLKFSSMAPDLDRLNELGYRLPLNDKEIKRMQNLNRHWSLISSQTTERFSKLQSFLLQHQTFLEKCETWMEFLVQTEQKLAVEISGNYQHLLEQQRAHELFQAEMFSRQQILHSIIIDGQRLLEQGQVDDRDEFNLKLTLLSNQWQGVIRRAQQRRGIIDSQIRQWQRYREMAEKLRKWLVEVSYLPMSGLGSVPIPLQQARTLFDEVQFKEKVFLRQQGSYILTVEAGKQLLLSADSGAEAALQAELAEIQEKWKSASMRLEEQKKKLAFLLKDWEKCEKGIADSLEKLRTFKKKLSQSLPDHHEELHAEQMRCKELENAVGSWTDDLTQLSLLKDTLSAYISADDISILNERVELLQRQWEELCHQLSLRRQQIGERLNEWAVFSEKNKELCEWLTQMESKVSQNGDILIEEMIEKLKKDYQEEIAIAQENKIQLQQMGERLAKASHESKASEIEYKLGKVNDRWQHLLDLIAARVKKLKETLVAVQQLDKNMSSLRTWLAHIESELAKPIVYDSCNSEEIQRKLNEQQELQRDIEKHSTGVASVLNLCEVLLHDCDACATDAECDSIQQATRNLDRRWRNICAMSMERRLKIEETWRLWQKFLDDYSRFEDWLKSSERTAAFPSSSGVIYTVAKEELKKFEAFQRQVHECLTQLELINKQYRRLARENRTDSACSLKQMVHEGNQRWDNLQKRVTSILRRLKHFIGQREEFETARDSILVWLTEMDLQLTNIEHFSECDVQAKIKQLKAFQQEISLNHNKIEQIIAQGEQLIEKSEPLDAAIIEEELDELRRYCQEVFGRVERYHKKLIRLPLPDDEHDLSDRELELEDSAALSDLHWHDRSADSLLSPQPSSNLSLSLAQPLRSERSGRDTPASVDSIPLEWDHDYDLSRDLESAMSRALPSEDEEGQDDKDFYLRGAVGLSGDHSALESQIRQLGKALDDSRFQIQQTENIIRSKTPTGPELDTSYKGYMKLLGECSSSIDSVKRLEHKLKEEEESLPGFVNLHSTETQTAGVIDRWELLQAQALSKELRMKQNLQKWQQFNSDLNSIWAWLGDTEEELEQLQRLELSTDIQTIELQIKKLKELQKAVDHRKAIILSINLCSPEFTQADSKESRDLQDRLSQMNGRWDRVCSLLEEWRGLLQDALMQCQGFHEMSHGLLLMLENIDRRKNEIVPIDSNLDAEILQDHHKQLMQIKHELLESQLRVASLQDMSCQLLVNAEGTDCLEAKEKVHVIGNRLKLLLKEVSRHIKELEKLLDVSSSQQDLSSWSSADELDTSGSVSPTSGRSTPNRQKTPRGKCSLSQPGPSVSSPHSRSTKGGSDSSLSEPGPGRSGRGFLFRVLRAALPLQLLLLLLIGLACLVPMSEEDYSCALSNNFARSFHPMLRYTNGPPPL

SEQ ID NO: 330146 - DNA, 6947 bp, Artificial Sequence
  derived and/or modified sequence
gggctgaaagacacacagaagtcttcatggatatagttgatacatttaatcatttaattcctactgaacacttagatgatgccctatttctaggatccaacctggagaatgaagtctgtgaggattttagtgcaagtcaaaatgtcttagaggactcgctgaagaacatgctcagcgataaggatcctatgctaggatctgcaagtaaccagttctgtttgcctgttttggatagcaatgatcccaatttccagatgccttgttcaacagttgttggtcttgacgatattatggatgaaggagttgttaaagaaagtggcaatgataccattgatgaagaagaactgattttacctaacaggaacttaagggacaaggtagaagaaaattcagtgagatctccaagaaaatcacctcgtttaatggcacaagaacaagtaagaagtttgcgacagagcactattgccaagcgttcaaatgcagcaccattaagtaacacaaaaaaagcatctgggaagactgtatctactgctaaagcaggagtgaaacaaccagaaaggagtcaggttaaagaagaagtatgtatgtcactgaaacctgagtaccataaggagaatagaaggtgcagccgaaatagcggacaaattgaagtggtacctgaagtatcagtgtcttcaagtcattcttcagtgtcatcttgtcttgaaatgaaggatgaagatggattagattctaagcataagtgtaataatccgggagaaatagatgtgccatctcatgaattaaattgttcacttctttcagagacttgtgttactattggagaaaagaaaaatgaagctttgatggaatgtaaagccaagcctgttggtagtccattgtttaagttttcagataaagaagaacatgaacaaaatgattccatttcaggtaaaacgggtgagactgttgttgaagaaatgatagcaacaagaaaagttgaacaagattcaaaggagacagtaaaattatcccatgaagatgaccatattcttgaggacgctggatcttctgatatttctagtgatgctgcttgtacaaatccaaataagacagaaaacagccttgtaggtttgcctagttgtgtagatgaagtgactgaatgtaatttggaattgaaggataccatgggtattgctgataaaactgagaacacccttgaaagaaataaaattgaaccgttgggttattgtgaagatgcggagtctaataggcagttggagagcactgagtttaataaatcaaacttagaggtggttgatactagtacttttggaccggaaagtaatatcttggaaaatgctatttgtgatgtgcctgaccaaaattcaaaacagttgaatgctatagaaagtactaaaatagagtcccatgaaacagcaaaccttcaggatgacagaaacagccagtcaagtagcgtttcttacttagagtcaaaaagtgtaaaatccaaacatacaaaacctgtaattcattctaagcaaaacatgaccacagatgctccgaagaaaattgttgcagcaaagtatgaagtaatacatagcaaaactaaagttaatgtcaaaagtgtgaaacgaaatactgatgtaccagaatctcagcaaaattttcataggccagtcaaagtcagaaaaaaacaaattgataaggagccaaagattcagagttgcaattctggggttaaatctgtgaaaaaccaagctcattctgtactgaaaaaaacattacaggatcaaactttagtacaaattttcaagcccttaactcattctttgagtgataagtcacacgctcatcctggttgcttgaaagaacctcatcatcctgcacaaactggacatgtatcacattctagccagaaacagtgtcataagcctcagcaacaggccccagcaatgaaaaccaatagtcacgtgaaggaagagcttgaacacccaggcgttgagcattttaaggaagaggataaactgaaactgaaaaaacctgagaagaacctacaaccccgccaaagaagaagcagcaaaagtttttctttagatgagccaccattgttcattccagataacatagctaccataagaagagaaggctctgatcatagctcctcatttgaaagcaaatatatgtggactcccagcaagcagtgtgggttttgcaaaaaaccacatggcaacaggtttatggttggctgtgggagatgtgatgactggtttcatggtgattgtgttgggttaagtctttctcaagcacagcagatgggcgaggaagacaaagaatatgtctgtgtaaaatgttgtgctgaagaagacaaaaagactgaaatactagatccagatactttggaaaaccaagctacagttgaattccatagtggagataaaacaatggagtgtgaaaagcttggattatcaaaacacacaacaaatgatagaaccaaatatatagatgatacagtgaagcacaaggtcaaaattttaaaacgggagtctggtgaaggcagaaattcatcagactgtagagataatgaaattaaaaaatggcagctagctcctcttcgtaagatgggacaaccagttttacctcggagatcctcagaagaaaaaagtgaaaaaataccgaaagagtctacaactgttacttgcacaggagaaaaagcttcaaaaccaggtactcatgagaagcaagagatgaaaaagaagaaagttgaaaaaggagtgcttaatgtacatcctgctgcttctgcttccaagccttctgcagatcagatcaggcaaagtgtcagacattctctcaaagacattcttatgaagagacttacagactcaaatttgaaggtaccagaggaaaaggcagcaaaagttgccacaaaaattgagaaagagcttttctctttttttcgggacacagatgctaaatataagaacaaatatagaagtttgatgtttaatttgaaagatcctaaaaacaatatattatttaaaaaagtactgaaaggagaagtaactcctgatcatcttatcagaatgagtccagaagaactagcttctaaagagttagctgcttggagacgaagagaaaacagacataccatagaaatgattgagaaagagcagagagaagtggaacgacggccaatcaccaaaataactcataaaggtgaaatagaaattgagagtgatgccccaatgaaagaacaggaagcagccatggagattcaggaaccagccgccaataagtcattggagaagccagaaggatctgaaaaacaaaaagaggaggttgactctatgtctaaagataccactagtcaacacagacagcatctttttgatctcaactgcaaaatctgcataggtcgaatggcaccacctgtagatgatctttctccaaaaaaagtaaaagttgttgtaggagtagctcgcaaacattcagacaatgaagcagaaagtatagcagatgcattatcttcaacctcaaatattttggcttctgaattctttgaggaggagaaacaggagtctccaaagtcaacgttctctcctgctccacgtccagagatgcctggaactgttgaagttgagtctacctttctggctcgattgaacttcatctggaaaggttttatcaacatgccttctgtggcaaaatttgttaccaaagcctatccagtatctggctccccagaatacctgacagaggacctaccagatagtattcaagtaggtggcaggatatcacctcagacagtttgggattatgtggaaaaaataaaagcatcaggaaccaaggaaatttgtgtggttcgcttcacaccagtaactgaagaagatcaaatttcttatactttgctctttgcatacttcagtagcagaaagcgctatggagtagctgctaacaacatgaagcaggttaaagatatgtaccttattcctttgggtgccacagataaaattccacaccctcttgtgccttttgatggacctgggcttgaactgcatagacctaatctattgttgggcttaattattcgtcagaaactgaagcgacagcacagtgcctgtgctagtactagtcatatagctgagactcctgaaagtgcaccaccaatagcattgccacctgataaaaaaagtaaaatagaagtttctacagaagaagcaccagaggaagaaaatgacttttttaattcttttacaactgtattacacaagcagagaaataaacctcagcagaatcttcaggaagaccttccaacagcagttgaacctttaatggaagtcaccaaacaggagccaccaaaacctttaagatttcttcctggcgtgttgattggctgggagaatcaacctactactctggaattagcaaataaacctcttcctgtggatgatatacttcaaagccttttgggcaccactggtcaagtatatgaccaggcccagtcagtgatggaacaaaacactgttaaagaaattccatttttaaatgagcagaccaactcaaaaatagagaaaacagataatgtggaagtaactgatggtgaaaacaaggagataaaagttaaagtagataatatttcagaatctacagataagtcagcagaaatagaaacatcagtagtagggtcctcttccatttctgcagggtctttgacgagtcttagtctcagaggtaagccaccagatgtttctacagaagcatttttaacaaatttatcaattcagtcaaaacaagaggaaactgtggagagtaaagagaaaacattaaaaagacagcttcaggaagatcaagagaataatttgcaagataaccagacttcaaatagttctccatgcagatctaatgtaggaaaaggaaacatagatggtaatgtgagctgtagtgaaaaccttgttgctaatacagcgaggtctccacagtttatcaacctgaaaagggatcctaggcaagcagcaggacgaagtcagcctgtaactacttcagaaagcaaagatggagatagttgccggaatggagaaaaacacatgctgcctggcctgtcacacaacaaggagcacttaacagaacaaatcaatgtagaggaaaagttgtgttctgcagagaaaaactcgtgtgttcagcagagtgacaatttaaaagttgcacaaaactcaccatcagtagaaaacatacagacttctcaagcagaacaagcaaaacccttacaggaggatattttaatgcaaaatattgaaactgtgcacccatttcgaagaggatcagcagtagcgacatctcattttgaagttggaaacacatgtccatcagaatttccttctaaaagcatcacctttacttccagaagcaccagccccagaacaagtacaaacttttcacccatgaggccacagcagcccaaccttcagcatctcaagtctagcccacctggatttccatttccagggcctcctaattttcccccacaaagcatgtttggatttccaccacatttgccacctccattacttccccctccaggctttggctttgctcaaaatcccatggttccctggccacctgttgttcatctcccaggtcagccacagcgtatgatgggtcctctctcacaagcatcaaggtatataggcccgcagaatttttaccaggttaaagacattcggaggccagaaaggcgccatagtgacccttggggtaggcaagaccaacagcaactggataggccatttaataggggtaaaggggaccgccagagattttatagtgattcacaccatttgaaaagagagcgacatgaaaaggaatgggagcaagaatctgaaaggcatagacgcagagacagaagccaagacaaggacagagacagaaaaagcagggaggaagggcacaaagataaagagagggcacggttatcacatggtgatcgaggaacagatggaaaagcaagcagagatagtaggaatgtagacaagaagccagataaacctaaaagtgaagactatgagaaggacaaagaacgagagaaaagtaaacacagagaaggagaaaaggacagggataggtaccacaaagatagggaccacactgacagaactaaaagcaaaaggtaaaatttgcaggctgcttcaggattacatttaaataactgttaaaatgttgtatcttgtaaacaaaagaaagattgcctgctaggattgtgccatctttaaaatttttactattggtcatttgcagaacagtaaattctgtgtgttggtacagagtgctctgtaccagtgctcatcatcccttcttcataccaacggtccctagttataggaatttaatatttttaaaagttttacattgctgtatattcaaagatttgttttattaatatgcaataaaggcttagaaattttagttttattccttaattggtaaatatggttaactatggaatatatttacttcctctagtgaatgtcctttatataatgactaatttgggagtaatgtgtgctctgtaagtttgttttaaattgcactgtttttaaagaaactgtagaggagcaacaaaaatccaagcaacttcataatcagattatgctaatcatttagttgagcagtttttgaccaagaatcagaagcccaaggggtacatttattgctttaatctgcactcattgaagtcatttattaccatatactacagctttgtggtaggccattattttcattttcatttttggctcttcagaaacttgaatacttaagcttgtacatgatcttgtgttttgctatcctttttactgtaaaatgtaaatattttaagggatattttgattctaaatatgataaaataatttctcacctattttgtgtgtgtgacttgaaattcagtagtaaaagaatttcttctttaaagcttt

SEQ ID NO: 330147 - DNA, 8233 bp, Artificial Sequence
  derived and/or modified sequence
ccgcgccgccgccgcacgccgatggctgcggggtctcgcgccgtcgcaccgtccccacgcggcaagcgaccttcgggctcagggcggcggcggctgcaacgaggattaggagggcggcgcggaagccaagaatagtgtcgtcagcagcagccatttggtcccaggaggaaaagaggctgtggcagcgacgccgacgtcctgcgcgtaccccctctccgcggcacccaccgggccccctcctcctcctcttcggcggcggcagcgtccaccatcttcctcttgctgccagtggtagcgctcgtctggcggagctggggctgaaagacacacagaagtcttcatggatatagttgatacatttaatcatttaattcctactgaacacttagatgatgccctatttctaggatccaacctggagaatgaagtctgtgaggattttagtgcaagtcaaaatgtcttagaggactcgctgaagaacatgctcagcgataaggatcctatgctaggatctgcaagtaaccagttctgtttgcctgttttggatagcaatgatcccaatttccagatgccttgttcaacagttgttggtcttgacgatattatggatgaaggagttgttaaagaaagtggcaatgataccattgatgaagaagaactgattttacctaacaggaacttaagggacaaggtagaagaaaattcagtgagatctccaagaaaatcacctcgtttaatggcacaagaacaagtaagaagtttgcgacagagcactattgccaagcgttcaaatgcagcaccattaagtaacacaaaaaaagcatctgggaagactgtatctactgctaaagcaggagtgaaacaaccagaaaggagtcaggttaaagaagaagtatgtatgtcactgaaacctgagtaccataaggagaatagaaggtgcagccgaaatagcggacaaattgaagtggtacctgaagtatcagtgtcttcaagtcattcttcagtgtcatcttgtcttgaaatgaaggatgaagatggattagattctaagcataagtgtaataatccgggagaaatagatgtgccatctcatgaattaaattgttcacttctttcagagacttgtgttactattggagaaaagaaaaatgaagctttgatggaatgtaaagccaagcctgttggtagtccattgtttaagttttcagataaagaagaacatgaacaaaatgattccatttcaggtaaaacgggtgagactgttgttgaagaaatgatagcaacaagaaaagttgaacaagattcaaaggagacagtaaaattatcccatgaagatgaccatattcttgaggacgctggatcttctgatatttctagtgatgctgcttgtacaaatccaaataagacagaaaacagccttgtaggtttgcctagttgtgtagatgaagtgactgaatgtaatttggaattgaaggataccatgggtattgctgataaaactgagaacacccttgaaagaaataaaattgaaccgttgggttattgtgaagatgcggagtctaataggcagttggagagcactgagtttaataaatcaaacttagaggtggttgatactagtacttttggaccggaaagtaatatcttggaaaatgctatttgtgatgtgcctgaccaaaattcaaaacagttgaatgctatagaaagtactaaaatagagtcccatgaaacagcaaaccttcaggatgacagaaacagccagtcaagtagcgtttcttacttagagtcaaaaagtgtaaaatccaaacatacaaaacctgtaattcattctaagcaaaacatgaccacagatgctccgaagaaaattgttgcagcaaagtatgaagtaatacatagcaaaactaaagttaatgtcaaaagtgtgaaacgaaatactgatgtaccagaatctcagcaaaattttcataggccagtcaaagtcagaaaaaaacaaattgataaggagccaaagattcagagttgcaattctggggttaaatctgtgaaaaaccaagctcattctgtactgaaaaaaacattacaggatcaaactttagtacaaattttcaagcccttaactcattctttgagtgataagtcacacgctcatcctggttgcttgaaagaacctcatcatcctgcacaaactggacatgtatcacattctagccagaaacagtgtcataagcctcagcaacaggccccagcaatgaaaaccaatagtcacgtgaaggaagagcttgaacacccaggcgttgagcattttaaggaagaggataaactgaaactgaaaaaacctgagaagaacctacaaccccgccaaagaagaagcagcaaaagtttttctttagatgagccaccattgttcattccagataacatagctaccataagaagagaaggctctgatcatagctcctcatttgaaagcaaatatatgtggactcccagcaagcagtgtgggttttgcaaaaaaccacatggcaacaggtttatggttggctgtgggagatgtgatgactggtttcatggtgattgtgttgggttaagtctttctcaagcacagcagatgggcgaggaagacaaagaatatgtctgtgtaaaatgttgtgctgaagaagacaaaaagactgaaatactagatccagatactttggaaaaccaagctacagttgaattccatagtggagataaaacaatggagtgtgaaaagcttggattatcaaaacacacaacaaatgatagaaccaaatatatagatgatacagtgaagcacaaggtcaaaattttaaaacgggagtctggtgaaggcagaaattcatcagactgtagagataatgaaattaaaaaatggcagctagctcctcttcgtaagatgggacaaccagttttacctcggagatcctcagaagaaaaaagtgaaaaaataccgaaagagtctacaactgttacttgcacaggagaaaaagcttcaaaaccaggtactcatgagaagcaagagatgaaaaagaagaaagttgaaaaaggagtgcttaatgtacatcctgctgcttctgcttccaagccttctgcagatcagatcaggcaaagtgtcagacattctctcaaagacattcttatgaagagacttacagactcaaatttgaaggtaccagaggaaaaggcagcaaaagttgccacaaaaattgagaaagagcttttctctttttttcgggacacagatgctaaatataagaacaaatatagaagtttgatgtttaatttgaaagatcctaaaaacaatatattatttaaaaaagtactgaaaggagaagtaactcctgatcatcttatcagaatgagtccagaagaactagcttctaaagagttagctgcttggagacgaagagaaaacagacataccatagaaatgattgagaaagagcagagagaagtggaacgacggccaatcaccaaaataactcataaaggtgaaatagaaattgagagtgatgccccaatgaaagaacaggaagcagccatggagattcaggaaccagccgccaataagtcattggagaagccagaaggatctgaaaaacaaaaagaggaggttgactctatgtctaaagataccactagtcaacacagacagcatctttttgatctcaactgcaaaatctgcataggtcgaatggcaccacctgtagatgatctttctccaaaaaaagtaaaagttgttgtaggagtagctcgcaaacattcagacaatgaagcagaaagtatagcagatgcattatcttcaacctcaaatattttggcttctgaattctttgaggaggagaaacaggagtctccaaagtcaacgttctctcctgctccacgtccagagatgcctggaactgttgaagttgagtctacctttctggctcgattgaacttcatctggaaaggttttatcaacatgccttctgtggcaaaatttgttaccaaagcctatccagtatctggctccccagaatacctgacagaggacctaccagatagtattcaagtaggtggcaggatatcacctcagacagtttgggattatgtggaaaaaataaaagcatcaggaaccaaggaaatttgtgtggttcgcttcacaccagtaactgaagaagatcaaatttcttatactttgctctttgcatacttcagtagcagaaagcgctatggagtagctgctaacaacatgaagcaggttaaagatatgtaccttattcctttgggtgccacagataaaattccacaccctcttgtgccttttgatggacctgggcttgaactgcatagacctaatctattgttgggcttaattattcgtcagaaactgaagcgacagcacagtgcctgtgctagtactagtcatatagctgagactcctgaaagtgcaccaccaatagcattgccacctgataaaaaaagtaaaatagaagtttctacagaagaagcaccagaggaagaaaatgacttttttaattcttttacaactgtattacacaagcagagaaataaacctcagcagaatcttcaggaagaccttccaacagcagttgaacctttaatggaagtcaccaaacaggagccaccaaaacctttaagatttcttcctggcgtgttgattggctgggagaatcaacctactactctggaattagcaaataaacctcttcctgtggatgatatacttcaaagccttttgggcaccactggtcaagtatatgaccaggcccagtcagtgatggaacaaaacactgttaaagaaattccatttttaaatgagcagaccaactcaaaaatagagaaaacagataatgtggaagtaactgatggtgaaaacaaggagataaaagttaaagtagataatatttcagaatctacagataagtcagcagaaatagaaacatcagtagtagggtcctcttccatttctgcagggtctttgacgagtcttagtctcagaggtaagccaccagatgtttctacagaagcatttttaacaaatttatcaattcagtcaaaacaagaggaaactgtggagagtaaagagaaaacattaaaaagacagcttcaggaagatcaagagaataatttgcaagataaccagacttcaaatagttctccatgcagatctaatgtaggaaaaggaaacatagatggtaatgtgagctgtagtgaaaaccttgttgctaatacagcgaggtctccacagtttatcaacctgaaaagggatcctaggcaagcagcaggacgaagtcagcctgtaactacttcagaaagcaaagatggagatagttgccggaatggagaaaaacacatgctgcctggcctgtcacacaacaaggagcacttaacagaacaaatcaatgtagaggaaaagttgtgttctgcagagaaaaactcgtgtgttcagcagagtgacaatttaaaagttgcacaaaactcaccatcagtagaaaacatacagacttctcaagcagaacaagcaaaacccttacaggaggatattttaatgcaaaatattgaaactgtgcacccatttcgaagaggatcagcagtagcgacatctcattttgaagttggaaacacatgtccatcagaatttccttctaaaagcatcacctttacttccagaagcaccagccccagaacaagtacaaacttttcacccatgaggccacagcagcccaaccttcagcatctcaagtctagcccacctggatttccatttccagggcctcctaattttcccccacaaagcatgtttggatttccaccacatttgccacctccattacttccccctccaggctttggctttgctcaaaatcccatggttccctggccacctgttgttcatctcccaggtcagccacagcgtatgatgggtcctctctcacaagcatcaaggtatataggcccgcagaatttttaccaggttaaagacattcggaggccagaaaggcgccatagtgacccttggggtaggcaagaccaacagcaactggataggccatttaataggggtaaaggggaccgccagagattttatagtgattcacaccatttgaaaagagagcgacatgaaaaggaatgggagcaagaatctgaaaggcatagacgcagagacagaagccaagacaaggacagagacagaaaaagcagggaggaagggcacaaagataaagagagggcacggttatcacatggtgatcgaggaacagatggaaaagcaagcagagatagtaggaatgtagacaagaagccagataaacctaaaagtgaagactatgagaaggacaaagaacgagagaaaagtaaacacagagaaggagaaaaggacagggataggtaccacaaagatagggaccacactgacagaactaaaagcaaaaggtaaaatttgcaggctgcttcaggattacatttaaataactgttaaaatgttgtatcttgtaaacaaaagaaagattgcctgctaggattgtgccatctttaaaatttttactattggtcatttgcagaacagtaaattctgtgtgttggtacagagtgctctgtaccagtgctcatcatcccttcttcataccaacggtccctagttataggaatttaatatttttaaaagttttacattgctgtatattcaaagatttgttttattaatatgcaataaaggcttagaaattttagttttattccttaattggtaaatatggttaactatggaatatatttacttcctctagtgaatgtcctttatataatgactaatttgggagtaatgtgtgctctgtaagtttgttttaaattgcactgtttttaaagaaactgtagaggagcaacaaaaatccaagcaacttcataatcagattatgctaatcatttagttgagcagtttttgaccaagaatcagaagcccaaggggtacatttattgctttaatctgcactcattgaagtcatttattaccatatactacagctttgtggtaggccattattttcattttcatttttggctcttcagaaacttgaatacttaagcttgtacatgatcttgtgttttgctatcctttttactgtaaaatgtaaatattttaagggatattttgattctaaatatgataaaataatttctcacctattttgtgtgtgtgacttgaaattcagtagtaaaagaatttcttctttaaagctttaattaccttcagacattgattttttgttactcagccaagaacatatagaaatagctatctatgtcaggcattagatgaggggaaaaacaatttttttaaaatcttaaattgtaggctgagatgaattgtgtagttctaaagaggctagaatttagaactacctgtgaaacactgtgcagctatagcccactttataggtaagtttctgaaaacttttacaccatcgcaatttggtactctgactcactaatcattaaaattaaagaccgcagaacttgaagagaaatatgttttgaatccttttataaaatgtgcgatttagcctaattcgtaaagtaactgtacagtttcatatgccagttttacttgaaaaaaaaatatgaaaactattgttaattcaaatctaaatttatttaaaccctaaaacacatggttttgatggctgtaatttaaagtaagagctatcaaatgatgctgacaaaagaaaaaccttccaaaatacaaaagaaagagaactctattatttacttacctgtattaatgaagaaaaatataaataattccacaaaattgattgttttcctaaagagcttaaagattagagttaaaaattggttttgaaacagaattatccttgttatttttgctggagagaagggaggaaattcagaaccaaacattctatttaatttgcaatgacttgcagtacttttttccctatccttatcctgtgaaacttactatcataaggttctaaaacagagaacttgtgtttaaataaagcccgtttaactttggtccacttttcttttggaaattaacttgttagaaaacaaagttagttcccaaacaaaacaaaatctaagttataatttgcaccattacaaagaaattgctgtcagggttttacacattttaaaaacatttcaatttcaaatgtgtatatcgtcaataaatctacctttactgata

SEQ ID NO: 330148 - DNA, 2461 bp, Artificial Sequence
  derived and/or modified sequence
ggaaagttgtgacggtcgagcttgagcctggcgggccgcggagcgttcacctgcggccgggaggcaaagtactagctctgtgattagattgaattctccaacaacaacatctcagattatggcaagaaagaaaaggagagggattatagagaaaaggcgtcgggatcggataaataacagtttatctgagttgagaagacttgtgccaactgcttttgaaaaacaaggatctgcaaagttagaaaaagctgaaatattgcaaatgacagtggatcatttgaagatgcttcaggcaacagggggtaaaggctactttgacgcacacgctcttgccatggacttcatgagcataggattccgagagtgcctaacagaagttgcgcggtacctgagctccgtggaaggcctggactcctcggatccgctgcgggtgcggcttgtgtctcatctcagcacttgcgccacccagcgggaggcggcggccatgacatcctccatggcccaccaccatcatccgctccacccgcatcactgggccgccgccttccaccacctgcccgcagccctgctccagcccaacggcctccatgcctcagagtcaaccccttgtcgcctctccacaacttcagaagtgcctcctgcccacggctctgctctcctcacggccacgtttgcccatgcggattcagccctccgaatgccatccacgggcagcgtcgccccctgcgtgccacctctctccacctctctcttgtccctctctgccaccgtccacgccgcagccgcagcagccaccgcggctgcacacagcttccctctgtccttcgcgggggcattccccatgcttcccccaaacgcagcagcagcagtggccgcggccacagccatcagcccgcccttgtcagtatcagccacgtccagtcctcagcagaccagcagtggaacaaacaataaaccttaccgaccctgggggacagaagttggagctttttaaatttttcttgaacttcttgcaatagtaactgaatgtcctccatttcagagtcagcttaaaacctctgcaccctgaaggtagccatacagatgccgacagatccacaaaggaacaataaagctatttgagacacaaacctcacgagtggaaatgtggtattctcttttttttctctcccttttttgtttggttcaaggcagctcggtaactgacatcagcaacttttgaaaacttcacacttgttaccatttagaagtttcctggaaaatatatggaccgtaccatccagcagtgcatcagtatgtctgaattggggaagtaaaatgccctgactgaattctcttgagactagatgggacatacatatatagagagagagtgagagagtcgtgtttcgtaagtgcctgagcttaggaagttttcttctggatatataacattgcacaagggaagacgagtgtggaggataggttaagaaaggaaagggacagaagtcttgcaataggctgcagacattttaataccatgccagagaagagtattctgctgaaaccaacaggttttactggtcaaaatgactgctgaaaataattttcaagttgaaagatctagttttatcttagtttgccttctttgtacagacatgccaagaggtgacatttagcagtgcattggtataagcaattatttcatcagttctcagattaacaagcatttctgctctgcctgcaggcccccaggcacttttttttttggatggctcaaaatatggtgctgctttatataaaccttacatttatatagtgcacctatgagcagttgcctaccatgtgtccaccagaggctatttaattcatgccaacttgaaaactctccagtttgtaggagtttggtttaatttattcagtttcattaggactatttttatatatttatcctcttcattttctcctaatgatgcaacatctattcttgtcaccctttgggagaagttacatttctggaggtgatgaagcaaggagggagcactaggaagagaaaagctacaatttttaaagctctttgtcaagttagtgattgcatttgatcccaaaacaagatgaatgtatgcaatgggatgtacataagttatttttgcccatgcctaaactagtgctatgtaatggggttgtggttttgtttttttcgatttcgtttaatgacaaaataatctcttaatatgctgaaatcaagcacgtgagagtttttgtttaaaagataagagacacagcatgtattatgcacttcatttctctactgtgtggagaaagcaataaacattatgagaatgttaaacgttatgcaaaattatacttttaaatatttgttttgaaattactgtacctagtcttttttgcattactttgtaacctttttctatgcaagagtctttacataccactaattaaatgaagtcctttttgacta

SEQ ID NO: 330149 - DNA, 876 bp, Artificial Sequence
  derived and/or modified sequence
atggcacggaaaaaacggagagggattattgaaaagcgtagaagagatcgcatcaataactccctgagcgaactacgacgattggtgccaactgcattcgagaagcaaggctcagcgaagctggaaaaggccgagattctccagatgactgtggatcacctgaaaatgctgcaggcgactggtggcaagggctattttgatgcacatgctttagcaatggactttatgtccatcggctttagggagtgtctgacagaagtcgccagatatttatcgtcggtggaggggctggacagctccgaccccctgcgcgttcggttagtgtctcatctgagtacttgtgctactcaacgagaagctgcagcaatgaccagtagcatggcccatcaccaccatccgttgcacccacaccattgggccgccgcctttcatcacctgccagctgcccttctgcagccaaatgggctacatgcgagcgagagcacaccctgtcgattgtccaccacttcggaggtacctcccgcacatgggtccgcactactcacagcaacgtttgcccacgccgacagcgcactgcgtatgccctccacagggtctgtcgctccatgcgtgcctcctttgtcaacctctctgctttccctcagcgctaccgtgcacgctgcagctgctgccgctacagccgctgcacactcctttcccttgtcattcgcaggcgcatttcccatgcttccacctaatgccgccgctgccgtggcagcagcaaccgcaatttcgccacccctatccgtcagtgcaacgagcagccctcaacagacatcgtctggcacaaacaataagccctatcggccgtgggggacagaggtgggtgcattctag

SEQ ID NO: 330150 - DNA, 876 bp, Artificial Sequence
  derived and/or modified sequence
atggccaggaagaagaggcggggcatcatcgagaagagaagaagagaccgcatcaacaacagcctgtctgagctgcggcggctggtgcccacagcctttgagaagcagggcagcgccaagctggagaaggccgagatcctgcagatgacagtggaccacctgaagatgctgcaggccaccggcggcaagggctactttgatgcccacgccctggccatggacttcatgagcatcggcttccgggagtgcctgacagaggtggcccgctacctgagctctgtggagggcctggacagcagtgaccccctgcgggtgcggctggtgagccacctgagcacctgtgccacccagcgggaggccgccgccatgaccagctccatggcccaccaccaccaccccctgcacccccaccactgggccgccgccttccaccacctgcctgctgccctgctgcagcccaacggcctgcacgccagcgagagcaccccctgccgcctgagcaccaccagcgaggtgcccccagcccacggcagcgccctgctgacagccacctttgcccacgccgacagcgccctgaggatgcccagcactggatctgtggccccctgtgtgccccccctgagcaccagcctgctgagcctgagcgccaccgtgcacgccgctgctgctgctgccacagctgctgcccacagcttccccctgagctttgctggggccttccccatgctgcccccaaatgctgctgctgctgtggccgccgccacagccatcagcccccccctgtctgtgtctgccaccagcagcccccagcagaccagcagcggcaccaacaacaagccctaccggccctggggcacagaggtgggcgccttctag

SEQ ID NO: 330151 - DNA, 876 bp, Artificial Sequence
  derived and/or modified sequence
atggcccggaagaagcggcggggcatcatcgagaagcggcggcgggaccggatcaacaattccctctctgagctccggcggctcgttcctacggctttcgaaaaacagggtagtgctaagttagaaaaggcggagatcctgcagatgacggtcgaccatcttaaaatgttgcaggccacagggggcaagggctactttgatgctcatgcactggcaatggattttatgagcatcggctttagggagtgcctcactgaggtcgcaagatatctatcttcagtggaagggttggatagctcagatccacttagggtgaggctcgtgtctcacctttcaacatgcgcaacacagcgcgaggcagcggcgatgactagctccatggctcaccatcatcatcccttgcatccgcaccactgggccgctgctttccatcacttaccagcagctttgctccagcctaacggcctgcacgcatcggaaagtaccccttgccggctgagcactactagtgaagtgcccccagctcacggaagcgccttgctcaccgccacctttgcccacgccgactccgcgctacggatgcccagcaccggatctgtcgcgccttgcgtcccaccgctttcaacatctctgctgagcctgtcagccacagttcacgcggccgccgctgctgcaaccgctgctgctcactcctttccattaagctttgctggggctttccccatgctccctccaaatgctgccgcagccgttgcagccgctacagcgatctcaccccccctgtctgtgtctgctacttcctcacctcagcagacttctagtggtacaaataacaagccatatcgtccgtgggggacggaagtgggggccttctag

SEQ ID NO: 330152 - DNA, 876 bp, Artificial Sequence
  derived and/or modified sequence
atggcacggaagaagcgacgcggaattatcgagaagaggcgcagggataggatcaataacagtctgagtgaactgcgccgactggtccccacagcgttcgagaagcaagggagcgctaaattagaaaaagccgaaattctgcagatgaccgtggaccacttaaagatgctccaagccacggggggtaaagggtacttcgacgctcacgctttggccatggacttcatgtctatcggctttcgggagtgtctgactgaggtggcaagatacctgagctcagtggaaggtctcgactcctccgatcctttgcgggtcaggctcgtctcccatctgtccacgtgcgctacgcaaagggaagcggctgccatgacctccagcatggcacaccaccaccacccgttacatccccaccattgggctgctgctttccaccacctgccagcagcgcttctgcagcccaatggcttacacgctagcgagtctaccccttgccgtctgagcaccacttcggaagtgcccccagcgcacggttccgccttgctaaccgccacatttgcacacgcggacagcgcattacgcatgccatccaccggatccgttgcgccttgcgtgccgcctcttagtacctctcttctttcactcagtgccaccgttcatgcagccgcagcagcagccaccgccgcagcacactcctttcctctttcctttgccggtgcattccctatgctgcctcctaacgctgccgctgcagttgccgcagccaccgctatttcccctccattgtctgttagtgccaccagcagcccacagcagacaagctctgggaccaacaacaaaccatatcgaccctggggcactgaagtaggtgccttttag

SEQ ID NO: 330153 - DNA, 876 bp, Artificial Sequence
  derived and/or modified sequence
atggccagaaagaagagaagaggcatcatcgagaagagaagaagagacagaatcaacaacagcctgagcgagctgagaagactggtgcccaccgccttcgagaagcagggcagcgccaagctggagaaggccgagatcctgcagatgaccgtggaccacctgaagatgctgcaggccaccggcggcaagggctacttcgacgcccacgccctggccatggacttcatgagcatcggcttcagagagtgcctgaccgaggtggccagatacctgagcagcgtggagggcctggacagcagcgaccccctgagagtgagactggtgagccacctgagcacctgcgccacccagagagaggccgccgccatgaccagcagcatggcccaccaccaccaccccctgcacccccaccactgggccgccgccttccaccacctgcccgccgccctgctgcagcccaacggcctgcacgccagcgagagcaccccctgcagactgagcaccaccagcgaggtgccccccgcccacggcagcgccctgctgaccgccaccttcgcccacgccgacagcgccctgagaatgcccagcaccggcagcgtggccccctgcgtgccccccctgagcaccagcctgctgagcctgagcgccaccgtgcacgccgccgccgccgccgccaccgccgccgcccacagcttccccctgagcttcgccggcgccttccccatgctgccccccaacgccgccgccgccgtggccgccgccaccgccatcagcccccccctgagcgtgagcgccaccagcagcccccagcagaccagcagcggcaccaacaacaagccctacagaccctggggcaccgaggtgggcgccttctag

SEQ ID NO: 330154 - DNA, 1335 bp, Artificial Sequence
  derived and/or modified sequence
atgaagtctgagaacgagaggcttcaagaggagcttaacaaaaacttgtttgataacctgatagagtttctgcaaaaatcacacagtggcttccagaagaactcccgcgaccttggaggccagatcaagctgagggagattcctactgcagcacttgtgctgggcgtgaacgtaactgatcatgacctgacctttggatcactgacagaagcgttacagaataatgttaccccctacgttgtctcacttcaggccaaggactgtccggatatgaaacatttcttacagaaactgatcagccagcttatggactgctgtgtcgatattaaatccaaagaggaagaatccgtgcatgtgacacagagaaaaactcactacagcatggattccctgagctcttggtacatgactgtgacacagaagaccgacccaaagatgctctcaaaaaagaggactacatcttcccagtggcagtccccacccgtggttgtgatcctcaaggacatggagtcatttgccaccaaggttctgcaggactttataattatctcaagccagcatctgcatgagtttccgctcatcctaatctttggaattgctacatcgcctatcattatccaccgtctactgccccacgctgtttccagcctcctgtgcattgagctgtttcagtccctaagctgcaaggagcatttgacaactgtgctagacaagttactccttactacccaattccccttcaaaattaacgagaaagtcctacaggtcctaacgaacatctttctttatcacgatttctctgttcagaacttcattaagggcctgcaactctctctactagagcatttttattcacagccactgagcgtgttgtgctgtaacctgccagaggccaagcgcaggatcaactttctcagcaacaatcagtgcgagaatatacgaagactccctagcttcaggagatacgtggagaaacaggccagcgagaaacaggttgcactgctgacaaacgaacgctatctaaaggaggaaactcaactgctcctcgagaaccttcacgtctaccatatgaattacttcctggtgttgcggtgcctgcataaattcacctcttccctgcccaaataccccctcggtaggcaaattcgagagttgtattgcacatgtctggaaaaaaatatatgggacagcgaggaatatgcatctgtgctccagctactgaggctcgggcttgcctttttggacatccagctgttcggtgctcagtctgggcaagaactactgctgcccctatcctgggaggccaacccttctcacgccgctaatctgggatag

SEQ ID NO: 330155 - DNA, 1335 bp, Artificial Sequence
  derived and/or modified sequence
atgaagtcagaaaatgaaaggctgcaggaggagctgaacaagaacctgtttgacaacctgattgagttcctgcagaagagccacagcggcttccagaagaacagccgggacctgggcggccagatcaagctgcgggagatccccacagctgccctggtgctgggcgtgaatgtgacagaccatgacctgaccttcggcagcctgacagaggccctgcagaacaacgtgaccccctacgtggtgtccctgcaggccaaggactgcccagacatgaagcacttcctgcagaagctgatcagccagctgatggactgctgcgtggacatcaagagcaaggaggaggagagcgtgcacgtgacccagaggaagacccactacagcatggacagcctgagctcctggtacatgacagtgacccagaagacagaccccaagatgctgagcaagaagaggaccaccagcagccagtggcagagcccccctgtggtggtgatcctgaaggacatggagagctttgccaccaaggtgctgcaggacttcatcatcatcagcagccagcacctgcacgagttccccctcatcctgatctttggaattgccaccagccccatcatcatccaccggctgctgccccatgctgtgagcagcctgctgtgcatcgagctgttccagagcctgagctgcaaggagcacctgaccaccgtgctggacaagctgctgctgaccacccagttccccttcaagatcaatgagaaggtgctgcaggtgctgaccaacatcttcctgtaccatgacttctctgtgcagaacttcatcaagggcctgcagctgagcctgctggagcacttctacagccagcccctgtctgtgctgtgctgcaacctgcctgaggccaagaggcgcatcaacttcctgagcaacaaccagtgtgagaacatccggcggctgcccagcttccgccgctacgtggagaagcaggccagcgagaagcaggtggccctgctgaccaatgaaagatacctgaaggaggagacccagctgctgctggagaacctgcacgtgtaccacatgaactacttcctggtgctgcgctgcctgcacaagttcaccagcagcctgcccaagtaccccctgggccggcagatccgggagctgtactgcacctgcctggagaagaacatctgggacagcgaggagtatgcctctgtgctgcagctgctgcggctgggcctggccttcctggacatccagctgtttggagcccagagcggccaggagctgctgctgcccctgtcctgggaggccaaccccagccacgccgccaacctgggctag

SEQ ID NO: 330156 - DNA, 1335 bp, Artificial Sequence
  derived and/or modified sequence
atgaagagcgagaacgagcggctgcaggaggagctgaacaagaacctgttcgataatctgattgagttcctgcagaaatcccattccggttttcagaagaactcacgagatcttggcggccagatcaagctgcgggaaattccaacagccgccctggtactgggcgtgaacgtgactgatcatgacctgaccttcggcagtctcaccgaagccttgcagaacaatgttaccccttacgtggtctcactccaagccaaggattgtccagacatgaaacacttcctccaaaaactgatttcccagttgatggattgttgtgtggatatcaaaagcaaggaggaagaatcggtgcatgtaacacaacgcaaaactcactattccatggattcactgtctagctggtacatgacagtgacacagaaaacagaccccaagatgctttcaaaaaagcgaacaacaagttcccagtggcagagccctcctgttgtggttatccttaaagatatggagtcgtttgcaaccaaagtgctgcaggacttcataatcatatcctcgcaacacttacatgagttcccactcattcttatctttggcatcgctacgagcccaattattatccatcggctcctgccacatgcagtgtcatcactcttgtgtatcgagctcttccaatcactgtcgtgcaaggagcacctgaccactgtcctcgataagctcctactgaccacccaatttccatttaagattaacgagaaggtgctacaagtactgacaaatattttcctctaccatgacttttctgttcaaaacttcatcaaggggctgcagcttagccttctggagcatttttactcccagccactgtcggtcttgtgctgcaacttgcccgaggccaagcggagaatcaacttcttgagtaataaccaatgcgaaaacataagaagattgccgtccttccgccgttatgtcgaaaagcaggcaagcgaaaaacaggtggccttacttacgaacgagcgctacctcaaggaggagacccagcttttacttgaaaatctccatgtgtaccatatgaactacttcctggtccttcggtgcctgcacaaattcacctccagtttgccgaagtacccgctaggtaggcagattcgagagttgtattgcacctgcctagaaaagaatatctgggattccgaggaatacgcatccgtgcttcagttattgagacttggattagcctttttggacattcaactcttcggagcccaatctgggcaggagctcctccttcctctgtcctgggaagccaacccctctcacgccgccaatctgggatag

SEQ ID NO: 330157 - DNA, 1335 bp, Artificial Sequence
  derived and/or modified sequence
atgaagtcggagaacgagcgcctgcaggaggaactcaacaaaaacctgttcgacaaccttattgagtttcttcagaaatctcactcaggtttccagaagaacagtcgcgatctgggaggacagatcaaacttagagagatccctactgccgctctagtgctgggagtcaatgtcactgaccacgatcttacctttggcagcctgactgaggctctgcagaataatgtaactccctacgtagtgagcctgcaggcgaaagattgtcccgacatgaaacacttcttgcagaaattgattagccagttaatggactgctgcgtcgacatcaaatcaaaagaagaagaatccgtgcatgtgacccagcggaaaacccactattcaatggatagcttatcatcctggtacatgactgttactcagaaaaccgacccaaagatgctcagcaaaaaaaggaccacttcctctcagtggcagagtcctccagtggtggtcatcctgaaggatatggaatcgtttgcgacaaaggtcctgcaggacttcattattatcagcagccaacacttgcacgaatttcctctcatcctcatcttcggaatagcaaccagccctataatcattcaccgactgcttccgcacgcagtgtcgtcactgctgtgcatcgaactgttccaaagcctgagttgtaaggaacatttgactactgtgctcgacaagctgctcctcacgacacagtttccttttaagattaacgaaaaagtgcttcaggtgttaacgaacatcttcctgtaccacgacttttctgtccagaacttcatcaaaggactgcagctgtccttgcttgaacatttttattcccaaccactttctgtactgtgctgtaatctgccagaagccaaacggcgaatcaacttcctcagcaacaatcagtgcgagaatatccgtaggttaccctccttccggaggtatgtggagaagcaggcatcagagaagcaagtcgccctgctgacgaacgagcgttacctgaaggaggagactcagctcttattggaaaacttgcatgtatatcatatgaattactttctggtattgaggtgcttgcataagtttaccagttcactgccaaagtacccactgggaagacagattagggagctgtactgcacctgtctcgaaaaaaacatctgggatagcgaagagtatgctagtgtcttgcagttgctgcgtttagggctggcttttctggatatccagctgttcggcgctcagtctggacaggagttattgctgccgctgtcttgggaggctaatccatcccatgccgctaacttgggctag

SEQ ID NO: 330158 - DNA, 1335 bp, Artificial Sequence
  derived and/or modified sequence
atgaagagcgagaacgagagactgcaggaggagctgaacaagaacctgttcgacaacctgatcgagttcctgcagaagagccacagcggcttccagaagaacagcagagacctgggcggccagatcaagctgagagagatccccaccgccgccctggtgctgggcgtgaacgtgaccgaccacgacctgaccttcggcagcctgaccgaggccctgcagaacaacgtgaccccctacgtggtgagcctgcaggccaaggactgccccgacatgaagcacttcctgcagaagctgatcagccagctgatggactgctgcgtggacatcaagagcaaggaggaggagagcgtgcacgtgacccagagaaagacccactacagcatggacagcctgagcagctggtacatgaccgtgacccagaagaccgaccccaagatgctgagcaagaagagaaccaccagcagccagtggcagagcccccccgtggtggtgatcctgaaggacatggagagcttcgccaccaaggtgctgcaggacttcatcatcatcagcagccagcacctgcacgagttccccctgatcctgatcttcggcatcgccaccagccccatcatcatccacagactgctgccccacgccgtgagcagcctgctgtgcatcgagctgttccagagcctgagctgcaaggagcacctgaccaccgtgctggacaagctgctgctgaccacccagttccccttcaagatcaacgagaaggtgctgcaggtgctgaccaacatcttcctgtaccacgacttcagcgtgcagaacttcatcaagggcctgcagctgagcctgctggagcacttctacagccagcccctgagcgtgctgtgctgcaacctgcccgaggccaagagaagaatcaacttcctgagcaacaaccagtgcgagaacatcagaagactgcccagcttcagaagatacgtggagaagcaggccagcgagaagcaggtggccctgctgaccaacgagagatacctgaaggaggagacccagctgctgctggagaacctgcacgtgtaccacatgaactacttcctggtgctgagatgcctgcacaagttcaccagcagcctgcccaagtaccccctgggcagacagatcagagagctgtactgcacctgcctggagaagaacatctgggacagcgaggagtacgccagcgtgctgcagctgctgagactgggcctggccttcctggacatccagctgttcggcgcccagagcggccaggagctgctgctgcccctgagctgggaggccaaccccagccacgccgccaacctgggctag

SEQ ID NO: 330159 - protein, 505 aa, Artificial Sequence
  derived and/or modified sequence
MSNICQRLWEYLEPYLPCLSTEADKSTVIENPGALCSPQSQRHGHYFVALFDYQARTAEDLSFRAGDKLQVLDTLHEGWWFARHLEKRRDGSSQQLQGYIPSNYVAEDRSLQAEPWFFGAIGRSDAEKQLLYSENKTGSFLIRESESQKGEFSLSVLDGAVVKHYRIKRLDEGGFFLTRRRIFSTLNEFVSHYTKTSDGLCVKLGKPCLKIQVPAPFDLSYKTVDQWEIDRNSIQLLKRLGSGQFGEVWEGLWNNTTPVAVKTLKPGSMDPNDFLREAQIMKNLRHPKLIQLYAVCTLEDPIYIITELMRHGSLQEYLQNDTGSKIHLTQQVDMAAQVASGMAYLESRNYIHRDLAARNVLVGEHNIYKVADFGLARVFKVDNEDIYESRHEIKLPVKWTAPEAIRSNKFSIKSDVWSFGILLYEIITYGKMPYSGMTGAQVIQMLAQNYRLPQPSNCPQQFYNIMLECWNAEPKERPTFETLRWKLEDYFETDSSYSDANNFIR

SEQ ID NO: 330160 - DNA, 1518 bp, Artificial Sequence
  derived and/or modified sequence
atgagcaacatctgccagagactgtgggagtacctggagccctacctgccctgcctgagcaccgaggccgacaagagcaccgtgatcgagaaccccggcgccctgtgcagcccccagagccagagacacggccactacttcgtggccctgttcgactaccaggccagaaccgccgaggacctgagcttcagagccggcgacaagctgcaggtgctggacaccctgcacgagggctggtggttcgccagacacctggagaagagaagagacggcagcagccagcagctgcagggctacatccccagcaactacgtggccgaggacagaagcctgcaggccgagccctggttcttcggcgccatcggcagaagcgacgccgagaagcagctgctgtacagcgagaacaagaccggcagcttcctgatcagagagagcgagagccagaagggcgagttcagcctgagcgtgctggacggcgccgtggtgaagcactacagaatcaagagactggacgagggcggcttcttcctgaccagaagaagaatcttcagcaccctgaacgagttcgtgagccactacaccaagaccagcgacggcctgtgcgtgaagctgggcaagccctgcctgaagatccaggtgcccgcccccttcgacctgagctacaagaccgtggaccagtgggagatcgacagaaacagcatccagctgctgaagagactgggcagcggccagttcggcgaggtgtgggagggcctgtggaacaacaccacccccgtggccgtgaagaccctgaagcccggcagcatggaccccaacgacttcctgagagaggcccagatcatgaagaacctgagacaccccaagctgatccagctgtacgccgtgtgcaccctggaggaccccatctacatcatcaccgagctgatgagacacggcagcctgcaggagtacctgcagaacgacaccggcagcaagatccacctgacccagcaggtggacatggccgcccaggtggccagcggcatggcctacctggagagcagaaactacatccacagagacctggccgccagaaacgtgctggtgggcgagcacaacatctacaaggtggccgacttcggcctggccagagtgttcaaggtggacaacgaggacatctacgagagcagacacgagatcaagctgcccgtgaagtggaccgcccccgaggccatcagaagcaacaagttcagcatcaagagcgacgtgtggagcttcggcatcctgctgtacgagatcatcacctacggcaagatgccctacagcggcatgaccggcgcccaggtgatccagatgctggcccagaactacagactgccccagcccagcaactgcccccagcagttctacaacatcatgctggagtgctggaacgccgagcccaaggagagacccaccttcgagaccctgagatggaagctggaggactacttcgagaccgacagcagctacagcgacgccaacaacttcatcagatag

SEQ ID NO: 330161 - DNA, 1518 bp, Artificial Sequence
  derived and/or modified sequence
atgagtaacatatgccaacgcctctgggagtaccttgaaccctatctaccatgtttgtcgaccgaggccgacaaatccaccgttatcgaaaatcccggtgcgctgtgctcccctcagagccagcggcacggccactactttgttgccttatttgactaccaggcccgtacagccgaggatctcagtttccgagcgggcgataaactgcaggtgctggacacactgcacgaaggctggtggtttgccaggcacctcgaaaaacgccgtgacggctcgtcccagcagctgcaaggatacataccctctaattacgttgccgaggaccgctcccttcaagctgagccttggtttttcggggcaatcgggaggtctgatgccgaaaaacagttgctttactctgaaaacaagaccggcagttttctgatccgggagagcgaatcccagaagggtgaatttagtctgtctgtgttggacggggcagtagtgaagcattatagaataaagcgcctcgatgagggggggttttttctcactcggcgacggatttttagcactctcaacgagttcgtgtcccattacaccaagactagtgatggcctgtgtgtgaagctcggtaaaccatgtctcaagattcaagtaccagctcctttcgacctctcctacaagacagttgatcagtgggagatagatcgtaatagcatccagttgcttaagcgactaggaagtgggcagttcggcgaggtctgggagggcttgtggaacaacactacccctgtcgcagtgaagacactcaaacctggcagcatggaccctaacgattttttgagggaagcacagatcatgaagaatctccgacatcccaaactgattcagctgtatgccgtctgcacgctggaggatccaatctacatcattaccgagctcatgcgccacggttctctgcaggagtatctgcagaatgatacaggaagtaagattcacctcacccagcaggtggacatggccgcccaagttgcaagtgggatggcctaccttgagtccaggaattacattcatagagacctggccgctcgaaatgtgctggtaggcgagcacaatatttataaagtggcagactttggactggctcgggtgttcaaagtagacaacgaggatatctacgaatcccgccacgaaatcaagctacccgtaaagtggacggccccagaagctatcaggagcaacaagttttcaattaaaagcgacgtgtggtcgtttggaatactgctatatgagataattacatacggaaaaatgccctattctggtatgactggggctcaggtcattcaaatgttggcccagaactatcgcctcccccagccctcaaactgtccacagcaattttataacatcatgctggagtgctggaacgccgaacccaaggagaggcccactttcgaaacactgcgatggaagctggaggattacttcgagactgatagcagttatagcgatgcgaacaatttcatccgctag

SEQ ID NO: 330162 - DNA, 2849 bp, Artificial Sequence
  derived and/or modified sequence
cctggcgaaagcaagacgtggaggttttaccaggggttagtagcttcctcttgctaactttttattgggacaaaaggcaagatggcaccattctgttctcagatatttgtctaaataaagcccttttaattttattttatttttgttgtgggattcttaagcagataagaagaaaagacaccttcctagtgagcagctgcccagctcctgctcagttttgcctcggggtagcacctccagccacagaaagcaagccggtaagtctctccaggtaggacttgctgcaacccagctgctggactgatctgaaacgggactttgcatactctccgaagtatggtgagttggtgctgacttcaaagttgcctggtgaaggaagataaggtggatcgcagagactaaggggagagggagaagccctgctcctcttctccccaccaaggcacaatgagcaacatctgtcagaggctctgggagtacctagaaccctatctcccctgtttgtccacggaggcagacaagtcaaccgtgattgaaaatccaggggccctttgctctccccagtcacagaggcatggccactactttgtggctttgtttgattaccaggctcggactgctgaggacttgagcttccgagcaggtgacaaacttcaagttctggacactttgcatgagggctggtggtttgccagacacttggagaaaagacgagatggctccagtcagcaactacaaggctatattccttctaactacgtggctgaggacagaagcctacaggcagagccgtggttctttggagcaatcggaagatcagatgcagagaaacaactattatattcagaaaacaagaccggttcctttctaatcagagaaagtgaaagccaaaaaggagaattctctctttcagttttagatggagcagttgtaaaacactacagaattaaaagactggatgaagggggattttttctcacgcgaagaagaatcttttcaacactgaacgaatttgtgagccactacaccaagacaagtgacggcctgtgtgtcaagctggggaaaccatgcttaaagatccaggtcccagctccatttgatttgtcgtataaaaccgtggaccaatgggagatagaccgcaactccatacagcttctgaagcgattgggatctggtcagtttggcgaagtatgggaaggtctgtggaacaataccactccagtagcagtgaaaacattaaaaccaggttcaatggatccaaatgacttcctgagggaggcacagataatgaagaacctaagacatccaaagcttatccagctttatgctgtttgcactttagaagatccaatttatattattacagagttgatgagacatggaagtctgcaagaatatctccaaaatgacactggatcaaaaatccatctgactcaacaggtagacatggcggcacaggttgcctctggaatggcctatctggagtctcggaactacattcacagagatctggctgccagaaatgtcctcgttggtgaacataatatctacaaagtagcagattttggacttgccagagtttttaaggtagataatgaagacatctatgaatctagacacgaaataaagctgccggtgaagtggactgcgcccgaagccattcgtagtaataaattcagcattaagtccgatgtatggtcatttggaatccttctttatgaaatcattacttatggcaaaatgccttacagtggtatgacaggtgcccaggtaatccagatgttggctcaaaactatagacttccgcaaccatccaactgtccacagcaattttacaacatcatgttggagtgctggaatgcagagcctaaggaacgacctacatttgagacactgcgttggaaacttgaagactattttgaaacagactcttcatattcagatgcaaataacttcataagatgaacactggagaagaatatcaaataataaagtagcaaaacaaattcaaataatccattccaaaatacaatgttatcaaccaactgcacaatcagtttatcctgacatattcaagtgataggataaagttggccatgtattatgaaaaagattatttgtgcattttattgactgggcaacactgcaggacagtcaaggtgatatataatttcctcactgcctggtaaaattaagcacactaaaccaagttatttttctttttaagagatacttacatttccatttattgtttgaaatgtcgatcaagagaatcaacagatgatagtccaatttttactcagtgactgttgtagcattttcctgtttactgattagagtggttattcattattcctcagattgctgaatcccatcaggctgttattatgaaggaatttgattgctttgctgcacagcaggacctgtgctttgagatttttttttctcttttaaaatatcctgtaactacaatgatggtaaagccatgttaaatgacttgattgtacttggagtaattgcacatttttttctatgcataaaaaaatgatgcagctgttgagaaaacgaagtctttttcattttgcagaaggaaatgatggaatttttctgtacttcagtatgtgtcaactgagagtcatatacattagttttaatctcttaatattgagaatcaggttgcaaaacggatgagttattatctatggaaatgtgagaaatgtctaatagcccataaagtctgagaaataggtatcaaaatagtttaggaaaatgagaggagaacagtaggattgctgtggcctagacttctgagtaattaataaagaaaaagaagtaccctttggcctaca

SEQ ID NO: 330163 - DNA, 1518 bp, Artificial Sequence
  derived and/or modified sequence
atgagcaacatctgccagaggctgtgggagtacctggagccctacctgccctgcctgagcacagaagctgacaagagcacagtgattgagaaccctggggccctgtgcagcccccagagccagagacatggccactactttgtggccctgtttgactaccaggccaggacagctgaggacctgtccttccgggccggggacaagctgcaggtgctggacaccctgcacgagggctggtggtttgcccggcacctggagaagagaagagatggcagcagccagcagctgcagggctacatccccagcaactacgtggctgaagatagaagcctgcaggccgagccctggttcttcggggccatcggccgcagtgatgctgagaagcagctgctgtacagcgagaacaagacaggcagcttcctgatccgggagagcgagagccagaagggggagttcagcctgtctgtgctggatggagctgtggtgaagcactaccgcatcaagaggctggatgaaggaggcttcttcctgacccggcggcgcatcttcagcaccctgaatgaatttgtgagccactacaccaagaccagtgatggcctgtgtgtgaagctgggcaagccctgcctgaagatccaggtgcctgccccctttgacctgagctacaagacagtggaccagtgggagattgacagaaattccatccagctgctgaagaggctgggcagcggccagtttggagaggtgtgggagggcctgtggaacaacaccacccctgtggccgtgaagaccctgaagccaggctccatggaccccaatgacttcctgcgggaggcccagatcatgaagaacctgcggcaccccaagctgatccagctgtatgctgtgtgcaccctggaggaccccatctacatcatcacagagctgatgagacatggcagcctgcaggagtacctgcagaatgacaccggcagcaagatccacctgacccagcaggtggacatggccgcccaggtggccagcggcatggcctacctggagagcaggaactacatccaccgggacctggccgccagaaatgtgctggtgggggagcacaacatctacaaggtggccgactttggcctggcccgggtcttcaaggtggacaatgaagacatctatgagagcagacatgagatcaagctgcctgtgaagtggacagcccctgaggccatccgcagcaacaagttcagcatcaagagtgatgtgtggagctttggcatcctgctgtatgagatcatcacctacggcaagatgccctacagcggcatgaccggggcccaggtgatccagatgctggcccagaactaccgcctgccccagcccagcaactgcccccagcagttctacaacatcatgctggagtgctggaatgctgagcccaaggagcggcccacctttgagaccctgcgctggaagctggaggactactttgaaacagacagcagctacagtgatgccaacaacttcatcagatag

SEQ ID NO: 330164 - DNA, 1518 bp, Artificial Sequence
  derived and/or modified sequence
atgagcaacatctgccagcggctgtgggagtacctggagccctaccttccctgtctttcaacagaggcagataagtccacggtgatagaaaaccccggagcactgtgctccccccagtcccaaagacacggccactattttgtggcattattcgattatcaggctagaactgccgaagacctgagcttccgggccggggataaattgcaggtattggacacgctccatgaaggctggtggtttgcacgacacctggaaaaacgcagggacgggtcgtcacagcagctccaaggttatattccttcgaactacgtcgctgaggaccggtcgctgcaagctgagccatggttctttggagccatcggaaggtccgacgctgaaaagcagttactgtattcagagaacaagactggaagcttcctgattagggagagtgagtctcagaagggagagttctccctgtccgtgctggacggggcggtcgtaaagcactatcgaatcaagcggctggacgagggcggctttttcctgacacgtagacgtattttttctactctgaacgaatttgtgagccactacactaagacgagtgatggcctgtgtgtaaaactcggaaagccatgtcttaaaatccaggtgccagccccatttgacttgagttacaagaccgtggatcagtgggagattgacagaaattcaatccaactactcaaaaggctgggatctggtcagtttggggaggtgtgggagggcctgtggaataacaccactccagtggcagtgaaaacccttaaacctggatccatggatccaaacgatttcctgcgggaagcccaaattatgaagaatctccgccaccccaagctgatacagctgtatgccgtctgcacccttgaggatccaatctatattatcacagagctcatgagacacggcagtctacaggagtaccttcagaacgatacaggcagcaagatccatctcacacaacaggttgacatggctgcacaggtagctagcggtatggcctatctcgaatcccgcaactatatccacagggacctggcagccaggaacgttttagttggcgagcacaacatatataaggtggctgattttgggctggcaagagtgttcaaggttgataacgaagacatctatgagagcaggcacgagatcaagctacctgtgaaatggacagcacctgaagccatacgctcgaacaaattttcgatcaaatctgatgtatggagctttggcattctgttgtatgagattattacttatggaaaaatgccctattctggcatgaccggggcacaagttattcagatgcttgcacagaactacaggctcccgcagccctccaattgcccacagcagttttacaacattatgctggaatgttggaacgctgaacccaaggaacgcccaacatttgagaccctcaggtggaaactggaagactactttgagaccgattcttcatactctgatgccaataacttcatacggtag

SEQ ID NO: 330165 - DNA, 1518 bp, Artificial Sequence
  derived and/or modified sequence
atgtccaatatctgtcaacggctgtgggagtatttagagccttacttaccctgtctctcaactgaagccgataagtccaccgttattgagaaccccggagccctgtgctctccccagagccaaagacacggtcactattttgtcgccctgtttgattatcaggcgaggactgccgaggacttatccttcagggccggagataaactacaggtactagatacccttcacgaaggttggtggtttgccaggcacttggaaaagagacgagatggcagctcccaacagctccagggatacatcccaagcaattatgtcgcagaggataggagcttacaggccgaaccgtggttcttcggtgcgattggtcggtccgatgcagaaaaacaactactctatagcgaaaataagaccgggagtttcttgatccgggagagcgagtcgcagaagggagagttttcgctgtcagtgttggatggcgcagtggtgaagcattacaggataaaaagattagatgagggcggattttttctgaccagaagacgcatattctcaacgcttaatgagttcgtgtcccactacaccaagacctcagacggcctgtgcgtcaagttaggcaagccatgcttgaagatccaggtccctgcgccatttgacctcagttacaaaacggtggatcaatgggaaattgatcgaaattcgattcaactcctgaagagactcggctctggccagtttggtgaggtttgggaagggctgtggaataacacaacaccagtcgccgttaagacattgaagccaggcagcatggatccaaacgatttcctccgtgaggctcagatcatgaagaatctccgccatcccaaactcattcagttatacgctgtctgcacccttgaggaccctatctatatcatcactgagctgatgcgccacggaagcctgcaggagtaccttcagaatgataccgggtccaagatccacctgacccagcaagtggatatggctgctcaggtagccagcgggatggcatacttagagtctagaaactacattcatagagacctcgcagccagaaatgttctggttggagagcacaatatttacaaggtcgctgatttcgggttagcacgtgttttcaaggtggacaacgaggacatttatgaatcccggcacgagattaagctccctgttaaatggactgctcctgaagccatacggtccaataaatttagcattaagtcggatgtttggagctttggcatattgttatacgagatcatcacatacgggaaaatgccatactcaggtatgactggcgctcaggtgatccagatgctggcccagaactatcgcctaccacagccgagcaattgtcctcagcagttttacaatatcatgctcgagtgctggaatgcagagccaaaagagcgcccaaccttcgaaaccctgaggtggaagttggaggattacttcgaaactgactccagctacagcgacgctaataacttcatcagatag

SEQ ID NO: 330166 - protein, 363 aa, Artificial Sequence
  derived and/or modified sequence
MDSTSLLPNPWIRVLDGAVVKHYRIKRLDEGGFFLTRRRIFSTLNEFVSHYTKTSDGLCVKLGKPCLKIQVPAPFDLSYKTVDQWEIDRNSIQLLKRLGSGQFGEVWEGLWNNTTPVAVKTLKPGSMDPNDFLREAQIMKNLRHPKLIQLYAVCTLEDPIYIITELMRHGSLQEYLQNDTGSKIHLTQQVDMAAQVASGMAYLESRNYIHRDLAARNVLVGEHNIYKVADFGLARVFKVDNEDIYESRHEIKLPVKWTAPEAIRSNKFSIKSDVWSFGILLYEIITYGKMPYSGMTGAQVIQMLAQNYRLPQPSNCPQQFYNIMLECWNAEPKERPTFETLRWKLEDYFETDSSYSDANNFIR

SEQ ID NO: 330167 - DNA, 1092 bp, Artificial Sequence
  derived and/or modified sequence
atggacagcaccagcctgctgcccaacccctggatcagagtgctggacggcgccgtggtgaagcactacagaatcaagagactggacgagggcggcttcttcctgaccagaagaagaatcttcagcaccctgaacgagttcgtgagccactacaccaagaccagcgacggcctgtgcgtgaagctgggcaagccctgcctgaagatccaggtgcccgcccccttcgacctgagctacaagaccgtggaccagtgggagatcgacagaaacagcatccagctgctgaagagactgggcagcggccagttcggcgaggtgtgggagggcctgtggaacaacaccacccccgtggccgtgaagaccctgaagcccggcagcatggaccccaacgacttcctgagagaggcccagatcatgaagaacctgagacaccccaagctgatccagctgtacgccgtgtgcaccctggaggaccccatctacatcatcaccgagctgatgagacacggcagcctgcaggagtacctgcagaacgacaccggcagcaagatccacctgacccagcaggtggacatggccgcccaggtggccagcggcatggcctacctggagagcagaaactacatccacagagacctggccgccagaaacgtgctggtgggcgagcacaacatctacaaggtggccgacttcggcctggccagagtgttcaaggtggacaacgaggacatctacgagagcagacacgagatcaagctgcccgtgaagtggaccgcccccgaggccatcagaagcaacaagttcagcatcaagagcgacgtgtggagcttcggcatcctgctgtacgagatcatcacctacggcaagatgccctacagcggcatgaccggcgcccaggtgatccagatgctggcccagaactacagactgccccagcccagcaactgcccccagcagttctacaacatcatgctggagtgctggaacgccgagcccaaggagagacccaccttcgagaccctgagatggaagctggaggactacttcgagaccgacagcagctacagcgacgccaacaacttcatcagatag

SEQ ID NO: 330168 - DNA, 1092 bp, Artificial Sequence
  derived and/or modified sequence
atggattccactagcctgctgccaaacccatggattcgggtccttgatggagcagtggtgaagcactataggatcaagcgtctggatgaaggcggattcttcctgacaagacggaggatattcagcacactgaatgagttcgtgagccattatactaagacatctgacggcctgtgcgtgaaactgggaaagccttgtctgaagatccaggtgccagcccctttcgatctgagctataaaaccgtcgatcagtgggagatcgatcggaactctatccagctgttaaagcgattggggtcaggacaattcggtgaggtatgggagggactgtggaataataccactccggtggctgtgaagacactgaagcctggcagtatggatccaaacgactttctgcgtgaggctcagatcatgaagaacctgaggcacccgaaactgatccagctgtatgccgtgtgcaccctggaggaccccatatatataatcactgaattaatgcgccatggctccctgcaagaatatctgcagaatgacactggctccaaaatacacctgacacagcaggtggatatggccgctcaagttgcatctggaatggcttatcttgagagtaggaactacatccatagggacctagctgcccggaacgtattggtgggcgaacataatatttacaaggtcgccgactttgggcttgcacgagtcttcaaagtcgataatgaagacatctacgaatctaggcacgagataaaactgccagtgaagtggactgcaccggaagccattagatcaaacaagttctccatcaagagcgacgtgtggagcttcggaatcctgctgtacgaaattattacctatggaaagatgccttattccggtatgaccggcgcccaggttatccaaatgttagcacagaattaccgcctgccacaaccatccaattgtcctcaacagttctataacatcatgcttgagtgttggaatgccgaaccgaaggagaggccgacttttgaaacgctgagatggaagctggaggactatttcgaaacagactctagttactctgatgctaataatttcattcggtag

SEQ ID NO: 330169 - DNA, 1152 bp, Artificial Sequence
  derived and/or modified sequence
aggtcctgactatgctgacactgagacaatgtggtactccagaaccacatggattcaacttcactactacctaatccatggataagagttttagatggagcagttgtaaaacactacagaattaaaagactggatgaagggggattttttctcacgcgaagaagaatcttttcaacactgaacgaatttgtgagccactacaccaagacaagtgacggcctgtgtgtcaagctggggaaaccatgcttaaagatccaggtcccagctccatttgatttgtcgtataaaaccgtggaccaatgggagatagaccgcaactccatacagcttctgaagcgattgggatctggtcagtttggcgaagtatgggaaggtctgtggaacaataccactccagtagcagtgaaaacattaaaaccaggttcaatggatccaaatgacttcctgagggaggcacagataatgaagaacctaagacatccaaagcttatccagctttatgctgtttgcactttagaagatccaatttatattattacagagttgatgagacatggaagtctgcaagaatatctccaaaatgacactggatcaaaaatccatctgactcaacaggtagacatggcggcacaggttgcctctggaatggcctatctggagtctcggaactacattcacagagatctggctgccagaaatgtcctcgttggtgaacataatatctacaaagtagcagattttggacttgccagagtttttaaggtagataatgaagacatctatgaatctagacacgaaataaagctgccggtgaagtggactgcgcccgaagccattcgtagtaataaattcagcattaagtccgatgtatggtcatttggaatccttctttatgaaatcattacttatggcaaaatgccttacagtggtatgacaggtgcccaggtaatccagatgttggctcaaaactatagacttccgcaaccatccaactgtccacagcaattttacaacatcatgttggagtgctggaatgcagagcctaaggaacgacctacatttgagacactgcgttggaaacttgaagactattttgaaacagactcttcatattcagatgcaaataacttcataagatgaacactggagaag

SEQ ID NO: 330170 - DNA, 1092 bp, Artificial Sequence
  derived and/or modified sequence
atggacagcaccagcctgctgcccaacccctggatccgggtgctggatggagctgtggtgaagcactaccgcatcaagaggctggatgaaggaggcttcttcctgacccggcggcgcatcttcagcaccctgaatgaatttgtgagccactacaccaagaccagtgatggcctgtgtgtgaagctgggcaagccctgcctgaagatccaggtgcctgccccctttgacctgagctacaagacagtggaccagtgggagattgacagaaattccatccagctgctgaagaggctgggcagcggccagtttggagaggtgtgggagggcctgtggaacaacaccacccctgtggccgtgaagaccctgaagccaggctccatggaccccaatgacttcctgcgggaggcccagatcatgaagaacctgcggcaccccaagctgatccagctgtatgctgtgtgcaccctggaggaccccatctacatcatcacagagctgatgagacatggcagcctgcaggagtacctgcagaatgacaccggcagcaagatccacctgacccagcaggtggacatggccgcccaggtggccagcggcatggcctacctggagagcaggaactacatccaccgggacctggccgccagaaatgtgctggtgggggagcacaacatctacaaggtggccgactttggcctggcccgggtcttcaaggtggacaatgaagacatctatgagagcagacatgagatcaagctgcctgtgaagtggacagcccctgaggccatccgcagcaacaagttcagcatcaagagtgatgtgtggagctttggcatcctgctgtatgagatcatcacctacggcaagatgccctacagcggcatgaccggggcccaggtgatccagatgctggcccagaactaccgcctgccccagcccagcaactgcccccagcagttctacaacatcatgctggagtgctggaatgctgagcccaaggagcggcccacctttgagaccctgcgctggaagctggaggactactttgaaacagacagcagctacagtgatgccaacaacttcatcagatag

SEQ ID NO: 330171 - DNA, 1092 bp, Artificial Sequence
  derived and/or modified sequence
atggacagcaccagcctgctgcccaacccctggatccgggtgctggacggtgccgtggtgaaacattatcgcatcaaaaggttagacgaaggaggcttcttcctgacaagaaggcggatcttttcaacactgaatgaatttgtcagccactacactaagaccagcgacggtctctgtgtgaagttggggaagccctgtcttaagattcaagtgcccgctccattcgatctaagctataagaccgtggaccagtgggagatcgatagaaacagcatccagctccttaagcggctgggcagcggacagtttggggaagtctgggagggcctgtggaataacaccactcccgtcgccgtgaagaccctgaagcctgggtccatggacccgaatgacttcttgcgggaggctcagattatgaagaatctcaggcaccccaagcttatacagctatacgctgtttgcacgctcgaagaccctatttatattattacagagctcatgcgtcacggatccctgcaggaatatctgcagaatgatacgggcagcaaaatacacctgacccagcaagtggacatggccgctcaggttgcttccggcatggcctacttggagtctagaaactacattcaccgggacctggccgcccgcaacgtactcgttggtgaacataacatctataaggtcgccgattttggcctcgcccgtgtgtttaaggtggataacgaggatatctacgagtctaggcacgaaatcaagctgcccgtaaaatggactgcacccgaagctatccgctccaataagttcagcatcaagtccgatgtgtggagcttcggaattctgctgtacgaaattatcacctatgggaagatgccatactcaggcatgacaggtgcccaagtgattcaaatgttagcccaaaattatagactcccgcagccctccaactgtcctcagcagttctataatataatgctggagtgctggaacgccgaacctaaggagaggcctactttcgaaaccctgcgttggaagttagaagactacttcgagacagactcttcttactctgacgcaaataattttattcgatag

SEQ ID NO: 330172 - DNA, 1092 bp, Artificial Sequence
  derived and/or modified sequence
atggatagtacatcattgctccccaacccatggatccgcgtgctggacggcgctgtggttaagcactaccgcataaaaaggctagacgagggcggtttcttcctcacacgaagacggatcttttctactctgaacgagttcgtatcgcattacaccaagaccagcgatggcctctgtgtgaagctgggtaagccatgcctgaaaattcaggtgccagcccctttcgacttgtcttataaaaccgtggatcagtgggaaatagatagaaactccatccagctgttaaagagactggggtcaggacagttcggagaagtctgggagggactgtggaataatactacgcccgtagcggtgaagacactgaagcccggtagcatggaccccaatgacttcctacgggaggcccagatcatgaaaaatctgagacatccaaagctcatacagctgtatgcggtctgtactctggaggatcctatatatattatcactgaacttatgaggcacggcagtctccaggaatatctgcagaatgatacaggatcaaagatccacctgacgcaacaggtcgacatggctgctcaggtcgcgtctgggatggcctacctggagtcaagaaattatatccatcgcgatctcgcagccagaaatgtactagtgggtgagcataatatttataaggttgccgatttcggtctcgccagggtatttaaggtagacaatgaggacatttatgagagcagacacgaaattaagttaccagtcaagtggacagcaccagaagccatcaggagtaacaaattctcaattaaatcagatgtgtggagttttggcatacttctctatgagatcatcacgtatggtaaaatgccgtacagcggtatgaccggagcccaggtgattcagatgctagcccaaaactaccggttacctcagcctagcaactgccctcagcagttctataatataatgttagagtgctggaatgcggaacccaaggagaggcccacttttgagaccctccggtggaagttagaggactatttcgaaactgatagcagctattctgatgccaataacttcattcgatag

SEQ ID NO: 330173 - protein, 106 aa, Artificial Sequence
  derived and/or modified sequence
MGCVQCKDKEATKLTEERDGSLNQSSGYRYGTDPTPQHYPSFGVTSIPNYNNFHAAGGQGLTVFGGVNSSSHTGTLRTRGGTGVTLFVALYDYEARTEDDLSFHKG

SEQ ID NO: 330174 - protein, 118 aa, Artificial Sequence
  derived and/or modified sequence
MGCVQCKDKEATKLTEERDGSLNQSSGYRYGTDPTPQHYPSFGVTSIPNYNNFHAAGGQGLTVFGGVNSSSHTGTLRTRGGTGVTLFVALYDYEARTEDDLSFHKGEKFQILNSSEGD

SEQ ID NO: 330175 - protein, 103 aa, Artificial Sequence
  derived and/or modified sequence
MGCVQCKDKEATKLTEERDGSLNQSSGYRYGTDPTPQHYPSFGVTSIPNYNNFHAAGGQGLTVFGGVNSSSHTGTLRTRGGTGVTLFVALYDYEARTEDDLSF

SEQ ID NO: 330176 - protein, 116 aa, Artificial Sequence
  derived and/or modified sequence
MGCVQCKDKEATKLTEERDGSLNQSSGYRYGTDPTPQHYPSFGVTSIPNYNNFHAAGGQGLTVFGGVNSSSHTGTLRTRGGTGVTLFVALYDYEARTEDDLSFHKGEKFQILNSSE

SEQ ID NO: 330177 - DNA, 4540 bp, Artificial Sequence
  derived and/or modified sequence
gaatgcattagtctaatgagatgtttgcagctggagcgcagggctgctggagactaactgtgagctactaacacgggtggaagatagcttttgcaatactcggtttgcatgtgctgaaagtcatctgtcttctgagtcaacactcccgacctggtaaacaacctgctcagggctctggtgaacaagctgtagcacctcttctgcctgtgagcgatttgtcacctcattctgtaagactggcaccagcagaaatgcagtctcaaaggatcccggggagaaagcgaggccgaccctcacttcactccacgcctatgaagatggcagttcataacctttattctgcttcagctggctctttaccagcagtgaagatcccaaagaaaagagggcggaaacccgggtacaagatcaagtctcgggttctcatgactcccttagccctctcacctccgcggagtaccccagagcccgacctcagctccatccctcaggacgcagccacggtccccagcttggcggccccacaggctctcacagtctgcctctacatcaacaagcaggccaatgcggggccctatctggagaggaagaaggtgcagcagctcccggagcattttgggcccgagcggccatcggcggtgctgcagcaggccgtccaagcctgcatcgactgcgcccaccagcagaagctggtcttctccctggtcaagcagggctatggtggtgagatggtgtcagtctcggcttcctttgatggcaaacagcacctgcggagcctgcctgtggtgaacagcatcggctatgtcctccgcttcctcgccaagctgtgccgaagcctcctgtgcgatgacctcttcagccaccagcccttccccaggggctgcagtgcctctgagaaagtccaggagaaagaggaagggaggatggaatcagtcaagacagtcaccaccgaagagtacctggtgaaccctgtgggcatgaaccgctacagcgtggacacctccgcctccacctttaaccacaggggctccttgcacccctcctcctcgctgtactgcaagaggcagaactctggagacagccaccttgggggtggtcctgctgccaccgctggtggtccccgcactagccccatgtcttctggtggcccctcggcacctgggctgaggcctccagcctccagccccaagagaaacacgacctctcttgaaggaaacagatgtgcctcaagcccttctcaggatgcgcaggatgccaggcggccacggagcaggaacccctccgcctggactgtggaggacgtggtgtggtttgtgaaggacgccgacccacaggctctggggcctcacgtggagctcttcagaaagcacgagattgatggcaacgctctgctgttgctgaagagtgacatggtcatgaagtacctgggcctgaagctgggacctgcactgaaactctgctaccacattgacaaactgaagcaagccaagttctgacttttttaaaaagacagaagcgaaacccaaaacaacagatcccaagattatcttctgccttaccaatatcccgccaacatcacaaactagactctcctcttaaaattaacagccacagagacgtggtctttttataaaacttgtgaatctttgccttttgaagaatttaacatggaccttttcgagaggctcctctgtgttcataatttgccaaaaaattacaaaagcctgtgatttttaacatccctgttatgctggtttctcttaaagtgggtcctatttgcataacgagagagtggggaactgaatgcttatgcccaaggagagttctggagggttcaaaggatgaaagaaggacctttgtccctgcggtctctgcagggacaaccccctcagcaccatctgcctctaactctgacctggggacctatccatgtgagccttgtttgcctcagctctggaagctgacttctgaagatgactgcctcaccttgcactgtctggaaaacttgaattattttacgccgtgaaagaaaaaggaaaaaaaaaaaaatcttttctgttcctagaaaatctgaagtactgtgtttctccgctagagggcagactgctaatgaaatttcaggaccctcactgactgcagtagcaggattgttcagtactgagtggatgggttagggtgtctgtgaacaagatctagcccacacagaaacaggggatttattccacagttagcaccacagattgcgacttgggaagaaaccatcagctagaggggtctagttcgtatccaatcattattgactgactgactgatactcaactagcaaaggcaagaatttggaagcacgctctacccagatgggactttggagttccttcccttccagagtccttattgaggtgttgaagtgttggcatgccgaagaatcttagtgacatttagccatgggtgtttctttaaaaaaggaaaagaaaatgtctcaacgaagctttgaaatgggagagtgttgatttctagttacattgctgggttatgtagttgtatctgtggctaatttttctagtcctcaacaaatacacagacatgctattatggggtttaattcaatttacaaataggttttccttcctcacagtggagtaatagaaaaaattgattttctgctcctttgcagctgtgtccagagacggacaatgaatccacaatttattaggcagaggcacaacttctccaccattcgttttatccttctcttttctctgtttccctccacctctcttcttcttctttcacactgagcagaaaacatatcttcaaaatgaattcgcctttgccatgtgcatattctcttccttaaaaggacatcaacagtgttggagatgaggagatgaacattagattttggaatttctgggagggagagggttagggatgactcagggcctcccttcgcccaaaggtgaatcagaaaaggcacccctttctctgggatacaacctgagcaggggtctcagctggcaagtggagcagggtgggggctcaacctcctcaccgcttgatcagctgccgttgtacagagcatgacctgtataaccttgagggcagccctgggtagatctgcagagtgaccctctatatagttagaatccagatgaaggccataagaaatagtccatgccatgccgttaggcccactttcatgtgcagtacttgagaaagcacatcgtagcctccttttcagacacacaaatggcggctggactgagagcatggcagagaaggggaggaggagaatgtactaaacttgctcactgaattgagcttgagttattagattgtagaagagcttgatgtctggtgattttgttacaggaagggggtcccgatccagaccccaagagagggctcttggatctcatgcaagaaagaattcagggtgagtccataaagtaaagtgaaagcaagtttattaagaaagtaaaggaaggaaagaatggctaccccatagtcaaagcagctctgagggctgctggttgcccatttttatgtttatttcttgatatgctaaacaaggggtggattattcatgcctcccccttttagatcatatagggtaacttcctgatgttgccatggcatttgtaaaccgtcatggcactggtggtagtatagcagcgaggacaaccagaggtcactctcgttgccatcttggttttggtgggttttagccaacttctttactgcaacctgttttatcagaaggtctttatgacctatatcttgtgctgacctcctgtctcatcctgtgactcagaatgctttagccatctgggaatgcagcccagtaggtctcagcctcattttacccagctcccattcaagatggagttgctctggttcaaatgcctctgacaggttcagcacctgagaaaagtaccttgaatcaggccttggggcagagtcttcaagattttaaggtgatagggcctgtctcttaagaatttattaatcgtaagtgctcactgctggtttagagttagatacatttccctcaaaacagccatgggcaggttatgtactcagaactgccagggtgaaaacaatgagatccagaaaaatcccacaacaatccaggtttttcactcctcttttttttctcaatcttccgatacttgtggtacctcttccatcaacagatacctcatgtagtgacttccagtatcaagttttcaaaacttcctacccaccctcatcagtgcctccttcactacagagtcacaaacattggtgctctcaaataaaaatcagccccaaacaatgtcaaagagatcccttgagtagttttcaggcgagagatatgttctcatttcaagtcttggagaaaactggatccatgttcacgtggaacttctctcgcggaggtgctatctcattttgcattaaactttaagcaggacagattgctgaagccatgatatttaaggtttgactttttaaaaatctcattactcttaaaataaatgctgccacatcagaaaaa

SEQ ID NO: 330178 - DNA, 1491 bp, Artificial Sequence
  derived and/or modified sequence
cattagtctaatgagatgtttgcagctggagcgcagggctgctggagactaactgtgagctactaacacgggtggaagatagcttttgcaatactcggtttgcatgtgctgaaagtcatctgtcttctgagtcaacactcccgacctggtaaacaacctgctcagggctctggtgaacaagctgtagcacctcttctgcctgtgagcgatttgtcacctcattctgtaagactggcaccagcagaaatgcagtctcaaaggatcccggggagaaagcgaggccgaccctcacttcactccacgcctatgaagatggcagttcataacctttattctgcttcagctggctctttaccagcagtgaagatcccaaagaaaagagggcggaaacccgggtacaagatcaagtctcgggttctcatgactcccttagccctctcacctccgcggagtaccccagagcccgacctcagctccatccctcaggacgcagccacggtccccagcttggcggccccacaggctctcacagtctgcctctacatcaacaagcaggccaatgcggggccctatctggagaggaagaaggtgcagcagctcccggagcattttgggcccgagcggccatcggcggtgctgcagcaggccgtccaagcctgcatcgactgcgcccaccagcagaagctggtcttctccctggtcaagcagggctatggtggtgagatggtgtcagtctcggcttcctttgatggcaaacagcacctgcggagcctgcctgtggtgaacagcatcggctatgtcctccgcttcctcgccaagctgtgccgaagcctcctgtgcgatgacctcttcagccaccagcccttccccaggggctgcagtgcctctgagaaagtccaggagaaagaggaagggaggatggaatcagtcaagacagtcaccaccgaagagtacctggtgaaccctgtgggcatgaaccgctacagcgtggacacctccgcctccacctttaaccacaggggctccttgcacccctcctcctcgctgtactgcaagaggcagaactctggagacagccaccttgggggtggtcctgctgccaccgctggtggtccccgcactagccccatgtcttctggtggcccctcggcacctgggctgaggcctccagcctccagccccaagagaaacacgacctctcttgaaggaaacagatgtgcctcaagcccttctcaggatgcgcaggatgccaggcggccacggagcaggaacccctccgcctggactgtggaggacgtggtgtggtttgtgaaggacgccgacccacaggctctggggcctcacgtggagctcttcagaaagcacgagattgatggcaacgctctgctgttgctgaagagtgacatggtcatgaagtacctgggcctgaagctgggacctgcactgaaactctgctaccacattgacaaactgaagcaagccaagttctga

SEQ ID NO: 330179 - protein, 305 aa, Artificial Sequence
  derived and/or modified sequence
MPCQRTAWIGCDRQRTPPFHWREIKSRVLMTPLALSPPRSTPEPDLSSIPQDAATVPSLAAPQALTVCLYINKQANAGPYLERKKVQQLPEHFGPERPSAVLQQAVQACIDCAHQQKLVFSLVKQGYGGEMVSVSASFDGKQHLRSLPVVNSIGYVLRFLAKLCRSLLCDDLFSHQPFPRGCSASEKVQEKEEGRMESVKTVTTEEYLVNPVGMNRYSVDTSASTFNHRGSLHPSSSLYCKRQNSGDSHLGGGPAATAGGPRTSPMSSGGPSAPGLRPPASSPKRNTTSLEGNRCGNVMHASASH

SEQ ID NO: 330180 - DNA, 918 bp, Artificial Sequence
  derived and/or modified sequence
atgccttgtcagcggaccgcttggattggttgtgatcgacagagaactccacccttccactggcgcgaaattaagagcagggtgttaatgactccactcgcactaagtcctcctaggagtacaccagagcccgatttatccagcatcccccaggacgccgctaccgttccgagcctcgcggcgcctcaggccctgaccgtgtgcctttatattaataagcaggcaaacgccgggccttatctggaaagaaagaaggttcagcagctgcctgagcacttcggccccgagcgccctagcgcagtccttcaacaagctgtgcaggcttgtatcgattgtgctcaccaacaaaagctcgtgtttagcctcgttaagcagggctacgggggcgagatggtttccgtgtctgcatctttcgatggaaagcagcaccttcgtagtcttccggtggtgaattcgattggctacgttttgcgttttctcgccaagctgtgtcgctccctcctctgtgatgacctgttctctcaccagccttttccaagagggtgttccgccagtgagaaagtgcaagagaaggaggagggacgtatggagagtgttaaaactgtcactaccgaggagtaccttgtgaatcctgtcggaatgaatcgctactcagtcgacacttcagcaagtacatttaaccaccgcggcagcctgcacccgtcatcatctttgtattgcaaacgccagaactctggagattcccacttgggcgggggtcctgctgccacagccggaggcccaagaacaagccctatgtctagcggtggaccaagcgctcccggcctgcggcctcccgcatctagtccgaagcggaacacgacatcacttgaggggaaccgttgtggtaatgtgatgcatgcttccgcctcccactag

SEQ ID NO: 330181 - DNA, 918 bp, Artificial Sequence
  derived and/or modified sequence
atgccctgccagaggacagcctggattggctgtgaccggcagaggaccccacccttccactggagggagatcaagagccgggtgctgatgacccccctggccctgagccccccaagaagcaccccagagccagacctgagcagcatcccccaggatgctgccaccgtgcccagcctggccgccccccaggccctgactgtgtgcctgtacatcaacaagcaggccaatgccggcccctacctggagaggaagaaggtgcagcagctgcctgagcactttggacctgagcggcccagcgctgtgctgcagcaggccgtgcaggcctgcatcgactgtgcccaccagcagaagctggtgttcagcctggtgaagcagggctatggaggagagatggtgtctgtgtctgccagctttgatggcaagcagcacctgcggagcctgcctgtggtgaacagcatcggctacgtgctgcgcttcctggccaagctgtgccgcagcctgctgtgtgatgacctcttcagccaccagcccttcccccggggctgcagcgccagcgagaaggtgcaggagaaggaggagggccgcatggagagcgtgaagacagtgaccacagaggagtacctggtgaaccctgtgggcatgaaccgctacagcgtggacaccagcgccagcaccttcaaccaccggggcagcctgcaccccagcagcagcctgtactgcaagaggcagaacagcggggacagccacctgggcggcggccctgctgccacagctgggggccccaggaccagccccatgagcagcggcggccccagcgcccctggcctgcggcccccagccagcagccccaagaggaacaccaccagcctggagggcaacagatgtggaaatgtgatgcacgccagcgccagccactag

SEQ ID NO: 330182 - DNA, 918 bp, Artificial Sequence
  derived and/or modified sequence
atgccctgccagcggaccgcctggatcggctgcgaccggcagcggacaccacctttccactggcgggagattaaatcaagggttctcatgacaccattggctctgtccccaccgcgcagcacccctgagcccgatttgagttctatcccacaggatgccgccaccgtcccatctctcgcggctccgcaagcgctgactgtttgcctttatatcaataagcaagctaatgctgggccctacctggagcggaagaaagtccaacagctgcccgagcacttcggcccagagcgcccaagcgcagtccttcagcaggccgttcaggcctgtattgattgtgcacaccaacagaagctggttttctcactggtaaagcagggttatggtggggagatggtgagcgtgtctgcaagcttcgacggtaagcagcatttgcggagcctgcctgtggtcaacagcataggctatgttctacgcttcctggctaaactgtgccgcagcctcttgtgcgacgacctattctctcaccagcctttccccaggggatgttcagcctccgagaaggtgcaagaaaaggaggagggaaggatggagagtgtaaagaccgtgacgactgaagagtacctcgtgaaccctgtgggtatgaaccgctactcagtggacacaagtgcctctacctttaaccatcgaggttctttacacccttccagctctttgtattgtaaacgccagaattccggtgactcgcatcttgggggaggcccagctgccaccgcgggcggacccaggaccagcccgatgagtagcgggggcccctcagcaccgggactgaggccccccgcctcttcccctaagagaaacacaacgtcactggaggggaatcgttgtggaaacgtcatgcatgcttctgcaagtcactag

SEQ ID NO: 330183 - DNA, 1352 bp, Artificial Sequence
  derived and/or modified sequence
atgccctgccagagaacagcttggataggttgcgacaggcagagaacccccccattccactggagagagatcaagtctcgggttctcatgactcccttagccctctcacctccgcggagtaccccagagcccgacctcagctccatccctcaggacgcagccacggtccccagcttggcggccccacaggctctcacagtctgcctctacatcaacaagcaggccaatgcggggccctatctggagaggaagaaggtgcagcagctcccggagcattttgggcccgagcggccatcggcggtgctgcagcaggccgtccaagcctgcatcgactgcgcccaccagcagaagctggtcttctccctggtcaagcagggctatggtggtgagatggtgtcagtctcggcttcctttgatggcaaacagcacctgcggagcctgcctgtggtgaacagcatcggctatgtcctccgcttcctcgccaagctgtgccgaagcctcctgtgcgatgacctcttcagccaccagcccttccccaggggctgcagtgcctctgagaaagtccaggagaaagaggaagggaggatggaatcagtcaagacagtcaccaccgaagagtacctggtgaaccctgtgggcatgaaccgctacagcgtggacacctccgcctccacctttaaccacaggggctccttgcacccctcctcctcgctgtactgcaagaggcagaactctggagacagccaccttgggggtggtcctgctgccaccgctggtggtccccgcactagccccatgtcttctggtggcccctcggcacctgggctgaggcctccagcctccagccccaagagaaacacgacctctcttgaaggaaacagatgtggtaatgtaatgcatgcatcagcttcccactgacttaacatcccttgcccttgcgcggggagcacagcatctggggaagggggagtgtggctgtttaaacgtgggactgctgggagatcagaaatttccacaagtcctttcatggatcttgaggttctcaaaaacagccaaactcaacctttgataagcaaagaaaatcgtgtattagggcaggctaggccacaggatacgtagactccaaaatgtacacaggctcaaataccatagaaatttttgttcgagagccaaaggtgaatgttcctgattcatggatgcatctcaatatagggacataggctccatctattttgtggctctgccaccctctacagccttcatgccccatgcattagggaatagaaagggaaagaaggtgtggagaagacacaggtgcttccctgcaatctgaaagtgatgctcatcacttc

SEQ ID NO: 330184 - DNA, 918 bp, Artificial Sequence
  derived and/or modified sequence
atgccatgccagcggactgcctggatcggctgtgatagacagaggacacctccattccactggagagagatcaaatccagggtgttgatgacgcccttggcactctcacctccgagaagtacacccgaacccgacctgtcaagtattccacaggatgccgcaacagtaccctcgctggcggcaccccaggctctgaccgtgtgcctttatatcaataaacaggcaaacgcaggtccttacttggaacggaaaaaagtgcagcagttacctgagcattttggtccagagcggcctagcgcggtactgcaacaggccgtccaggcttgcatcgattgcgcacatcagcagaaattagttttctcgctggtaaaacaaggatacggcggagagatggtaagtgtatcggctagcttcgacggcaagcagcacttacggtcactgccggtcgtgaactcaatcggctatgtcctccggttcctggctaagctgtgtaggtcattgctgtgtgacgatctgttttcacaccagcctttccccagaggctgctctgcctcagagaaagtgcaagagaaagaagaagggagaatggaaagtgtcaagacagttacaaccgaggagtatctcgtgaaccccgtgggaatgaatcggtacagtgtcgacaccagtgcatccacatttaatcatcgcggtagtttgcatccttcttcctcactgtactgcaagaggcagaacagcggggattcccacctggggggaggccctgccgcaacggctggtggcccaaggacatcccccatgtctagcgggggaccgtctgcccctgggttgaggccgccagccagctcgcctaagcgaaatacaacttcactggaaggaaacaggtgcggcaacgtgatgcatgcatccgcttcccactag

SEQ ID NO: 330185 - DNA, 918 bp, Artificial Sequence
  derived and/or modified sequence
atgccctgccagagaaccgcctggatcggctgcgacagacagagaaccccccccttccactggagagagatcaagagcagagtgctgatgacccccctggccctgagcccccccagaagcacccccgagcccgacctgagcagcatcccccaggacgccgccaccgtgcccagcctggccgccccccaggccctgaccgtgtgcctgtacatcaacaagcaggccaacgccggcccctacctggagagaaagaaggtgcagcagctgcccgagcacttcggccccgagagacccagcgccgtgctgcagcaggccgtgcaggcctgcatcgactgcgcccaccagcagaagctggtgttcagcctggtgaagcagggctacggcggcgagatggtgagcgtgagcgccagcttcgacggcaagcagcacctgagaagcctgcccgtggtgaacagcatcggctacgtgctgagattcctggccaagctgtgcagaagcctgctgtgcgacgacctgttcagccaccagcccttccccagaggctgcagcgccagcgagaaggtgcaggagaaggaggagggcagaatggagagcgtgaagaccgtgaccaccgaggagtacctggtgaaccccgtgggcatgaacagatacagcgtggacaccagcgccagcaccttcaaccacagaggcagcctgcaccccagcagcagcctgtactgcaagagacagaacagcggcgacagccacctgggcggcggccccgccgccaccgccggcggccccagaaccagccccatgagcagcggcggccccagcgcccccggcctgagaccccccgccagcagccccaagagaaacaccaccagcctggagggcaacagatgcggcaacgtgatgcacgccagcgccagccactag

SEQ ID NO: 330186 - protein, 392 aa, Artificial Sequence
  derived and/or modified sequence
MRPGFGGPAIPVGVDVQVESLDSISEVDMDFTMTLYLRHYWKDERLSFPSTNNLSMTFDGRLVKKIWVPDMFFVHSKRSFIHDTTTDNVMLRVQPDGKVLYSLRVTVTAMCNMDFSRFPLDTQTCSLEIESYAYTEDDLMLYWKKGNDSLKTDERISLSQFLIQEFHTTTKLAFYSSTGWYNRLYINFTLRRHIFFFLLQTYFPATLMVMLSWVSFWIDRRAVPARVPLGITTVLTMSTIITGVNASMPRVSYIKAVDIYLWVSFVFVFLSVLEYAAVNYLTTVQERKEQKLREKLPCTSGLPPPRTAMLDGNYSDGEVNDLDNYMPENGEKPDRMMVQLTLASERSSPQRKSQRSSYVSMRIDTHAIDKYSRIIFPAAYILFNLIYWSIFS

SEQ ID NO: 330187 - DNA, 1179 bp, Artificial Sequence
  derived and/or modified sequence
atgcggcctggcttcgggggtcccgccatccccgtcggggtggacgtgcaagtggagagtctggatagtatatctgaagtagacatggacttcaccatgaccttgtatctgagacattattggaaagacgaacggctgtctttcccctccaccaacaatctgagtatgacgtttgacggcagactagttaagaagatttgggtaccagacatgtttttcgtccactctaaacgatcatttattcatgacaccaccacagataacgtaatgctgagagtccagccagacggcaaggtgctgtattctctgagggtgaccgtcaccgctatgtgtaatatggacttttccaggtttcctctcgacacacagacatgtagcctggaaatcgaaagttacgcttatacagaggatgatctgatgttgtactggaagaaggggaacgactccctcaagacagatgagaggatatcgctgagtcagtttcttattcaggaattccatactacaacaaaactggctttttacagctctacagggtggtacaatcgcctgtatatcaactttacactccgacgccacatttttttctttcttttgcaaacctattttcctgccacattgatggtaatgctttcctgggttagtttctggatcgataggcgcgcagtgccagcacgggtcccattaggaatcaccaccgtgctgacaatgtccaccatcattacaggcgtgaacgcatccatgccgagagtgtcttatataaaggctgtcgacatctacctatgggtcagtttcgtgttcgtgtttttgagtgttctggagtacgccgccgttaattatctaacgacagtacaagagcgaaaggagcagaagctcagagaaaaacttccatgtacttctgggttgccaccccctagaacagccatgcttgatgggaactattcagatggcgaggtgaatgatctggataattacatgccagagaacggcgagaaaccagaccgcatgatggttcagctaaccctcgcctcagagaggagctctccacaacgaaagagccaaagatcttcatatgtttctatgcgcattgacacgcatgccatcgataaatattcaaggatcatatttcccgccgcctacatcctgttcaacttgatctattggtctattttcagctag

SEQ ID NO: 330188 - DNA, 1179 bp, Artificial Sequence
  derived and/or modified sequence
atgcgcccgggattcggagggcctgcgatacctgtgggggtcgatgtacaggtggaaagtctggactctataagtgaggtggatatggattttacaatgacgctgtacttgcgtcattattggaaggatgagagattgagctttcctagtaccaacaacctgagcatgaccttcgatggccgcctcgttaagaagatttgggtacccgatatgttttttgtgcatagcaaacgctcctttatccacgatacaactacagacaatgttatgctgagagttcagccagatggcaaggtgttgtattcgctgcgggtgacagtcactgccatgtgcaacatggacttttcaagattcccactggacacgcagacatgcagccttgagatagagagttacgcttacacagaagatgacctgatgctgtactggaagaaaggcaatgattctctcaagacagacgagcggattagtctgagccagttccttatacaggagttccacacgacgactaaactggctttctatagctcgacaggatggtataacaggctgtatataaactttacactgcgccgtcatatcttctttttcctactgcagacttattttcccgctacccttatggtgatgctgtcgtgggtatctttttggatcgatagacgtgccgtccctgcacgcgtgccacttgggatcacaactgtgctaaccatgagtacaattattactggagtgaacgcaagcatgcctagagtgtcctacatcaaagctgtcgacatttatctctgggtgtcgtttgttttcgtgttcctgagcgtcctggagtacgctgcagttaattatctgactacggtgcaggaacgtaaagagcagaaattgcgcgaaaaattgccctgtacaagtggtctcccccccccgaggaccgccatgcttgacgggaattactccgatggcgaggtgaacgacctggacaactatatgcctgagaatggggaaaagcccgatcgcatgatggtacaattgaccttggccagcgagagatccagcccccagagaaagagtcaaaggagttcttatgtgtctatgcgcattgacacccatgccatcgacaaatacagcaggatcatctttcccgcagcctatatattatttaacctcatttactggagcatcttcagttag

SEQ ID NO: 330189 - DNA, 1179 bp, Artificial Sequence
  derived and/or modified sequence
atgaggcctggctttggaggccctgccatccctgtgggcgtggatgtgcaggtggagagcctggacagcatcagcgaggtggacatggacttcaccatgaccctgtacctgcggcactactggaaggatgagcggctgtccttccccagcaccaacaacctgtccatgacctttgatggccgcctggtgaagaagatctgggtgcctgacatgttctttgtgcacagcaagaggagcttcatccatgacaccaccacagacaacgtgatgctgcgggtgcagccagatggcaaggtgctgtacagcctgcgggtgacagtgacagccatgtgcaacatggacttcagccgcttccccctggacacccagacctgcagcctggagattgagagctatgcctacacagaagatgacctgatgctgtactggaagaagggaaatgacagcctgaagacagatgagcgcatcagcctgagccagttcctgatccaggagttccacaccaccaccaagctggccttctacagcagcacaggctggtacaaccggctgtacatcaacttcaccctgcggcggcacatcttcttcttcctgctgcagacctacttccctgccaccctgatggtgatgctgtcctgggtgtccttctggattgaccggcgggctgtgcctgcccgggtgcccctgggcatcaccaccgtgctgaccatgagcaccatcatcaccggggtgaatgcctccatgccccgggtgtcctacatcaaggctgtggacatctacctgtgggtgtcctttgtgtttgtgttcctgtctgtgctggagtatgctgctgtgaactacctgaccaccgtgcaggagaggaaggagcagaagctgcgggagaagctgccctgcaccagcggcctgcccccacccaggacagccatgctggatggcaactacagtgatggagaggtgaatgacctggacaactacatgccagaaaatggagagaagccagacaggatgatggtgcagctgaccctggccagcgagaggagcagcccccagaggaagagccagaggagcagctatgtgtccatgagaattgacacccacgccatcgacaagtacagccgcatcatcttccctgctgcctacatcctcttcaacctgatctactggagcatcttctcctag

SEQ ID NO: 330190 - DNA, 1179 bp, Artificial Sequence
  derived and/or modified sequence
atgcggcccggcttcggcggccccgccatccccgtgggcgtggacgtgcaagttgagtctctcgattcaatcagcgaggtggatatggatttcacgatgactctctatctccggcattattggaaggatgagcggctgtccttcccgagcaccaataacctgagtatgactttcgatggcagactggtcaagaaaatttgggtgcctgatatgttcttcgttcacagcaaaagatcctttatccatgacaccaccactgacaacgttatgcttagggtgcagcctgacggcaaagtgttgtactcactgagggttacggtgacagccatgtgcaacatggactttagccgcttcccgctagacacgcaaacatgttctctggagatcgaaagttacgcctacaccgaagacgatctgatgctctactggaaaaaaggaaacgatagcttaaagaccgatgaacggatttcactgtctcagttcctgattcaggaatttcatactactaccaagctcgcattttactcctccactggttggtacaaccggctctacatcaactttacactcaggcgccacatattcttcttcttgttacaaacttactttcccgccacactaatggtgatgctgagctgggtgtcattttggatcgaccggcgcgcagttccagctagagtccctctcggtatcacaacagtcctcaccatgagtaccatcataaccggcgttaatgcgagtatgccacgcgttagctatataaaggccgtggatatctacctgtgggtctcttttgtgtttgtctttctttcagtattggaatacgccgcggtgaactaccttaccactgtgcaggagagaaaagagcaaaaactgagggaaaaattgccttgtacttcaggcctccccccacctcggacagcaatgctggatggcaattacagcgatggggaagtgaacgacctcgacaactatatgcctgagaatggcgagaaacctgatcgcatgatggtacagctgacccttgcctccgaacgatcatcaccccagaggaaatcacagaggtccagctatgtttctatgaggatcgatacacatgcgatcgacaagtactctcggattatctttccagcggcatacatcctcttcaatttgatttactggtctatattttcttag

SEQ ID NO: 330191 - DNA, 1179 bp, Artificial Sequence
  derived and/or modified sequence
atgcggcccggcttcggcggccccgccatccccgtgggcgtggacgtacaggtggaatctcttgattctatttcggaagtcgacatggattttacgatgacgctctacctgcgccattattggaaagatgagcgactgagctttcctagtacaaacaacctgtccatgactttcgacgggaggctcgttaaaaaaatttgggtgccggacatgtttttcgtgcacagtaaacgcagcttcattcatgacaccacgactgacaatgtgatgttacgcgtgcagcctgatggcaaggttctgtactccctcagggtgactgtgaccgctatgtgtaacatggactttagccggttccccctggacacacagacttgttccctcgaaatcgagtcctacgcttatactgaggatgatctgatgctttactggaaaaagggaaacgacagtctgaaaaccgacgagcgcatcagcctgagccagttccttattcaggaatttcacacaacgacaaaactcgccttctatagctctacgggatggtacaaccggctatacatcaacttcacacttaggcggcatatcttctttttcctcttacaaacctacttccctgctacattaatggtgatgttgtcctgggtctcgttctggattgatcggagagcggtccctgcccgcgtacccctaggcataacaacggtgctgaccatgtctactataatcactggagtcaatgccagtatgcctcgggtcagctacatcaaggccgtcgacatctatctgtgggtatcgttcgtctttgtgttcctgtccgtgctggagtatgcggcagtgaactatctgactaccgtgcaggagagaaaagagcagaagctcagggaaaaattgccatgtacttccgggctgccccctccacgaacagccatgcttgatggtaattactctgatggcgaggtgaatgacctagataattacatgcccgaaaatggagaaaagcctgatcgcatgatggtgcagctgacactggctagcgaacgctcaagtcctcagaggaagagtcaacggagcagctatgtctcaatgcgaatcgacactcacgccatcgacaagtattccaggattattttccccgcagcttatattctgttcaatctgatatattggagcatcttttcttag

SEQ ID NO: 330192 - DNA, 1179 bp, Artificial Sequence
  derived and/or modified sequence
atgagaccaggctttggcggaccagccatccccgtgggcgttgacgtacaggtggaatcacttgattccatttccgaagtggacatggactttacgatgacactgtacttaagacattactggaaagatgagcgtttgagttttcccagcacaaataatctgtccatgacattcgacggcaggttggtcaagaagatttgggtgcctgacatgttctttgtgcattctaagcggtcatttatccacgacacaacgacagataatgtcatgttgcgagtacaacctgatggaaaggtcctgtatagcctgcgggtgactgtgactgccatgtgtaacatggattttagccgcttccctctggacacacagacgtgttctctggaaatagagtcttatgcctacaccgaggacgacttgatgctatactggaagaaggggaatgacagtctgaagaccgacgaacggatctcgttgagccagttcctcatccaggagtttcataccacaactaagctcgcattctacagttccaccggctggtataaccgcctgtatatcaacttcacgttgcgtcgacatattttcttttttctgttgcagacatatttccctgccaccctaatggtgatgctcagctgggtgagcttctggatcgacaggcgcgctgttcccgcacgcgtccccctcggaatcacaaccgtgttaactatgagtacaatcattactggagtcaatgcatctatgcccagagtgagctatatcaaggctgtggacatctatctgtgggtcagttttgtcttcgtcttcctttctgtgctggagtacgccgcagtcaattacttgacgactgtacaggagcgcaaggaacagaaactgcgtgagaagctgccatgtacgagcggcctcccacctcccagaaccgccatgttagatggcaactattcggatggggaggtgaatgacctggacaattacatgccagagaacggagaaaaacccgaccgaatgatggtgcagctgaccctcgccagcgagcggagtagtccccagcggaagagtcagcgatcttcgtatgtctctatgcgcattgatacccatgctattgataagtacagcagaattatctttccagcagcatacattctttttaacctgatctactggtctatcttctcctag

SEQ ID NO: 330193 - DNA, 1179 bp, Artificial Sequence
  derived and/or modified sequence
atgcggcctgggttcggaggccctgcaataccggttggcgtagatgtccaagtggagtcattggattctatttctgaggtagacatggactttactatgacactgtacctgcgacactactggaaagacgaaaggctgagcttccctagcacaaataacctcagcatgacattcgacggacggctggtgaagaaaatctgggtgcccgatatgttcttcgtacattcaaaaagaagcttcatccacgacactacaactgacaatgtaatgttgagggtacagccagatgggaaagtgctctactctcttagagtgaccgttacagcaatgtgtaacatggatttttcacgattccctcttgacactcagacatgcagcctggagattgaatcctacgcatacaccgaggacgatctgatgctctactggaaaaagggaaacgactccctaaagacagatgagcgaatctcgctgagtcagtttttgatccaggagttccataccacaacaaagctcgccttttactcaagcaccgggtggtacaatagactttacattaattttactttacgacggcatatattcttctttctgctgcagacttactttccagctaccctgatggtgatgctgtcttgggtctctttttggatcgaccgccgagccgttcccgctcgggtgccactaggcataacaaccgtgctcaccatgtccacaatcatcaccggggtgaatgcctctatgccccgagtatcatatataaaagccgtagatatttatttgtgggtgagctttgtgtttgtgtttctgtctgtccttgagtacgcagctgtgaattatcttacaacagtgcaagagcgaaaagagcagaaactgagggagaagctgccatgtacaagcggtctacctccccctagaaccgccatgctggatggaaattattccgacggagaggtgaacgatctggataattacatgcctgaaaacggcgaaaagcccgaccggatgatggttcagctgacacttgcttctgagcgcagctcaccccagcgaaagagtcagagatcaagttatgttagcatgagaatcgacacgcacgccatcgataagtactctaggatcatcttccccgctgcctatattctgtttaacctcatttattggtcaatttttagctag

SEQ ID NO: 330194 - DNA, 1179 bp, Artificial Sequence
  derived and/or modified sequence
atgagacccggcttcggcggccccgccatccccgtgggcgtggacgtgcaggtggagagcctggacagcatcagcgaggtggacatggacttcaccatgaccctgtacctgagacactactggaaggacgagagactgagcttccccagcaccaacaacctgagcatgaccttcgacggcagactggtgaagaagatctgggtgcccgacatgttcttcgtgcacagcaagagaagcttcatccacgacaccaccaccgacaacgtgatgctgagagtgcagcccgacggcaaggtgctgtacagcctgagagtgaccgtgaccgccatgtgcaacatggacttcagcagattccccctggacacccagacctgcagcctggagatcgagagctacgcctacaccgaggacgacctgatgctgtactggaagaagggcaacgacagcctgaagaccgacgagagaatcagcctgagccagttcctgatccaggagttccacaccaccaccaagctggccttctacagcagcaccggctggtacaacagactgtacatcaacttcaccctgagaagacacatcttcttcttcctgctgcagacctacttccccgccaccctgatggtgatgctgagctgggtgagcttctggatcgacagaagagccgtgcccgccagagtgcccctgggcatcaccaccgtgctgaccatgagcaccatcatcaccggcgtgaacgccagcatgcccagagtgagctacatcaaggccgtggacatctacctgtgggtgagcttcgtgttcgtgttcctgagcgtgctggagtacgccgccgtgaactacctgaccaccgtgcaggagagaaaggagcagaagctgagagagaagctgccctgcaccagcggcctgcccccccccagaaccgccatgctggacggcaactacagcgacggcgaggtgaacgacctggacaactacatgcccgagaacggcgagaagcccgacagaatgatggtgcagctgaccctggccagcgagagaagcagcccccagagaaagagccagagaagcagctacgtgagcatgagaatcgacacccacgccatcgacaagtacagcagaatcatcttccccgccgcctacatcctgttcaacctgatctactggagcatcttcagctag

SEQ ID NO: 330195 - DNA, 468 bp, Artificial Sequence
  derived and/or modified sequence
atggagttcgcccaaatttctagggtgaagacatttcaagagaatctgagtgcatttaagcgtgatcctcagatcaatattctgctactcccactgcataccgggtccaatgggctgacaatcatcgaggccacgcacgtgctgctggtcgagccgattctgaacccagcccacgaattgcaagccattgggagggtgcatagaattggccaaactaaacccactattgttcatagattcctgatcaaagcgactattgaagagcggatgcaggctatgctcaaaactgccgaacgtaggtttttcgaagaacaggccctgttttgtttccacgatatcacacccttctctcacccctggtcactgaccaccgccattctgcagctgcgggatctcgtaatttgcgaactgttcttcatttattttaagaattttcttatatgttttctgagctctttttccatttag

SEQ ID NO: 330196 - DNA, 468 bp, Artificial Sequence
  derived and/or modified sequence
atggagtttgcccagatcagccgggtgaagaccttccaggagaacctgagcgccttcaagagggacccccagatcaacatcctgctgctgcccctgcacacaggcagcaatggcctgaccatcatcgaggccacccacgtgctgctggtggagcccatcctgaacccagcccacgagctgcaggccatcggccgggtgcacagaattggccagaccaagcccaccatcgtgcaccgcttcctgatcaaggccaccatcgaggagaggatgcaggccatgctgaagacagctgagcggcgcttctttgaggagcaggccctcttctgcttccatgacatcacccccttcagccacccctggagcctgaccacagccatcctgcagctgcgggacctggtgatctgtgagctgttcttcatctacttcaagaacttcctgatctgcttcctgagcagcttcagcatctag

SEQ ID NO: 330197 - DNA, 468 bp, Artificial Sequence
  derived and/or modified sequence
atggagttcgcccagatcagccgggtgaagaccttccaggagaaccttagtgcgtttaagcgggaccctcagatcaacatcctgctgctgcctctccacaccggcagcaacggcctgaccataatcgaggccacacatgtcctactcgtggaaccaatcctaaacccagcccatgagctgcaagccattgggagagtccataggattggtcagacaaaacccactattgtgcaccgcttcctgatcaaggcaacaatagaggagcgaatgcaggctatgttaaagacagccgagaggcgctttttcgaggaacaggccttgttttgctttcatgacatcacacccttctcacacccttggtcactgactactgcgatacttcagcttcgagacttagtgatttgcgagctgttctttatctactttaagaactttctgatctgtttcctcagctcattttccatctag

SEQ ID NO: 330198 - DNA, 1498 bp, Artificial Sequence
  derived and/or modified sequence
ggctgtaaaaaacctggagggacctccatctcgtaatgttattgagtctgcaacagtctgtcacctccgaccagccagacttcctctcaactgctgtgtcttttgtaaagctgatgaattgttcacagagtatgaatcaaagctattttccaacacagtcaaaggccagactgcaatatttgaggagatgatagaagatgaagaaggactggtggatgatcgagcacctaccaccacccggggtctctgggcaataagtgagacagagcgatctatgaaagcaatactatcatttgcaaaatcacataggtttgatgttgaatttgttgatgaaggaagcacttcaatggatctctttgaagcatggaagaaggaatataagttgcttcatgaatattggatggctctgaggaatcgtgtgtctgctgttgatgaacttgcaatggctacagaacgactaagagtgcgtgatcctagggagccaaagcctaatccgcctgttcttcatatcattgaaccacatgaggtagaacaaaaccgaataaaactactaaatgataaagctgttgctacatcacagcttcagaaaaaacttgggcagcttctttacctaactaatttggagaagtctcaagataaaacatcgggaggtgttaatccagaaccttgcccaatctgtgctcgacagctaggaaaacagtgggcggtactgacctgtggtcactgtttctgtaatgaatgcatttctataattattgaacaatacagcgtgggatctcacagaagctccattaagtgtgcaatctgccgccagaccacatctcacaaagaaatctcgtatgtctttacctcagagaaagcaaaccaggaggaggacatccctgtgaagggcagccattctacaaaagtggaagctgtggtcagaactctgatgaaaatacagcttagagatccaggggccaaagcactcgttttctcaacgtggcaagatgtattagatattatttcaaaagctcttactgacaacaacatggaatttgcacaaatcagtcgtgttaagacatttcaggagaacctttcagcatttaaacgtgatccccaaatcaatattttgctgctgcccctgcacacaggttctaatggattaactatcattgaagcaactcatgttctcttggtggagcccatattgaaccctgcccatgagcttcaggccatagggagggtgcaccgaattggacagacaaaacctactattgtacacagattcttaattaaagcaacaatagaagaaagaatgcaggcaatgctgaaaactgctgagagaaggttttttgaggaacaggcgttattttgttttcatgacatcaccccattctcccacccctggtccctgacaactgccattctacagttgagagatttggtgatttgtgagttgttttttatttactttaaaaattttttgatttgttttttatcatctttttcaatttag

SEQ ID NO: 330199 - DNA, 468 bp, Artificial Sequence
  derived and/or modified sequence
atggaatttgcgcagatcagtagagtcaagacgtttcaggagaaccttagcgcattcaaacgcgatccccagatcaatatcctactgctgcctctgcacaccggtagcaacggcctgactataatcgaagctacacacgtgctcctggttgagcctattttgaatcccgcacacgaactgcaagccatcggtagagttcacaggattggccagaccaagcccactattgtgcaccggtttttgatcaaggctacaattgaagagcgcatgcaggctatgctgaagaccgccgagcgccgattctttgaggagcaggctctgttttgttttcatgacatcacccccttctcgcacccctggagtcttactacagccatactgcaactacgggatttagtcatttgtgaactctttttcatttattttaaaaatttcctcatatgcttcctgtcatcgttctctatctag

SEQ ID NO: 330200 - DNA, 468 bp, Artificial Sequence
  derived and/or modified sequence
atggagttcgcccagatcagcagagtgaagaccttccaggagaacctgagcgccttcaagagagacccccagatcaacatcctgctgctgcccctgcacaccggcagcaacggcctgaccatcatcgaggccacccacgtgctgctggtggagcccatcctgaaccccgcccacgagctgcaggccatcggcagagtgcacagaatcggccagaccaagcccaccatcgtgcacagattcctgatcaaggccaccatcgaggagagaatgcaggccatgctgaagaccgccgagagaagattcttcgaggagcaggccctgttctgcttccacgacatcacccccttcagccacccctggagcctgaccaccgccatcctgcagctgagagacctggtgatctgcgagctgttcttcatctacttcaagaacttcctgatctgcttcctgagcagcttcagcatctag

SEQ ID NO: 330201 - DNA, 1788 bp, Artificial Sequence
  derived and/or modified sequence
atgttctacttcagaggctgcggcagatgggtggccgtgagcttcaccaagcagcagttccccctggccagactgagcagcgacagcgccgcccccagaaccccccacttcgacgtgatcgtgatcggcggcggccacgccggcaccgaggccgccaccgccgccgccagatgcggcagcagaaccctgctgctgacccacagagtggacaccatcggccagatgagctgcaaccccagcttcggcggcatcggcaagggccacctgatgagagaggtggacgccctggacggcctgtgcagcagaatctgcgaccagagcggcgtgcactacaaggtgctgaacagaagaaagggccccgccgtgtggggcctgagagcccagatcgacagaaagctgtacaagcagaacatgcagaaggagatcctgaacacccccctgctgaccgtgcaggagggcgccgtggaggacctgatcctgaccgagcccgagcccgagcacaccggcaagtgcagagtgagcggcgtggtgctgcccgaggaccagctgccctgctacctgacccacaccaaccccagagtggacgagatcgtgctgaagaacctgcacctgaacagccacgtgaaggagaccaccagaggccccagatactgccccagcatcgagagcaaggtgctgagattccccaacagactgcaccaggtgtggctggagcccgagggcatggacagcgacctgatctacccccagggcctgagcatgaccctgcccgccgagctgcaggagaagatgatcacctgcatcagaggcctggagaaggccaaggtgatccagcccggctacggcgtgcagtacgactacctggaccccagacagatcacccccagcctggagacccacctggtgcagagactgttcttcgccggccagatcaacggcaccaccggctacgaggaggccgccgcccagggcgtgatcgccggcatcaacgccagcctgagagtgagcagaaagccccccttcgtggtgagcagaaccgagggctacatcggcgtgctgatcgacgacctgaccaccctgggcaccagcgagccctacagaatgttcaccagcagagtggagttcagactgagcctgagacccgacaacgccgacagcagactgaccctgagaggctacaaggacgccggctgcgtgagccagcagagatacgagagagcctgctggatgaagagcagcctggaggagggcatcagcgtgctgaagagcatcgagttcctgagcagcaagtggaagaagctgatccccgaggccagcatcagcaccagcagaagcctgcccgtgagagccctggacgtgctgaagtacgaggaggtggacatggacagcctggccaaggccgtgcccgagcccctgaagaagtacaccaagtgcagagagctggccgagagactgaagatcgaggccacctacgagagcgtgctgttccaccagctgcaggagatcaagggcgtgcagcaggacgaggccctgcagctgcccaaggacctggactacctgaccatcagagacgtgagcctgagccacgaggtgagagagaagctgcacttcagcagaccccagaccatcggcgccgccagcagaatccccggcgtgacccccgccgccatcatcaacctgctgagattcgtgaagaccacccagagaagacagagcgccatgaacgagagcagcaagaccgaccagtacctgtgcgacgccgacagactgcaggagagagagctgtag

SEQ ID NO: 330202 - DNA, 1788 bp, Artificial Sequence
  derived and/or modified sequence
atgttctatttccgcggctgcgggcgctgggttgcggtttcctttacaaagcaacagttccctctggctcggctgagctcagacagtgcagctccacggacaccacattttgatgttatcgttataggtggtgggcatgctggtacagaggccgcgacagcagcagccaggtgtggaagcagaactttgcttctaactcaccgggtggacactataggacagatgagctgcaacccaagcttcggagggattggcaagggacacttgatgcgggaagtagacgcccttgatggcctgtgctctaggatttgtgaccagtccggcgtccattataaggtgctcaatcgcaggaaaggtccggccgtctggggcctgagggctcagattgatcggaaactttacaaacagaacatgcagaaggagatcttaaatacccctctgcttactgtgcaggaaggagccgtggaggacctgattctaactgagccagagcccgagcacactggtaagtgcagggtctcgggtgtggtgcttccagaggaccaactaccatgttatctcactcataccaatccccgagttgatgaaattgttctgaagaacttgcacctcaactctcatgtgaaggaaacgaccaggggacctcggtactgcccctcaatcgagagcaaggtgctgaggtttccgaacaggctgcaccaggtgtggctagaaccggaggggatggactctgatctgatttacccacagggattaagtatgacgcttcctgccgagctgcaggaaaaaatgattacctgcatacgtgggctcgagaaggccaaggtaatccaaccaggatatggtgtccagtacgattatctggatccgagacagattactcctagcctagaaacccacttagtccagcgattattcttcgctggccagattaatggaactactggctacgaggaggccgcggcccaaggcgtgatcgctggcatcaatgctagtctgcgagtgtctaggaagccgccttttgtggtcagccggactgagggctacatcggtgttctgatagatgacctcactaccttaggtacctctgagccttacaggatgttcacgtcgcgcgtggaattccggctgtcgctgaggccagacaacgccgactctcgactgactttgagaggctataaagatgcgggctgtgtgtcacaacagcgttatgagcgggcctgctggatgaaatcatctctcgaagaggggatttccgttttaaaatccatcgaatttctcagttccaaatggaaaaaactaattcccgaggcaagtatttcaacttctcgctcactgcctgtccgggccttagatgtgttgaagtatgaggaagtggacatggacagcctcgctaaagctgtcccagaacccctgaaaaaatacaccaaatgccgcgaactggcagagagattaaaaattgaggccacatacgagagcgttctttttcatcagctgcaggaaattaaaggcgtgcaacaggatgaggcgctgcagcttcccaaggaccttgactacctaacaattagggacgtgtctctgagccacgaagtccgggagaagctccacttctcccgccctcagacaataggcgccgcttcgagaattcccggagtcacccctgccgcgataatcaacttgctacgttttgtgaagacaactcaacgtagacaatctgccatgaacgagagttctaagaccgaccaatacctgtgtgatgccgatagactccaggagagagagttgtag

SEQ ID NO: 330203 - DNA, 1788 bp, Artificial Sequence
  derived and/or modified sequence
atgttctacttccggggctgcggccgctgggtggccgtgtccttcaccaagcagcagttccccctggcccggctgagcagtgacagcgctgcccccaggaccccccactttgatgtgattgtcatcggcggcggccatgctggaacagaagctgccacagctgctgcccgctgtggcagcaggaccctgctgctgacccaccgggtggacaccatcggccagatgagctgcaaccccagctttggaggcatcggcaagggccacctgatgagggaggtggatgccctggatggcctgtgcagccgcatctgtgaccagagcggcgtgcactacaaggtgctgaacagaaggaagggccctgctgtgtggggcctgcgggcccagattgacaggaagctgtacaagcagaacatgcagaaggagatcctgaacacccccctgctgactgtgcaggagggcgctgtggaggacctgatcctgacagagcctgagcctgagcacacaggcaagtgccgggtgtctggagtggtgctgcctgaggaccagctgccctgctacctgacccacaccaacccccgggtggatgaaattgtgctgaagaacctgcacctgaacagccacgtgaaggagaccacccggggcccccgctactgccccagcattgagagcaaggtgctgcgcttccccaaccggctgcaccaggtgtggctggagcctgagggcatggacagcgacctgatctacccccagggcctgtccatgaccctgcctgctgagctgcaggagaagatgatcacctgcatccggggcctggagaaggccaaggtgatccagcccggctatggagtgcagtatgactacctggacccccggcagatcacccccagcctggagacccacctggtgcagaggctcttctttgctggccagatcaatggcaccaccggctatgaggaggccgccgcccagggcgtgattgctggcatcaatgccagcctgcgggtgtccaggaagcccccatttgtggtgtccaggacagagggctacatcggcgtgctgattgatgacctgaccaccctgggcaccagcgagccctacaggatgttcaccagccgggtggagttccggctgagcctgcggccagacaatgctgacagccggctgaccctgcggggctacaaggatgctggctgtgtgtcccagcagagatatgaaagagcctgctggatgaagagcagcctggaggagggcatctctgtgctgaagagcattgagttcctgagcagcaagtggaagaagctgatccctgaggccagcatcagcaccagccgcagcctgcctgtgcgggccctggatgtgctgaagtatgaggaggtggacatggacagcctggccaaggctgtgcctgagcccctgaagaagtacaccaagtgccgggagctggccgagcggctgaagattgaggccacctatgaatctgtgctcttccaccagctgcaggagatcaagggcgtgcagcaggatgaggccctgcagctgcccaaggacctggactacctgaccatcagagatgtgtccctgagccatgaggtgcgggagaagctgcacttcagccggccccagaccatcggggccgccagccgcatccctggggtgaccccagctgccatcatcaacctgctgcgctttgtgaagaccacccagaggcggcagagcgccatgaatgaaagcagcaagacagaccagtacctgtgtgatgctgaccggctgcaggagcgggagctgtag

SEQ ID NO: 330204 - DNA, 2631 bp, Artificial Sequence
  derived and/or modified sequence
gtagacgtcctaccccgtgatattaaagcaagatggccgcgccctgcagattgtctcttgttgcgtaagtttttttgaccgtcactcgtgtcagcttcaaagtcagatagatttttctcccagcatgttctacttccgaggctgtggccgttgggtcgcggtttccttcaccaagcagcaatttccgttggcacggttgagcagtgacagcgcggcgccccggactccgcacttcgacgtgatagtcattggtggaggacatgccgggactgaggcagccaccgccgccgctcggtgcggctctcggactctgctcctcactcaccgcgtggacacgatcggtcagatgtcatgtaatccttcctttggtggcatcggaaagggacatttaatgagggaagtagatgccttggatggcctgtgttctcgcatctgtgaccagtctggtgtacattataaagtattaaaccggcgtaagggaccagctgtgtggggtctgagagctcagattgataggaaactctataaacagaacatgcagaaagaaatcttgaatacaccactgcttactgttcaggagggagctgtagaagatcttattcttacagaaccagagcctgaacacactgggaaatgccgtgtcagtggggttgttttgccagaagatcagctgccatgttacttgactcacaccaaccctagagtggatgagattgtccttaagaaccttcaccttaatagtcatgttaaagaaacgacaagaggacctcgatactgtccctccattgaatcaaaagttttgcgttttccaaaccgtctacatcaggtttggttggaacctgaaggaatggattctgaccttatctacccacaggggttatctatgacgctaccagctgagttacaagagaaaatgatcacatgcatcagaggcttggagaaagctaaagtgattcagccaggctacggtgttcagtatgattacttagatccccgtcagatcaccccttccttggagactcatttggttcaacgactcttctttgctggacagatcaatggcaccactggttatgaggaagctgcagctcaaggtgtgatagccggaatcaacgccagtcttcgggtcagtcgcaagcctccctttgtggttagccgaacagaaggttacataggagtcttgattgatgacctcactactctgggcaccagtgaaccataccgcatgtttaccagccgagtagagttccgtttgtcactgcgccctgataatgctgacagccggctcacactgcgagggtataaagacgctggctgtgtgtcccaacaacgatatgaaagagcttgttggatgaagtcttctttagaagaaggcatttctgtgttgaaatctattgagtttttgagctctaaatggaaaaaattaatcccagaggcttctataagtactagtagaagtctgcctgtcagagctctcgatgttctgaagtatgaggaagttgacatggattcattagccaaggctgttccagagcccttgaagaagtatactaaatgtagagagctggctgaaagactgaaaatagaagccacttatgaatcagtgttgttccatcaactacaagaaataaagggagttcagcaagatgaagctctccaactgccaaaagacctagattatttgactatcagggatgtgtctttgtcccatgaagttcgagagaaactacattttagtcgtccacagacgatcggggctgctagtcgcatacccggagtaacacctgccgccatcatcaatctgctgagatttgtgaagaccactcaacgaagacagtcggctatgaatgaatcatccaagactgatcaatacttatgtgatgcagacagacttcaagagagagagttatagctttcaattcataaaagatttttaaagagcatataaataatttgatcaatacaacagtatagataaaagaattatttagcacatgttaaaatagctttattaggttactatgggtttgccattaatttctgagtgggacagaaattataattgtgctttttcgtgtatatgaaaaaactagtcgtaaacaatttgtactctttctttaaggagctgtaatacaaataactttgtgcagtgttcatcaaagagagagacagtgaacctaaaactgaacctggaataaaactcaacatgcagatttgcctactcatagggactttgcctattaagtctaccaaattaaaagtcttatcattcagcgtgttttgagagttaataatcttttgcttggttatactaggctaggaagcaatatcaaagcccttaaattctcaagactaaagacttgagattatataaaattatccagaatcattcagctaatactattggaatatagtatgtagggtgaaagttgacagaaatctgtacttcttcaggaaatcctcactggtaattgttttgaacattaatgaaagccctataaaatagaaagattggaaatcaccattgtttcctattatccacagtgtggatggatacttatttggtgacctagttatgggagaattgagtaacgttagttattttatatcataccataaaaatattttctt

SEQ ID NO: 330205 - DNA, 1788 bp, Artificial Sequence
  derived and/or modified sequence
atgttctacttccggggctgcggccggtgggtggccgtgagcttcactaagcagcagttcccactggccaggctgtcctctgacagcgccgctccacgcaccccgcactttgatgtcatcgtgattgggggcgggcacgctggcactgaggccgctactgccgcggccaggtgtgggagcaggacccttctgctgactcaccgggtcgatacaatcggccaaatgagctgcaacccatcctttggcgggattggtaagggccatctgatgagggaggtcgatgcactggacggcctgtgcagtcgaatttgtgatcaaagtggagttcactataaggtgctaaatagaagaaaaggacccgccgtgtgggggcttcgggctcagatagatcgcaagctgtataagcagaatatgcaaaaagaaattctgaatacgccattgctcactgtgcaagagggagcagtggaagatctgatcctcaccgagccagaacccgaacataccgggaaatgtcgtgtgtctggggttgtgctacctgaagatcagctgccatgctatttgacccacactaacccacgcgtcgatgaaattgtgctgaagaatctgcacctcaacagtcacgtgaaagagactaccaggggacctcgctactgtccatccattgaatccaaggtattgcggttcccaaatagacttcaccaggtctggctcgagcccgaaggtatggattcagatttaatttacccacagggactgagtatgacactacccgcggagctccaagagaaaatgatcacatgtatccgcgggttggaaaaggccaaagtgatccagccagggtatggtgtccagtatgattacttagacccacgccagattaccccctcacttgaaacccatctcgtgcagagactgttttttgcagggcagatcaacggaacaaccggatatgaagaggccgcggctcaaggagttattgctggaatcaacgcctctttgcgagtgagcagaaagccaccgttcgtcgtttcacggactgagggctacattggtgtgctgattgacgatctgacaactctgggcacttctgaaccctaccgcatgtttactagcagggtggagtttcgcctgtcattacgtccagataatgccgacagccgcttaacacttcgtggctataaagatgctgggtgtgtgtcgcaacagaggtatgaaagggcctgctggatgaagtcatcattagaagagggtatatcggtcctgaagtctattgaattcttgagcagtaagtggaagaaactcatccctgaggcctccatttcaacttctagaagcctgccagttcgggccctggacgtcctgaaatacgaagaagtagatatggatagtttggccaaggccgtccctgagcccctgaagaaatacactaagtgtagagagctcgctgagaggctgaaaatcgaagcgacctacgaatccgtgctgttccaccaactgcaagaaataaagggggtgcagcaagatgaagcacttcagctgcctaaggatcttgactatttaaccattcgcgacgtatcattgtcacatgaagtccgggagaagctgcatttttcaagaccccagacgattggcgcagcctcccgcatcccaggcgttactcccgctgccattatcaacctgttgcgatttgtgaagacgacacagcggagacaatcagccatgaacgaaagctctaagactgatcagtatctatgtgatgccgatcgtctccaggagagggagctctag

SEQ ID NO: 330206 - DNA, 1788 bp, Artificial Sequence
  derived and/or modified sequence
atgttctattttcgaggctgtggcaggtgggtggccgttagttttaccaagcaacagttcccattggcacgcttaagttcagatagcgctgctcctagaactccacactttgacgtaatcgtgattggcggtggccacgctgggactgaggcagcgactgctgctgctagatgtgggagccgcactctgctgctcacccaccgcgttgacaccattggccaaatgagttgtaaccctagctttgggggaatcgggaagggtcacctgatgcgcgaggtagatgcactggacggcttgtgcagccgcatttgtgaccagtctggggtccactataaggtcctgaacagacgaaaaggccctgctgtgtggggcttgcgtgcccagatagaccgcaaactgtataagcagaacatgcagaaggaaatacttaacactccgctccttacagtgcaggagggggcagtcgaggacttgatccttaccgaacccgaacctgagcataccggtaagtgcagagtcagtggcgtggtacttccagaagaccaattgccctgttaccttacgcatactaaccctcgcgtggacgagattgtcctgaagaacttgcacttaaactctcacgtgaaagagactaccagaggcccaaggtactgtccttctattgagtctaaggtactgcggttcccaaacaggcttcaccaggtctggttggagcccgaaggcatggatagcgacctgatatatccacagggtttaagcatgaccttgcctgctgagttgcaagagaaaatgatcacctgcatcaggggacttgagaaagccaaggtgatccagcccggatatggagttcagtatgattatctagacccgaggcagatcactccatccttggagactcatctggtacagcgcctcttttttgccggacagataaatggcacaaccggatatgaggaagccgcagctcagggcgtcatagccggaattaatgcttccctgagggtatcaaggaagcctcccttcgtcgtgtctcggacagagggctatatcggcgtcctgatcgacgacctgactaccctgggcacttctgaaccgtaccggatgtttacctctagagtcgaatttcggctgtctttgcgaccggacaatgcggactcgcgactgacactgaggggctataaggacgctggctgcgtctcccagcagcggtacgagagggcctgttggatgaagtcttcactggaggaaggcatctccgtgctaaagtccatcgagttcctgtcgagcaagtggaaaaagcttatccctgaggcatcaatatctacgtctcgaagcctccccgtgagagctcttgacgtgcttaagtacgaggaggtggacatggactctctcgccaaggcagttccagaaccgcttaagaagtacactaagtgccgtgaactcgccgaacgcctgaaaattgaagcgacttacgaaagtgtgttattccaccaactacaggaaatcaagggggttcagcaggacgaagctcttcagcttcctaaggacctggactatctgacaatcagagatgtgagcctctcacacgaggtcagggagaagctgcacttctcacgccctcagacaatcggggcagcctcgaggatccctggagtcactccggctgccatcattaatctgctccggtttgtgaaaaccacccagcggaggcaaagcgctatgaatgagtcttcaaagacggatcaatatctttgcgatgccgacagacttcaggagagggaattatag

SEQ ID NO: 330207 - protein, 114 aa, Artificial Sequence
  derived and/or modified sequence
MQEINQNLAEEAGLNITHICLPPDSSEAEIIDEILKINEDTRVHGLALQISENLFSNKVLNALKPEKDVDGVTDINLGKLVRGDAHECFVSPVAKAVIELLEKSGVNLDGKKIL

SEQ ID NO: 330208 - protein, 127 aa, Artificial Sequence
  derived and/or modified sequence
MVSSGRRWLREQQHRRWRLHCLKLQPLSPVPSDIEISRGQTPKAVDVLAKEIGLLADEIEIYGKSKAKVRLSVLERLKDQADGKYVLVAGITPTPLGEGKSTVTIGLVQALTAHLNVNSFACLRQPS

SEQ ID NO: 330209 - protein, 62 aa, Artificial Sequence
  derived and/or modified sequence
MSIQWKTRQLQSKLHEADIVVLGSPKPEEIPLTWIQPGTTVLNCSHDFLSESLIIIRRMAIF

SEQ ID NO: 330210 - protein, 43 aa, Artificial Sequence
  derived and/or modified sequence
  misc_feature (1)..(1): Xaa can be any naturally occurring amino acid
XVLGSPKPEEIPLTWIQPGTTVLNCSHDFLSESLIIIRRMAIF

SEQ ID NO: 330211 - DNA, 291 bp, Artificial Sequence
  derived and/or modified sequence
aacatccagctggtggccgacggctgctgcaacctgcagaagcagatccagatcacccagctgttcggcgtgcccgtggtggtggccctgaacgtgttcaagaccgacaccagagccgagatcgacctggtgtgcgagctggccaagagagccggcgccttcgacgccgtgccctgctaccactggagcgtgggcggcaagggcagcgtggacctggccagagccgtgagagaggccgccagcaagagaagcagattccagttcctgtacgacgtgcagcccttcagctag

SEQ ID NO: 330212 - DNA, 291 bp, Artificial Sequence
  derived and/or modified sequence
aatattcagctggtcgcagacggatgttgtaatctccagaaacagattcagataactcagctgtttggtgtacccgtggtggtggccctcaacgtgtttaaaacggacacccgcgccgagattgaccttgtctgcgaactcgccaaaagagctggggcttttgatgctgttccgtgctaccactggagcgtgggtggtaagggcagtgtcgatctggcaagggcggttagagaagctgccagtaaacgctcacggttccagttcttatatgatgtgcagcccttctcatag

SEQ ID NO: 330213 - DNA, 291 bp, Artificial Sequence
  derived and/or modified sequence
aacatccagctggtggctgatggctgctgcaacctgcagaagcagatccagatcacccagctgtttggagtgcctgtggtggtggccctgaatgtgttcaagacagacaccagggctgagattgacctggtgtgtgagctggccaagagagctggggcctttgatgctgtgccctgctaccactggagcgtgggcggcaaaggatctgtggacctggcccgggctgtgcgggaggccgccagcaagaggagccgcttccagttcctgtatgatgtgcagcccttctcctag

SEQ ID NO: 330214 - DNA, 291 bp, Artificial Sequence
  derived and/or modified sequence
aacatccagctggtggccgacggctgctgcaacctgcagaagcagatacagataactcaactcttcggcgtgccagtagttgtagcactaaacgtgtttaagaccgatacaagggcagaaatagaccttgtatgcgagctggctaaaagagctggggcatttgatgctgtgccttgctatcattggtccgttgggggaaaaggcagtgtcgacctagcacgggcggtgcgggaagccgcatccaagcgctcccggttccagtttctttacgacgtgcagcccttcagttag

SEQ ID NO: 330215 - DNA, 606 bp, Artificial Sequence
  derived and/or modified sequence
aacatccagctggtggcagacggctgctgtaacctccagaagcaaattcagatcactcagctctttggggttcccgttgtggtggctctgaatgtcttcaagaccgacacccgcgctgagattgacttggtgtgtgagcttgcaaagcgggctggtgcctttgatgcagtcccctgctatcactggtccgttggtggaaaaggatcggtggacttggctcgggctgtgagagaggctgcgagtaaaagaagccgattccagttcctgtatgatgttcagccattctcttgatcccagtgggggctggatgaaggaagagcaaaacaaaccacgaagacagcctggagccgcagccagctctgctgacttctgaacttcacgctctcactgcccagatggccaggggtgtttcctcctctgctggtcttttttaaggcaggatgtttgttgttattgttgttgtttttctggttggttcttaagaaattattttctacatcttgaaaatgccagctggaacctacaccagttgttggtggggtgtgagaactatcctttacatggacttggagcatttgcaactagagcctccacattgaaataaac

SEQ ID NO: 330216 - DNA, 291 bp, Artificial Sequence
  derived and/or modified sequence
aacattcaattggtcgctgatggctgttgtaacctgcagaagcagatccaaattacacagctcttcggggtgcctgtcgttgttgctttaaacgtctttaaaacagacactcgggcagagattgacctggtctgcgagctggcaaaacgtgcaggggctttcgacgcggtcccgtgctaccactggtcagtgggaggcaaaggtagcgtcgatctcgcacgagcagtgcgggaggccgcaagcaaacgctcgcgctttcaatttctctatgacgttcagcctttcagctag

SEQ ID NO: 330217 - DNA, 1107 bp, Artificial Sequence
  derived and/or modified sequence
atgaaggaccagttcggcaacagcatcatcaacacccccctgaagagaagaaaggtgttcagccaggagccccccgacgccctggccctgagctgccagagcagcttcgacagcgtgatcctgaactgcagaagcatcagagtgggcaccctgttcagactgctgatcgagcccgtgatcttctgcctggacttcatcaagatccagctggacgagcccgaccacgaccccgtggagatcatcctgaacaccagcgacctgaccaagtgcgagtggtgcaacgtgagaaagctgcccgtggtgttcctgcaggccatccccgccgtgtaccagaagctgagcatccagctgcagatgaacaaggaggacaaggtgtggaacgactgcaagggcgtgaacaagctgaccaacctggaggagcagtacatcatcctgatcttccagaacggcctggacccccccgccaacatggtgttcgagagcatcatcaacgagatcggcatcaagaacaacatcagcaacttcttcgccaagatccccttcgaggaggccaacggcagactggtggcctgcaccagaacctacgaggagagcatcaagggcagctgcggccagaaggagaacaagatcaagaccgtgagcttcgagagcaagatccagctgagaagcaagcaggagttccagttcttcgacgaggaggaggagaccggcgagaaccacaccatcttcatcggccccgtggagaagctgatcgtgtacccccccccccccgccaagggcggcatcagcgtgaccaacgaggacctgcactgcctgaacgagggcgagttcctgaacgacgtgatcatcgacttctacctgaagtacctggtgctggagaagctgaagaaggaggacgccgacagaatccacatcttcagcagcttcttctacaagagactgaaccagagagagagaagaaaccacgagaccaccaacctgagcatccagcagaagagacacggcagagtgaagacctggaccagacacgtggacatcttcgagaaggacttcatcttcgtgcccctgaacgaggcctggctgaagcagaaccagaccaagctgtag

SEQ ID NO: 330218 - DNA, 1107 bp, Artificial Sequence
  derived and/or modified sequence
atgaaagaccagtttggaaactccattataaacactcctctcaaacggcggaaggtgttttcccaagagccaccagatgccctggcacttagttgtcaatcgtcctttgactctgtgatcctcaactgccgatccatcagagttgggactctgttccgcctgctgattgagcctgtaattttttgcttggactttatcaaaattcaactggatgagccagatcacgaccccgtggagataattctcaatacttccgacttgacaaaatgcgagtggtgtaacgtgaggaaactccccgttgtattccttcaggcaatacccgccgtgtaccaaaagctgagcattcagcttcagatgaacaaggaagacaaggtgtggaacgactgtaagggagttaacaagctgaccaatctggaagaacagtatataatacttatttttcagaatgggctggatcctcctgccaatatggtctttgaatccataatcaatgagataggcatcaagaataacatctcaaattttttcgctaaaatcccatttgaggaggcaaatgggcggctggtggcatgcacccgcacttatgaggagtccatcaagggaagctgtggacagaaggagaacaaaatcaagaccgtctctttcgaaagcaaaatccagctgcgctcgaagcaggaatttcagttttttgacgaggaggaggagactggagagaatcacaccatttttatcggccccgtggagaaactaatcgtgtaccctcccccccccgctaaaggcggcatcagcgtaaccaacgaagacttacactgcttgaatgagggagaattcttgaatgacgttattattgatttctatctgaagtatctggtgctcgaaaaactgaaaaaggaggacgccgatagaatccatattttctcatcgttcttctataaaaggctaaatcagagggaaagacggaaccatgagacgactaatctctcaatccaacagaaacgacatggacgcgtgaagacgtggaccagacacgtcgatattttcgaaaaggacttcatcttcgttccactgaatgaggcatggctgaaacaaaatcagactaagctttag

SEQ ID NO: 330219 - DNA, 1107 bp, Artificial Sequence
  derived and/or modified sequence
atgaaggaccagtttggaaacagcatcatcaacacccccctgaagaggaggaaggtgttcagccaggagcccccagatgccctggccctgagctgccagagcagctttgacagcgtcatcctgaactgccgcagcatccgggtgggcaccctcttccggctgctgattgagcccgtcatcttctgcctggacttcatcaagatccagctggatgagccagaccatgaccctgtggagatcatcctgaacaccagtgacctgaccaagtgtgagtggtgcaatgtgaggaagctgcctgtggtgttcctgcaggccatcccagctgtgtaccagaagctgagcatccagctgcagatgaacaaggaggacaaggtgtggaatgactgcaagggcgtgaacaagctgaccaacctggaggagcagtacatcatcctgatcttccagaatggcctggaccccccagccaacatggtgtttgagagcatcatcaatgagatcggcatcaagaacaacatcagcaacttctttgccaagatcccctttgaggaggccaacggccgcctggtggcctgcaccaggacctatgaggagagcatcaagggcagctgtggccagaaggagaacaagatcaagacagtgtcctttgagagcaagatccagctgcggagcaagcaggagttccagttctttgatgaggaggaggagaccggggagaaccacaccatcttcatcggccctgtggagaagctgattgtgtacccacctcctccagccaagggcggcatctctgtgaccaatgaagacctgcactgcctgaatgaaggagagttcctgaatgatgtgatcatcgacttctacctgaagtacctggtgctggagaagctgaagaaggaggatgctgaccgcatccacatcttcagcagcttcttctacaagaggctgaaccagcgggagaggaggaaccacgagaccaccaacctgagcatccagcagaagagacatggccgggtgaagacctggaccaggcatgtggacatctttgagaaggacttcatctttgtgcccctgaatgaggcctggctgaagcagaaccagaccaagctgtag

SEQ ID NO: 330220 - DNA, 1107 bp, Artificial Sequence
  derived and/or modified sequence
atgaaggaccagttcggcaacagcatcatcaacacccccctgaagcggcgcaaggtctttagccaagagccaccagacgctctggcactgtcctgtcagagttcatttgactcggtgatactgaattgtcgtagtatacgcgtgggcacgctattccggctcttgatcgaaccagttatcttctgcctggactttatcaaaatccagctggacgaaccagatcatgatcccgtcgaaataattcttaacaccagcgatctgaccaagtgcgagtggtgcaatgttcggaagctgccagtggtttttcttcaggccatccctgcagtgtatcaaaagctttcgattcaactgcagatgaataaagaagacaaagtgtggaatgactgcaagggcgtaaacaaacttaccaatctggaagagcagtacattatattaatattccaaaatgggcttgatcctcctgcaaacatggtgtttgagtccatcattaacgagatcgggattaagaacaacatttccaacttctttgctaagattccattcgaggaagccaatggcagactcgttgcttgtacacggacctacgaagagtctatcaaaggctcatgtggccaaaaagagaataaaatcaagaccgtgtctttcgagtctaagattcagctgcggagcaagcaggagttccagttcttcgatgaagaggaagagaccggagagaatcacacaatcttcattgggcccgtggagaaactgatcgtttaccccccaccccccgccaagggcgggatcagtgtgacaaatgaggatctgcactgcctcaacgagggagagttccttaacgacgtcatcattgacttctacctgaaatatctggtgctcgagaagctgaagaaagaagatgcagaccgtattcacatattctcatcgttcttttacaaacggcttaaccagagagagcgcagaaaccacgagactacaaacctttccattcagcagaaaagacacggacgggtgaaaacatggacacgacacgtcgacatttttgagaaggattttatcttcgtgcccctgaacgaagcatggctcaaacagaatcagaccaagctttag

SEQ ID NO: 330221 - DNA, 1107 bp, Artificial Sequence
  derived and/or modified sequence
atgaaggatcaatttggcaatagcatcataaatacccctttaaagcggagaaaggttttctcgcaagagccccctgacgccctggccctgtcctgccagtcatcctttgatagtgtgattctcaattgcagatcaataagagtcggcacactcttccggttgttaatagaaccagtcatcttttgtctcgattttatcaagattcagcttgatgaaccagatcatgaccctgttgagatcatactaaacacctctgatttaaccaaatgtgaatggtgcaacgtgagaaagttacccgttgtgtttctgcaggctatcccagccgtataccagaaattgtcaatccagcttcagatgaataaagaagataaagtttggaatgactgcaaaggggtaaataagctgacaaaccttgaagaacagtacattatcttgattttccagaatggtctggaccctcctgctaatatggtatttgaaagcatcattaatgagatcggcatcaaaaataacatctctaatttctttgccaaaataccattcgaggaggctaacgggagactcgtggcctgtacccgcacctatgaggagtcaattaagggtagctgcgggcagaaagagaacaaaattaagaccgtgagcttcgaaagtaagatccagctgagatcaaaacaagaattccagtttttcgacgaagaagaagagacaggagagaatcacacaatctttatagggcctgtggagaaactgatcgtgtatcccccaccacccgctaaaggaggcatctccgtgaccaatgaggacctccactgtcttaacgagggtgaattcctgaacgatgtgatcatcgatttctacctgaagtacctcgtactcgagaagcttaaaaaagaggacgctgaccgcattcacatatttagttcattcttctataagagactgaatcagagggaacggcgaaaccacgaaactacaaacctgagtatccagcaaaagcgtcacggcagagtgaagacctggactaggcacgtggacattttcgaaaaagacttcatattcgtgccactaaacgaggcatggttgaaacagaaccagaccaaactctag

SEQ ID NO: 330222 - DNA, 6192 bp, Artificial Sequence
  derived and/or modified sequence
cgaccgacgcgaggcggtggcagaggagacccacccctgtccacatggacagtcgcaaaggcctccgctgatgcattcacgcctgggcggggtgggcggacggccgtagcggcggcggctgcagaacgagctaggggcctgggggcgcctgacggtcgcagagacctcgccgctccggcgcggcgggtgcggccattttacggcctgggacgaagggaggcgtgtttgtgtgctcgctttcattctcctttcttgggaacccacggctgggggaagtttctcaggcagcctgggtgggcggtggatggggagtcgtgggccgagaggaaccgggcccgggaagcgccgtcgtcgtcgtcgccggtcgcgttcccccggagaggcctgagaagctcgggccgcgggcctcgctgcccgccagcccgcggacaggcccgggcgcgcctggcctgcctttgtataggcccgtctgaacgtgggagcgcagcccgcctgacggctgagcccgaggcccgcaaccctgcggcgtctaccctcctccggcgcggcccctcatcccggcgagcacggcggcggtgtgggccatggattaagaaggaggcggcgtgggaggaggaagatggcggccggcaagagcggcggtagcgcaggggagattacttttctggaagctttggctagatcagagtctaagagagatggaggttttaaaaataattggagctttgatcatgaagaagaaagtgaaggagatacagataaagatgggacaaatctgctcagtgtggatgaagatgaggattctgaaacctcaaaaggaaaaaagttaaatcgtcgatctgaaattgttgctaatagctctggtgaattcatcttgaagacatatgtaagacgaaacaagtctgaaagttttaaaactttgaaaggcaacccaattggacttaacatgttgagcaacaataagaaattgagtgaaaatacgcaaaatacgtcattatgttctggaactgtagttcatggtagacgttttcatcatgctcatgcacagataccagtagtaaaaacagcagcccaaagtaatcagattctgaaagaatacccacctcatgtccaaaaagttgaaattaatcctgtaaggttaagtcggctccaaggtgttgtcattttgtccagtgatgatgatgatgacaacgacagaactaacagaagagaaagcatatctcctcagcctgctgattcagcatgttcttcccctgcaccatccactggaaaagtagaagcagcgctaaatgaaaatacttgcagagcagagcgtgaactacgaagcattccagaagactcagagttaaatacagttacattgccaagaaaagcaagaatgaaagaccagtttggcaattctattatcaacacacctctgaaacgtcgtaaagtgttttctcaagaacctccagatgctttagctttaagctgccaaagttcctttgacagtgtcattttaaactgtcgaagtatacgagtaggaacactcttccggctgttaatagagcctgtaattgtaattataaagattttttttattacccacaagaaaccagaccatgatcctgtagagattatattaaatacctctgatctaactaaatgtgaatggtgtaatgtccgaaaattacctgtagtgtttcttcaagcaattccagcagtttatcaaaagctgagcatccaactgcaaatgaataaggaggataaagtttggaatgattgtaaaggagtaaataaattaacaaatttagaagaacaatatataattttaatttttcaaaatggccttgatcctccggcaaatatggtatttgaaagtatcattaatgaaattggtataaagaataacatctccaatttttttgcgaaaattccctttgaagaagctaatggcagacttgttgcctgtacaagaacctatgaagagagcatcaaaggaagttgtgggcaaaaggaaaacaaaattaaaactgtatcatttgaatctaaaatacaacttagaagcaaacaagaatttcagttttttgatgaagaagaagaaactggagaaaaccacaccatcttcattggcccagtagaaaagttgatagtatatccaccacctccagctaagggaggcatctctgttaccaatgaggacctgcactgtctaaatgaaggagaatttttaaatgatgttattatagacttttatttgaaatacttggtgcttgaaaaactgaagaaggaagacgctgaccgaattcatatattcagttcttttttctataaacgccttaatcagagagagaggagaaatcatgaaacaactaatctgtcaatacagcaaaaacggcatgggagagtaaaaacatggacccggcacgtagatatttttgagaaggattttatttttgtaccccttaatgaagctgcacactggtttttggctgttgtttgtttccccggtttggaaaaaccaaagtatgaacctaatcctcattaccatgaaaatgctgtcatacagaaatgttcaactgtagaggacagttgtatttcttcttcagccagtgaaatggagagttgttcacaaaactcttctgccaagcctgtaattaagaagatgctaaacaaaaaacattgcatagctgtaattgattccaatcctgggcaggaagaaagtgaccctcgttataagagaaacatatgcagtgtaaaatacagtgtgaaaaaaataaatcatactgcgagtgaaaatgaagaattcaataaaggagaatctacatcccagaaagttgctgataggactaaaagtgagaatggcctacagaatgaaagtttaagttccacacatcatacagatggcttaagcaaaatcagactaaactatagcgatgaatcacctgaagctggtaaaatgcttgaagatgaactcgtcgacttctcagaagatcaggataaccaggatgatagcagtgacgatggattcctcgctgatgacaactgcagttcagaaataggacagtggcatttaaagcctactatctgtaaacaaccttgtatcctacttatggactcactccgaggcccttctcggtcaaatgttgtcaaaattttaagagagtatttagaagtggaatgggaagttaaaaaaggaagcaaaagaagtttttccaaagatgttatgaagggctctaatccaaaagtaccacagcaaaacaacttcagtgactgtggtgtatatgtattgcagtatgtagagagcttttttgagaatccaattctcagttttgaactacctatgaatttggcaaactggtttcctccaccaagaatgagaacaaaaagagaagaaatccgaaacataattctgaagctacaggaagatcagagcaaagagaaaagaaagcataaggacacttactcaacagaagcacctttaggcgaaggaacagaacaatatgtcaatagtatctcagattgaccatttctgttacttgtcatttctactttcagaaactaaatgactttcaaatttgggtatagacaataaagaactgaagtgctcactactcagtgatttggaaattttgatgcttgtataaatgtcagataattaatttccaaaggcgtatgtattaagtaaaagtctgtaaatatgttaatgaggccaatttttccagcatttataattatttttttcacttgttaggaagcttttgttatgtattttctgttaatagtacctaaaattgcaacttctaaacacaaataaaaagaaaatatttataggaggaaatgattaatttgatattctttagtgaacttgtttaattcctcagtgggtgtgacatatttcatgggaatattcaaatatctatggtaatattttgaccctttatatttgttctaaaataagtcaaaatgtgaaaataatattaaatctaagatattttgaactaagcatctttatatgcttgtgtaacaggaacaaagtaacagcctttcaattcatatactgccttgtgttcagtgaacccaagaaatgtaataaatatttgtaattttacacaaatatttaagaggaaagagtattaagagcaattcaaaaaaagtaaccttatactactaaaaaaaaaattcttgcatatattatcatcaaatgcatttttgaagacatcaaagactcaggttaaaactattttggtaagtgcagcttgaatttcaaatatcccgtgttacctttctctattacagcttaaagtatgctacaatctgtgtcatatagttaattgataagcatttttaatctgtgtaaacacaggaatttaaataggaatttactatttttttataaagcttttgctattttttcattgctcattttgttcttattattttgataaagtatcagactttttgcttgagttcttcagtgtaaattattttttacatgtaaaagtactgtattcaaccagttgcataatacagcaaaaatctttgaattcccctttaaaataactaaaatttgatggtttccatgacagatttatagcacatatagggatcttgcatgtatctgcagaaacttcattatttttcaaatgaaatggtgtatacttctttcaaatgaactttgagacttgaaacatattttagtcattttttgttaaatattgaatttttaaatacacatatatcaaaaatagttgagaataaaaagaaagcctaatcatcagcaattattttatttttaatttggccatctctgacattgcagtcaatatcttagggtattttcttgaatttaataaagtcccatgggtgggttcagggtgaatgggagtattaacaacaaccaaaaaatatctattgagacacagtagagtctcagtaagagaaatattaaaatgtaagaaaggtcaccattagtgatatcaactgtagtttgttactttgaactatatttctgattaactctttatagtaataacttagagctgttagctcagatatcttaattagctcatatgaaaaacaagtttaattttattatttactgaacatggcaaaatgcttttcaatctataataaaactgggataaaaaattgaagttgttttttttaaaacctaatagcaataagcaaaattggcatacataatttttttaatgaactatattttgtcagaatctgaaggtactgaaaaactattctaaaatgcctacttgtttttgcattaatttgtaatgcttacattttgcacccttagataatgtttgataagataaaaatataatttatcccttgtaccaactcaagtcaatcagattttaacatgaaaaatatagattaatgtatgtcagctttctagaggtagaatactcagctatttgatggcatttttcccaccccatgtgaaattttatttttggaagttatgctagtgacattgcaatatatattgaaatcttcggaggctgccaggttgagcttcaaaactagacttgagaatctttcgtgtatatgcacattcacttgataattgtgtattctatgtagtttaaagtgggatcaagccttttaaaatgtgttattagtacttagaagttgtaaaacagaacttatagaggtttgttactagacactgaaactgcatgacaagtatctggtgtcttaactaattagatagatctgttgtattggttttcttgttggatagaataacagttaatcatttttagaagagttttagattacttgccataaaatttgtatgtctcagctcttgttggtttaggagcagaagtggtgtttagtcccttcccgttaatgttgctgtgctacttcagacagctgaaaacttaatggtattatttcaagttcacataaccctaaaaaaggttttctttgtgtagtaacttgtgcttaaacttttagtcaattaaatgtaggaggttttatttgaaaacataaaatgattctctaaattacatcttgttttaagccaccaaaatgaatgcagtaatttttctttaaaaaaatgatctctgaaaactgtgagacaatgtaaaaagaataagttttaattcccccaaaatcaaaaattgtacttaaaatctcagacaattcactgaacaggaataataaagaacatattttaatatataa

SEQ ID NO: 330223 - DNA, 2043 bp, Artificial Sequence
  derived and/or modified sequence
tacgaagcattccagaagactcagagttaaatacagttacattgccaagaaaagcaagaatgaaagaccagtttggcaattctattatcaacacacctctgaaacgtcgtaaagtgttttctcaagaacctccagatgctttagctttaagctgccaaagttcctttgacagtgtcattttaaactgtcgaagtatacgagtaggaacactcttccggctgttaatagagcctgtaattttttgtttagattttatcaagatacagctagacgaaccagaccatgatcctgtagagattatattaaatacctctgatctaactaaatgtgaatggtgtaatgtccgaaaattacctgtagtgtttcttcaagcaattccagcagtttatcaaaagctgagcatccaactgcaaatgaataaggaggataaagtttggaatgattgtaaaggagtaaataaattaacaaatttagaagaacaatatataattttaatttttcaaaatggccttgatcctccggcaaatatggtatttgaaagtatcattaatgaaattggtataaagaataacatctccaatttttttgcgaaaattccctttgaagaagctaatggcagacttgttgcctgtacaagaacctatgaagagagcatcaaaggaagttgtgggcaaaaggaaaacaaaattaaaactgtatcatttgaatctaaaatacaacttagaagcaaacaagaatttcagttttttgatgaagaagaagaaactggagaaaaccacaccatcttcattggcccagtagaaaagttgatagtatatccaccacctccagctaagggaggcatctctgttaccaatgaggacctgcactgtctaaatgaaggagaatttttaaatgatgttattatagacttttatttgaaatacttggtgcttgaaaaactgaagaaggaagacgctgaccgaattcatatattcagttcttttttctataaacgccttaatcagagagagaggagaaatcatgaaacaactaatctgtcaatacagcaaaaacggcatgggagagtaaaaacatggacccggcacgtagatatttttgagaaggattttatttttgtaccccttaatgaagcatggcttaagcaaaatcagactaaactatagcgatgaatcacctgaagctggtaaaatgcttgaagatgaactcgtcgacttctcagaagatcaggataaccaggatgatagcagtgacgatggattcctcgctgatgacaactgcagttcagaaataggacagtggcatttaaagcctactatctgtaaacaaccttgtatcctacttatggactcactccgaggcccttctcggtcaaatgttgtcaaaattttaagagagtatttagaagtggaatgggaagttaaaaaaggaagcaaaagaagtttttccaaagatgttatgaagggctctaatccaaaagtaccacagcaaaacaacttcagtgactgtggtgtatatgtattgcagtatgtagagagcttttttgagaatccaattctcagttttgaactacctatgaatttggcaaactggtttcctccaccaagaatgagaacaaaaagagaagaaatccgaaacataattctgaagctacaggaagatcagagcaaagagaaaagaaagcataaggacacttactcaacagaagcacctttaggcgaaggaacagaacaatatgtcaatagtatctcagattgaccatttctgttacttgtcatttctactttcagaaactaaatgactttcaaatttgggtatagacaataaagaactgaagtgctcactactcagtgatttggaaattttgatgcttgtataaatgtcagataattaatttccaaaggcgtatgtattaagtaaaagtctgtaaatatgttaatgaggccaatttttccagcatttataattatttttttcacttgttaggaagcttttgttatgtattttctgttaatagtacctaaaattgcaacttctaaacac

SEQ ID NO: 330224 - protein, 401 aa, Artificial Sequence
  derived and/or modified sequence
MKCDFNCNHVHSGLKLVKPDDIGRLVSYTPAYLEGSCKDCIKDYERLSCIGSPIVSPRIVQLETESKRLHNKENQHVQQTLNSTNEIEALETSRLYEDSGYSSFSLQSGLSEHEEGSLLEENFGDSLQSCLLQIQSPDQYPNKNLLPVLHFEKVVCSTLKKNAKRNPKVDREMLKEIIARGNFRLQNIIGRKMGLECVDILSELFRRGLRHVLATILAQLSDMDLINVSKVSTTWKKILEDDKGAFQLYSKAIQRVTENNNKFSPHASTREYVMFRTPLASVQKSAAQTSLKKDAQTKLSNQGDQKGSTYSRHNEFSEVAKTLKKNESLKACIRCNSPAKYDCYLQRATCKREGCGFDYCTKCLCNYHTTKDCSDGKLLKASCKIGPLPGTKKSKKNLRRL

SEQ ID NO: 330225 - DNA, 2221 bp, Artificial Sequence
  derived and/or modified sequence
gtaaatcctagagaggcgggctaagctggactggggggagggtccgtcttccggaaagtctggattcccggacgagccgagttgctgctcaccgaactcccgttcgagagatgatcgaagaaagtcggctaccatttgtacccatcaaagatctccagatggaagccagcgctgaatttgggctgagattaggacttgcaggaggccggtccagaagacggcggaaggaatcttggcgggcgcacgcatgcgtgatagaccctccacacgtgtggccgggccgcggcctccccgtgctcggaggtcccgcccccggccgtagcatctttccggacgtggggagccggttgtaaagaagaaagttctaccctttctgtcaaaatgaagtgtgattttaattgtaaccatgttcattccggacttaaactggtaaaacctgatgacattggaagactagtttcctacacccctgcatatttggaaggttcctgtaaagactgcattaaagactatgaaaggctgtcatgtattgggtcaccgattgtgagccctaggattgtacaacttgaaactgaaagcaagcgcttgcataacaaggaaaatcaacatgtgcaacagacacttaatagtacaaatgaaatagaagcactagagaccagtagactttatgaagacagtggctattcctcattttctctacaaagtggcctcagtgaacatgaagaaggtagcctcctggaggagaatttcggtgacagtctacaatcctgcctgctacaaatacaaagcccagaccaatatcccaacaaaaacttgctgccagttcttcattttgaaaaagtggtttgttcaacattaaaaaagaatgcaaaacgaaatcctaaagtagatcgggagatgctgaaggaaattatagccagaggaaattttagactgcagaatataattggcagaaaaatgggcctagaatgtgtagatattctcagcgaactctttcgaaggggactcagacatgtcttagcaactattttagcacaactcagtgacatggacttaatcaatgtgtctaaagtgagcacaacttggaagaagatcctagaagatgataagggggcattccagttgtacagtaaagcaatacaaagagttaccgaaaacaacaataaattttcacctcatgcttcaaccagagaatatgttatgttcagaaccccactggcttctgttcagaaatcagcagcccagacttctctcaaaaaagatgctcaaaccaagttatccaatcaaggtgatcagaaaggttctacttatagtcgacacaatgaattctctgaggttgccaagacattgaaaaagaacgaaagcctcaaagcctgtattcgctgtaattcacctgcaaaatatgattgctatttacaacgggcaacctgcaaacgagaaggctgtggatttgattattgtacgaagtgtctctgtaattatcatactactaaagactgttcagatggcaagctcctcaaagccagttgtaaaataggtcccctgcctggtacaaagaaaagcaaaaagaatttacgaagattgtgatctcttattaaatcaattgttactgatcatgaatgttagttagaaaatgttaggttttaacttaaaaaaaattgtattgtgattttcaattttatgttgaaatcggtgtagtatcctgaggtttttttccccccagaagataaagaggatagacaacctcttaaaatatttttacaatttaatgagaaaaagtttaaaattctcaatacaaatcaaacaatttaaatattttaagaaaaaaggaaaagtagatagtgatactgagggtaaaaaaaaattgattcaattttatggtaaaggaaacccatgcaattttacctagacagtcttaaatatgtctggttttccatctgttagcatttcagacattttatgttcctcttactcaattgataccaacagaaatatcaacttctggagtctattaaatgtgttgtcacctttctaaagctttttttcattgtgtgtatttcccaagaaagtatcctttgtaaaaacttgcttgttttccttatttctgaaatctgttttaatatttttgtatacatgtaaatatttctgtattttttatatgtcaaagaatatgtctcttgtatgtacatataaaaataaattttgctcaataaaattgtaa

SEQ ID NO: 330226 - protein, 181 aa, Artificial Sequence
  derived and/or modified sequence
MRSPVRDLARNDGEESTDRTPLLPGAPRAEAAPVCCSARYNLAILAFFGFFIVYALRVNLSVALVDMVDSNTTLEDNRTSKACPEHSAPIKVHHNQTGKKYQWDAETQGWILGSFFYGYIITQIPGGYVASKIGGKMLLGFGILGTAVLTLFTPIAADLGVGPLIVLRALEGLGEEHSLGQ

SEQ ID NO: 330227 - DNA, 1129 bp, Artificial Sequence
  derived and/or modified sequence
cagccagctcggcccgggggcttcgggctgtcgggccggcgctcccttctctgccaggtggcgagtacacctgctcacgtaggcgtcatgaggtctccggttcgagacctggcccggaacgatggcgaggagagcacggaccgcacgcctcttctaccgggcgccccacgggccgaagccgctccagtgtgctgctctgctcgttacaacttagcaattttggccttttttggtttcttcattgtgtatgcattacgtgtgaatctgagtgttgcgttagtggatatggtagattcaaatacaactttagaagataatagaacttccaaggcgtgtccagagcattctgctcccataaaagttcatcataatcaaacgggtaagaagtaccaatgggatgcagaaactcaaggatggattctcggttcctttttttatggctacatcatcacacagattcctggaggatatgttgccagcaaaataggggggaaaatgctgctaggatttgggatccttggcactgctgtcctcaccctgttcactcccattgctgcagatttaggagttggaccactcattgtactcagagcactagaaggactaggagaggagcacagcttgggacagtaatttctcttcctctttctggaataatttgctactatatgaattggacttatgtcttctacttttttggtactattggaatattttggtttcttttgtggatctggttagttagtgacacaccacaaaaacacaagagaatttcccattatgaaaaggaatacattctttcatcattaagaaatcagctttcttcacagaagtcagtgccgtgggtacccattttaaaatccctgccactttgggctatcgtagttgcacacttttcttacaactggactttttatactttattgacattattgcctacttatatgaaggagatcctaaggttcaatgttcaagagaatgggtttttatcttcattgccttatttaggctcttggttatgtatgatcctgtctggtcaagctgctgacaatttaagggcaaaatggaatttttcaactttatgtgttcgcagaatttttagccttataggtatgctggtatcctcctg

SEQ ID NO: 330228 - DNA, 546 bp, Artificial Sequence
  derived and/or modified sequence
atgaggtcccccgttcgcgatcttgcaaggaacgacggggaggagagtaccgacaggaccccacttttgcctggcgcgccaagagccgaggcggcacccgtgtgttgctctgcccgttacaacttggccatcctggcttttttcggctttttcattgtgtacgccctccgcgtgaatctctcagtcgcccttgtggatatggtcgattccaataccactttagaagataaccgtacctcaaaagcttgcccggaacactccgccccaatcaaagttcatcacaaccaaacaggcaagaaataccagtgggatgccgaaactcagggctggattctcggaagctttttctacggatatattatcacccaaattcctggcgggtacgtggcaagtaaaatcggtggcaaaatgctgctgggcttcggtattcttggcacggctgtcctgacattgttcacacctatcgcagcagacttaggggtggggccgctcattgtgcttagggccttggagggactgggcgaggaacactccctgggccagtag

SEQ ID NO: 330229 - DNA, 546 bp, Artificial Sequence
  derived and/or modified sequence
atgaggagccctgtgcgggacctggccagaaatgatggagaggagagcacagacaggacccccctgctgcccggggcccccagggctgaggccgcccctgtgtgctgcagcgcccgctacaacctggccatcctggccttcttcggcttcttcatcgtgtatgccctgcgggtgaacctgtctgtggccctggtggacatggtggacagcaacaccaccctggaggacaacagaaccagcaaggcctgcccagagcacagcgcccccatcaaggtgcaccacaaccagacaggcaagaagtaccagtgggatgctgagacccagggctggatcctgggcagcttcttctacggctacatcatcacccagatccctgggggctacgtggccagcaagattggaggcaagatgctgctgggcttcggcatcctgggcacagctgtgctgaccctcttcacccccatcgctgctgacctgggcgtgggccccctgattgtgctgcgggccctggagggcctgggggaggagcacagcctgggccagtag

SEQ ID NO: 330230 - DNA, 546 bp, Artificial Sequence
  derived and/or modified sequence
atgcggagccccgtgcgggacctggcccggaacgacggcgaggagtctacagatcgaaccccactgcttcctggtgcgccgagagccgaagccgctcccgtctgctgttcggccaggtataatctcgccatccttgctttctttgggtttttcattgtgtacgccctcagggttaatctttcagtcgcactggtggatatggtggattctaacaccactctagaagacaaccgcacttctaaagcatgccctgagcatagcgcccccatcaaggtccatcacaatcagactggcaaaaagtaccagtgggatgctgagacacagggatggatcttgggaagcttcttctacggctacatcattacccagattcccggaggctatgtagcatcaaaaatagggggcaagatgctgctgggctttggtattttaggaaccgctgtgttaacattgttcacccctatcgccgccgatctcggcgtggggccacttatcgtccttagagctctggaagggcttggcgaggaacattccctgggacagtag

SEQ ID NO: 330231 - DNA, 546 bp, Artificial Sequence
  derived and/or modified sequence
atgcggagccctgtaagagatctcgcacggaacgacggtgaggagagcaccgaccgcacaccccttctgccgggagccccacgtgctgaggccgctccagtgtgctgttctgcaaggtacaacttggcaatcttggccttttttggattttttatcgtgtacgcattgcgtgttaatctcagcgtggcgttggtcgatatggtggattcaaacaccaccttagaggataacaggaccagcaaagcctgtccagaacactcagcacctattaaagtgcatcataatcagactggcaagaaatatcagtgggatgctgaaacgcagggttggatactggggtcttttttttatggatatatcattacccagatacccggaggttacgtggcctccaaaatcggaggtaaaatgctgctgggatttgggattcttggtaccgcggtcttaacactctttacgcccatcgccgctgaccttggcgtcggcccacttatcgtcctgagagccctagagggactgggagaagagcattctctgggccagtag

SEQ ID NO: 330232 - DNA, 546 bp, Artificial Sequence
  derived and/or modified sequence
atgagaagccccgtgagagacctggccagaaacgacggcgaggagagcaccgacagaacccccctgctgcccggcgcccccagagccgaggccgcccccgtgtgctgcagcgccagatacaacctggccatcctggccttcttcggcttcttcatcgtgtacgccctgagagtgaacctgagcgtggccctggtggacatggtggacagcaacaccaccctggaggacaacagaaccagcaaggcctgccccgagcacagcgcccccatcaaggtgcaccacaaccagaccggcaagaagtaccagtgggacgccgagacccagggctggatcctgggcagcttcttctacggctacatcatcacccagatccccggcggctacgtggccagcaagatcggcggcaagatgctgctgggcttcggcatcctgggcaccgccgtgctgaccctgttcacccccatcgccgccgacctgggcgtgggccccctgatcgtgctgagagccctggagggcctgggcgaggagcacagcctgggccagtag

SEQ ID NO: 330233 - protein, 210 aa, Artificial Sequence
  derived and/or modified sequence
MRKRQQSQNEGTPAVSQAPGNQRPNNTCCFCWCCCCSCSCLTVRNEERGENAGRPTHTTKMESIQVLEECQNPTAEEVLSWSQNFDKMMKAPAGRNLFREFLRTEYSEENLLFWLACEDLKKEQNKKVIEEKARMIYEDYISILSPKEVSLDSRVREVINRNLLDPNPHMYEDAQLQIYTLMHRDSFPRFLNSQIYKSFVESTAGSSSES

SEQ ID NO: 330234 - DNA, 1636 bp, Artificial Sequence
  derived and/or modified sequence
ctctcctcgcccgctgggtgctgaagttgggcggatggcagcaaaccggctccgctagaggaccgagccgcccagccccgctcccccggacccatcggcgcgctgcccacacctccaggcgaccggccaactgggtcctgaagtagctgaaatgcgaaaaaggcagcagtcccaaaatgaaggaacacctgccgtgtctcaagctcctggaaaccagaggcccaacaacacctgttgcttttgttggtgctgttgttgcagctgctcctgcctcactgtgaggaatgaagaaagaggggaaaatgcgggaagacccacacacactacaaaaatggagagtatccaggtcctagaggaatgccaaaaccccactgcagaggaagtcttgtcctggtctcaaaattttgacaagatgatgaaggccccagcaggaagaaaccttttcagagagttcctccgaacagaatacagtgaagagaacctacttttctggcttgcttgtgaagacttaaagaaggagcagaacaaaaaagtaattgaagaaaaggctaggatgatatatgaagattacatttctatactatcaccaaaagaggtcagtcttgattctcgagttagagaggtgatcaatagaaatctgttggatcccaatcctcacatgtatgaagatgcccaacttcagatatatactttaatgcacagagattcttttccaaggtttttgaactctcaaatttataagtcatttgttgaaagtactgctggctcttcttctgaatcttaatgttcatttaaaaacaatcattttggagggctgagatgggaaataaaagtagttaaataacatcagaaactgagttcctggagaactacagtttagcattcctcaggctactgtgaaaacacaaccgttatggtctttgtctccatttttatcaaggttttccatggttaagtttggagaaaataccacacaaaacaatgaattgccaaattgtttgttttattcaagactcattctacttgcaagcaaagtgtatttgtagtcctatgaacagtctcctcgtgtatctccagagactgcatgtgcaaagtaaaatgcttcatttgccacatagttgttgtaatatttaatccagtagcataacttatatctgtatttaaggacttttgtgcaatatggtcttaagaaataattgccaaaaaaatcggccatggtttgcattttttaacataatctaagacagaaaaaaagcaatttttactatgtaacaatggtattcaacattctatatactgtgtttagtacactaattttgaagccaatatttctgtacatgaaaaagagctatttatctctgtttgttggaaaatcctaatggggattcctctggttgttcactgccaaaactgtggcattttcattacaggagagtttactatgctaaaagcaaaaaacaaaaaaaaaaaaaaagggaagaaggaaaaaagcacaaaacaatttgaagatatcctatctcaatgacaaatcaaaagagtgatattgcttttaactgtaatagaagaaaatgaatttatgtatatatcagatgtccaatactgtaattaatttattaaagactggctctccagtttt

SEQ ID NO: 330235 - DNA, 1510 bp, Artificial Sequence
  derived and/or modified sequence
ccaactgggtcctgaagtagctgaaatgcgaaaaaggcagcagtcccaaaatgaaggaacacctgccgtgtctcaagctcctggaaaccagaggcccaacaacacctgttgcttttgttggtgctgttgttgcagctgctcctgcctcactgtgaggaatgaagaaagaggggaaaatgcgggaagacccacacacactacaaaaatggagagtatccaggtcctagaggaatgccaaaaccccactgcagaggaagtcttgtcctggtctcaaaattttgacaagatgatgaaggccccagcaggaagaaaccttttcagagagttcctccgaacagaatacagtgaagagaacctacttttctggcttgcttgtgaagacttaaagaaggagcagaacaaaaaagtaattgaagaaaaggctaggatgatatatgaagattacatttctatactatcaccaaaagaggtcagtcttgattctcgagttagagaggtgatcaatagaaatctgttggatcccaatcctcacatgtatgaagatgcccaacttcagatatatactttaatgcacagagattcttttccaaggtttttgaactctcaaatttataagtcatttgttgaaagtactgctggctcttcttctgaatcttaatgttcatttaaaaacaatcattttggagggctgagatgggaaataaaagtagttaaataacatcagaaactgagttcctggagaactacagtttagcattcctcaggctactgtgaaaacacaaccgttatggtctttgtctccatttttatcaaggttttccatggttaagtttggagaaaataccacacaaaacaatgaattgccaaattgtttgttttattcaagactcattctacttgcaagcaaagtgtatttgtagtcctatgaacagtctcctcgtgtatctccagagactgcatgtgcaaagtaaaatgcttcatttgccacatagttgttgtaatatttaatccagtagcataacttatatctgtatttaaggacttttgtgcaatatggtcttaagaaataattgccaaaaaaatcggccatggtttgcattttttaacataatctaagacagaaaaaaagcaatttttactatgtaacaatggtattcaacattctatatactgtgtttagtacactaattttgaagccaatatttctgtacatgaaaaagagctatttatctctgtttgttggaaaatcctaatggggattcctctggttgttcactgccaaaactgtggcattttcattacaggagagtttactatgctaaaagcaaaaaacaaaaaaaaaaaaaaagggaagaaggaaaaaagcacaaaacaatttgaagatatcctatctcaatgacaaatcaaaagagtgatattgcttttaactgtaatagaagaaaatgaatttatgtatatatcagatgtccaatactgtaattaatttattaaagactggctctccagtttt

SEQ ID NO: 330236 - DNA, 633 bp, Artificial Sequence
  derived and/or modified sequence
atgagaaagagacagcagagccagaacgagggcacccccgccgtgagccaggcccccggcaaccagagacccaacaacacctgctgcttctgctggtgctgctgctgcagctgcagctgcctgaccgtgagaaacgaggagagaggcgagaacgccggcagacccacccacaccaccaagatggagagcatccaggtgctggaggagtgccagaaccccaccgccgaggaggtgctgagctggagccagaacttcgacaagatgatgaaggcccccgccggcagaaacctgttcagagagttcctgagaaccgagtacagcgaggagaacctgctgttctggctggcctgcgaggacctgaagaaggagcagaacaagaaggtgatcgaggagaaggccagaatgatctacgaggactacatcagcatcctgagccccaaggaggtgagcctggacagcagagtgagagaggtgatcaacagaaacctgctggaccccaacccccacatgtacgaggacgcccagctgcagatctacaccctgatgcacagagacagcttccccagattcctgaacagccagatctacaagagcttcgtggagagcaccgccggcagcagcagcgagagctag

SEQ ID NO: 330237 - DNA, 633 bp, Artificial Sequence
  derived and/or modified sequence
atgcgcaaacgccaacagagtcagaatgaagggaccccagcagtaagccaggctccggggaaccagagacctaataacacatgttgtttctgctggtgctgctgttgttcctgctcatgcctcaccgtacgaaacgaggagcggggagagaatgcgggaagacccacgcacacaaccaaaatggagtcgatccaggtgctcgaggaatgccaaaatcccaccgcagaagaggttctgtcttggagccagaatttcgacaagatgatgaaagcccctgcaggacgaaatttgtttcgcgagttcttacgtactgagtattctgaggagaatctcctcttttggctcgcttgcgaagacctgaaaaaggagcagaataaaaaggtgatcgaagagaaggcacggatgatttacgaggactacatcagcattctaagccccaaggaagtttccctggacagtagagtccgggaggtgataaacagaaacctgctggatccaaacccccatatgtatgaagacgcccagcttcaaatatacactcttatgcaccgagactcatttcccagattcttgaattcacagatctataagagcttcgtggaatccaccgcaggctcttcttccgaaagctag

SEQ ID NO: 330238 - DNA, 633 bp, Artificial Sequence
  derived and/or modified sequence
atgcggaagagacaacagtcacagaatgagggtacaccagctgtgtcccaggcccctggaaaccagcgcccgaataacacatgttgtttttgttggtgctgctgctgttcatgctcctgcttgacagtacggaacgaggagcgcggcgaaaatgcaggacgaccaacacatacaaccaagatggagagcatccaagtgctggaggaatgtcagaaccctacagcggaggaagtgttgagttggtctcaaaattttgacaagatgatgaaggcgcccgctggccggaatctcttcagggaatttctccgtactgagtactctgaagagaacttgctgttttggctagcctgcgaggacctgaaaaaggaacagaacaaaaaggtgatcgaggaaaaagctagaatgatttatgaggattacatcagtattctatcacccaaggaagtttccttggattcacgtgtgcgggaggtgatcaatagaaatctgctggaccccaatccccacatgtatgaggatgcccaactgcagatctataccctgatgcacagagattctttcccacggtttctcaacagccagatctataaaagcttcgtggagtccactgcggggagtagttccgagagctag

SEQ ID NO: 330239 - DNA, 633 bp, Artificial Sequence
  derived and/or modified sequence
atgaggaagaggcagcagagccagaatgaaggcaccccagctgtgtcccaggcccctggcaaccagaggcccaacaacacctgctgcttctgctggtgctgctgctgcagctgcagctgcctgactgtgagaaatgaggagcggggggagaatgccggccggcccacccacaccaccaagatggagagcatccaggtgctggaggagtgccagaaccccacagctgaggaggtgctgtcctggagccagaactttgacaagatgatgaaggccccagctggaagaaacctcttccgggagttcctgaggacagagtacagcgaggagaacctgctcttctggctggcctgtgaggacctgaagaaggagcagaacaagaaggtgattgaggagaaggccaggatgatctatgaggactacatcagcatcctgagccccaaggaggtgtccctggacagccgggtgcgggaggtgatcaacagaaacctgctggaccccaacccccacatgtatgaagatgcccagctgcagatctacaccctgatgcaccgggacagcttcccccgcttcctgaacagccagatctacaagagctttgtggagagcacagctggcagcagcagcgagagctag

SEQ ID NO: 330240 - DNA, 633 bp, Artificial Sequence
  derived and/or modified sequence
atgcggaagcggcagcagagccagaacgagggcacccccgccgtgtcacaggctcccggcaatcagagacctaataatacttgttgcttctgttggtgttgttgctgtagttgctcctgcctcaccgtgcggaacgaggagcggggtgagaatgcgggcagaccgacacacactacaaagatggaatcaatccaggttctcgaagaatgccagaaccctaccgccgaagaggtgctttcctggtcccaaaacttcgataaaatgatgaaggcgcctgcaggacgaaatttgttcagggagtttctgagaaccgagtactctgaagaaaaccttctgttctggctggcttgcgaagacctgaagaaagagcagaataagaaagtgatcgaggagaaggcacgcatgatatatgaggactacatctcaatcttgtctccaaaagaggtttctttagattcacgagtgcgggaagtgatcaacaggaacctgcttgatcctaatcctcacatgtatgaggacgcgcagctgcagatttatacactaatgcaccgggacagcttccctaggttcctcaacagtcagatctacaagtcctttgtggaatctaccgcgggttcctcttccgagtcctag

SEQ ID NO: 330241 - DNA, 633 bp, Artificial Sequence
  derived and/or modified sequence
atgcggaagcggcagcagagccagaacgagggcacccccgccgtgtctcaggcacctggaaatcaaagacctaacaatacttgttgcttctgttggtgttgctgttgttcctgttcttgccttacagtgcggaacgaggagagaggcgagaatgccggccgccctactcacaccacgaagatggagtcaatccaggtccttgaggaatgtcaaaacccaactgccgaggaggtcctgagctggtctcaaaattttgacaagatgatgaaagcccctgcgggccgcaacttgtttagggagttcctcaggaccgaatattctgaggagaatctgcttttctggcttgcgtgcgaagaccttaagaaagagcagaacaaaaaagtcatcgaggaaaaggcccggatgatctatgaggattacattagcatcctgagcccaaaagaagtaagcctcgacagcagggtcagggaggtcataaaccggaacttgttagaccctaatccccacatgtatgaggacgctcagctccagatttataccctgatgcacagagattcttttccccggttcctgaactcacagatctataagtcatttgtggagagcaccgctggtagctcgtctgagtcatag

SEQ ID NO: 330242 - DNA, 633 bp, Artificial Sequence
  derived and/or modified sequence
atgagaaagcggcagcaatctcaaaatgagggtaccccagccgtgtcccaagctcccggaaaccagcggccaaataatacttgttgcttctgttggtgctgctgctgcagctgttcttgcctaaccgtccgcaatgaggagcgcggagagaatgccggaagacctacacacaccaccaaaatggagtctatccaggtccttgaggagtgtcaaaacccaacagcagaggaggtactgtcttggtcccagaatttcgacaagatgatgaaggcaccagccggtagaaatctgtttcgagagtttctccggactgagtattctgaagaaaacctgttgttctggctagcatgcgaggacttaaagaaagaacagaataaaaaggttatcgaagaaaaggcaagaatgatttatgaggattatatctcaatcctgtctcctaaagaagtgagtttggactctcgggtccgagaagtcattaacaggaacttactggacccaaacccacacatgtacgaagatgcgcaactgcaaatttatacgctcatgcatagggactcgtttccgagatttcttaactctcaaatatataaatcgtttgttgaaagcaccgctggtagcagctccgaatcatag

SEQ ID NO: 330243 - DNA, 633 bp, Artificial Sequence
  derived and/or modified sequence
atgaggaagcggcagcagtcccagaacgaaggcacaccagcggtgagccaggccccagggaaccagagaccaaataacacatgctgtttttgttggtgttgttgttgctcttgcagctgcctgacagtcagaaacgaggagaggggtgagaacgccggacgccctacccacactactaagatggagtccatccaagtgctcgaagagtgtcaaaaccccactgcagaggaagtcctgtcttggagccagaattttgacaaaatgatgaaggcccctgctgggaggaacctgttccgggaattcctgaggaccgaatatagtgaagaaaatttactgttctggctcgcgtgcgaagacctcaagaaagaacagaataagaaagtgatagaagaaaaagcaagaatgatatacgaggactatataagcatcctcagtcccaaagaggtgagcttggactctcgcgtgcgtgaagtgatcaataggaacttacttgacccaaatcctcacatgtatgaggacgctcagttacagatctacaccctgatgcatcgagattccttccccagattcctaaactctcagatatacaagagctttgtggagagtacagcaggcagttccagtgaaagctag

SEQ ID NO: 330244 - protein, 200 aa, Artificial Sequence
  derived and/or modified sequence
  misc_feature (1)..(1): Xaa can be any naturally occurring amino acid
XHMLSKVGMWDFDIFLFDRLTNGNSLVTLLCHLFNTHGLIHHFKLDMVTLHRFLVMVQEDYHSQNPYHNAVHAADVTQAMHCYLKEPKLASFLTPLDIMLGLLAAAAHDVDHPGVNQPFLIKTNHHLANLYQVREPNLEPATVWSIALGPVLKPESCPWRKPCFRVLEVQRRMKHNLCPQKFVQTQMLKMSKIQANLIPV

SEQ ID NO: 330245 - protein, 723 aa, Artificial Sequence
  derived and/or modified sequence
MGSRCALALAVLSALLCQVWSSGVFELKLQEFVNKKGLLGNRNCCRGGAGPPPCACRTFFRVCLKHYQASVSPEPPCTYGSAVTPVLGVDSFSLPDGGGADSAFSNPIRFPFGFTWPGTFSLIIEALHTDSPDDLATENPERLISRLATQRHLTVGEEWSQDLHSSGRTDLKYSYRFVCDEHYYGEGCSVFCRPRDDAFGHFTCGERGEKVCNPGWKGPYCTEPICLPGCDEQHGFCDKPGECKCRVGWQGRYCDECIRYPGCLHGTCQQPWQCNCQEGWGGLFCNQDLNYCTHHKPCKNGATCTNTGQGSYTCSCRPGYTGATCELGIDECDPSPCKNGGSCTDLENSYSCTCPPGFYGKICELSAMTCADGPCFNGGRCSDSPDGGYSCRCPVGYSGFNCEKKIDYCSSSPCSNGAKCVDLGDAYLCRCQAGFSGRHCDDNVDDCASSPCANGGTCRDGVNDFSCTCPPGYTGRNCSAPVSRCEHAPCHNGATCHERGHRYVCECARGYGGPNCQFLLPELPPGPAVVDLTEKLEGQGGPFPWVAVCAGVILVLMLLLGCAAVVVCVRLRLQKHRPPADPCRGETETMNNLANCQREKDISVSIIGATQIKNTNKKADFHGDHSADKNGFKARYPAVDYNLVQDLKGDDTAVRDAHSKRDTKCQPQGSSGEEKGTPTTLRGGEASERKRPDSGCSTSKDTKYQSVYVISEEKDECVIATEV

SEQ ID NO: 330246 - DNA, 2172 bp, Artificial Sequence
  derived and/or modified sequence
atggggtccagatgcgctctcgccctggccgtgttgtccgccctgttgtgccaagtgtggtcgtctggggtgttcgagcttaagttgcaggagttcgtgaataagaagggactcttaggaaacaggaattgttgcagggggggagctggccctccaccttgcgcctgtaggacttttttccgggtgtgtctcaaacattatcaggcatcagtatccccggagcccccttgtacttacggcagtgccgtgacacctgtgctgggagttgactctttttctctgccggatggcggtggcgcagatagtgctttctctaatcctattagattccccttcggatttacctggccaggaactttctctcttattattgaggcactacacacggattccccagacgatctcgccacggaaaatcccgagcgattaatttcccggctggcgacacagagacatctgacagtgggggaagagtggtcacaggatctgcactccagtggtcgcactgatctcaaatatagttacaggtttgtgtgcgacgaacactactatggagaaggatgtagcgttttttgccgccctagagacgacgccttcggtcatttcacctgcggtgagcggggagagaaagtttgtaatccaggttggaaaggcccttactgcaccgagcccatttgcctgcccggatgcgacgaacagcatggcttctgcgataagcctggcgagtgtaagtgccgggtgggatggcaggggcgatactgtgacgaatgcatcaggtatccaggatgtctccatgggacctgtcagcagccttggcagtgtaactgtcaggaaggctggggcggtcttttttgcaatcaggatttaaattactgtacgcaccataaaccttgcaaaaatggagccacttgtacgaacactggacaaggaagctatacgtgcagctgcagaccaggctacactggggctacctgcgaactaggaatcgacgagtgcgacccctctccctgtaagaatggtggctcctgcacagacctcgaaaactcctacagctgtacctgtccacctggattttacggcaagatttgtgagttaagtgccatgacatgtgccgatggaccgtgttttaatggaggcaggtgcagtgattcgcccgacggcggttacagctgcaggtgcccagtgggatacagcggatttaactgcgaaaagaagattgattactgtagcagcagtccatgcagcaacggcgcaaaatgtgtggatttgggcgatgcatatctgtgccgctgccaggcaggttttagcggcaggcactgtgacgacaacgtggacgactgcgcctcctccccgtgtgctaacggcggaacctgtagagacggggtcaatgacttctcatgcacctgcccccctggttatacgggacggaattgcagtgcaccagtgtcccgctgtgagcacgctccatgtcacaatggcgctacctgtcacgagagagggcataggtatgtatgtgagtgtgcgcgaggttacgggggaccgaactgccagtttctcctgcctgaactacctcccggacccgcagttgtagacctgactgagaagctcgagggtcaaggcggtcccttcccatgggtggcggtttgtgccggagtgattctcgttctgatgctgcttcttgggtgtgccgcagttgtggtatgcgtcagacttaggctgcaaaagcataggccgccagccgacccctgccgcggagaaaccgaaactatgaacaatttagcaaattgccagcgtgagaaggatattagcgtctccatcattggagcaacacagatcaaaaacaccaacaagaaggccgacttccacggagaccactccgctgacaaaaatgggttcaaagctagatacccagccgtcgattacaatttggtgcaggatttgaaaggggacgatactgcagtgcgcgatgcccactccaaaagagataccaaatgccaaccccaaggctccagcggggaggagaaggggactccaacgactttacgaggcggagaggcatccgaacggaaacgccctgacagcgggtgttccacatcaaaggataccaagtatcaaagcgtctacgttatctccgaggagaaggacgagtgcgtcatagcgacagaagtttag

SEQ ID NO: 330247 - DNA, 2172 bp, Artificial Sequence
  derived and/or modified sequence
atgggctcccgctgtgctctggcgcttgctgtcctctcagccctgctctgtcaagtgtggtcctcaggtgtgtttgaattgaagctgcaggagttcgttaataaaaaggggctcctcggcaatcgaaattgctgtagaggcggggcagggccccctccatgtgcctgcagaacttttttccgagtttgcctcaagcactatcaggcctctgtctccccagaacctccttgtacctacggaagcgccgttacaccagtgctgggcgtggactcattcagcctgcctgatggcgggggagccgattcagctttctctaatcccatccggtttccctttggcttcacatggcccggcactttcagtctgatcatagaggcacttcataccgactctcccgatgatctggcaaccgagaaccctgagagactgatttctagattggccacccagaggcaccttaccgttggcgaggaatggagccaagatctacacagcagtggcagaactgatctaaaatattcataccggttcgtgtgcgatgaacactattatggagagggttgctccgtgttctgtcgccctagggacgacgcatttggccacttcacctgtggcgagaggggcgagaaggtgtgtaaccccggctggaaaggaccatactgtaccgagcctatctgcctcccaggatgtgatgagcagcacggtttctgtgacaagccgggggagtgtaagtgccgggttgggtggcagggcagatactgtgatgagtgtatcaggtatccaggttgcctccatgggacatgtcagcaaccatggcagtgcaactgtcaggagggctgggggggcctgttctgcaaccaggacctgaattactgtacacatcacaaaccatgcaaaaatggagccacatgtacaaacacgggccagggaagctatacctgttcatgtcgacccggctatactggcgccacctgcgagttgggcatcgacgagtgtgatccgtcgccttgtaaaaacggagggagttgtaccgacctagaaaacagctattcatgcacctgccctcccggattttatgggaaaatttgtgaactgtccgccatgacttgtgctgatggtccgtgttttaacggagggcggtgttctgattctccagatggcggttattcatgtaggtgcccggtgggctattccggattcaactgtgaaaagaagattgattattgtagttcatccccatgttccaacggagcaaagtgcgtggatctgggcgacgcctatctttgccgatgccaggccggattctccggacgacattgtgacgataacgtcgatgactgtgcctcgagtccctgcgccaatggcggaacttgtagggatggggtgaatgacttctcgtgtacttgtcccccaggttataccggaagaaactgcagcgctcctgtttctcgttgtgagcacgctccctgccacaacggtgccacttgtcacgagcggggccaccgttatgtgtgcgaatgtgctcgcggctacggagggccaaattgtcagtttctgctgcctgagctgccccccggacctgccgtggtcgacctcacagagaagctcgaaggacaaggcggcccatttccgtgggtggcagtctgtgctggcgtgatccttgtcttgatgctcctgctcggctgtgccgctgtcgtcgtctgtgttaggcttcgactgcagaaacaccgtccacccgcagatccttgcagaggcgaaaccgagacaatgaataacttggccaactgccagcgggaaaaggatatatctgtttccatcataggcgcgacgcagataaaaaataccaacaaaaaggcagactttcatggcgaccacagcgccgacaaaaacgggtttaaagcaaggtatccagctgtggactataatcttgtgcaggacttgaaaggtgacgataccgctgtccgcgatgcacactccaagcgagatactaagtgccagccgcagggatcctcaggtgaagaaaagggcacgcctaccacgctgcgggggggtgaggcatccgaaaggaaaaggcccgactccggttgctctacaagcaaagacaccaagtaccaatcggtgtacgtcatcagtgaagaaaaagacgagtgcgtgatagctacagaagtgtag

SEQ ID NO: 330248 - DNA, 2172 bp, Artificial Sequence
  derived and/or modified sequence
atgggtagccgctgcgcattggctttggctgtgctgagcgcactgctctgccaggtttggtcatccggagtctttgaattaaagctgcaagaattcgtaaacaagaaaggtctgttaggtaatcgtaactgctgccgcgggggagccggacctcctccatgcgcttgtcggacttttttccgtgtttgcctcaaacactaccaagcatccgttagcccagagccaccgtgtacttacggcagcgctgtgacccctgtgctcggtgtagatagtttttctctccctgatggtggaggggcggacagcgccttcagtaaccctataagatttccattcggttttacatggcccggtaccttctccctcatcattgaagcacttcatacagactccccagacgatctggccaccgagaaccccgaaaggcttattagcagattagccacccagcggcacctcaccgttggtgaagaatggtcccaggatctccacagttccgggagaacggacttaaagtattcatatcgtttcgtgtgtgatgaacattattatggcgaagggtgttctgtgttctgcagaccaagagacgacgcctttggccatttcacctgcggcgaaagaggagaaaaagtatgcaacccgggctggaaaggcccatattgtaccgaaccaatttgtttaccgggttgtgacgagcagcatggcttttgcgacaaaccgggggagtgtaagtgccgcgtgggttggcaaggaagatattgcgacgaatgtatcagatatcccggatgtctccacggaacctgccaacagccgtggcaatgtaattgccaagaaggttggggcggtctgttctgtaatcaagatttgaactattgcacacaccacaagccctgcaagaatggagctacttgtacaaatacaggccaaggcagctacacttgctcttgtagacccgggtatactggcgcgacttgtgaacttggcatcgacgaatgtgatccctccccatgcaagaacggcgggagctgcacagacctcgaaaatagctactcctgtacttgtccccccgggttttacggcaaaatctgcgagttaagcgccatgacatgcgctgatggcccttgttttaacgggggacggtgctccgattccccagacggaggatacagctgtcgatgtcccgtaggctactctggtttcaactgtgagaagaagattgattattgttcctctagtccatgctcgaacggcgcaaagtgtgtggatctgggagatgcctacctgtgccgctgtcaggccggctttagcggacgccactgtgatgacaatgtggacgattgtgctagttccccttgcgccaacggcggaacttgcagagacggcgtgaacgatttttcttgcacttgcccccccggatacacaggacgaaactgttccgctcccgtgtcccgttgcgaacacgctccttgccataatggcgcgacttgtcatgaacgtggccaccgctatgtttgcgaatgcgcccgaggctatggcggccccaactgtcagtttctgcttccagaactacccccaggtccggccgtggtggaccttaccgaaaagctggaaggtcagggaggtcctttcccatgggtggccgtctgcgcaggtgttatcttggtattaatgttgttactaggctgtgccgccgttgttgtgtgcgtgcgccttcgactccagaaacaccgccctcctgccgatccctgcagaggcgaaacagagactatgaataaccttgcaaattgtcagcgcgaaaaggacatttcagtttccataataggcgccacacagatcaaaaacactaacaaaaaggccgatttccacggagatcactctgccgacaagaacgggtttaaggccaggtatccagccgtcgactacaacctagtgcaggatctcaaaggagacgatacagccgtacgggacgcacatagcaaacgagatacgaagtgtcaaccacaggggtcaagcggcgaagagaaggggacaccgacgacactgcgcggcggagaggcttcagaacggaagcgaccagactcaggatgttctaccagcaaagatacgaagtaccagtccgtttatgtaatcagcgaagaaaaagatgagtgtgtcatcgcaaccgaggtttag

SEQ ID NO: 330249 - DNA, 2172 bp, Artificial Sequence
  derived and/or modified sequence
atgggcagcagatgcgccctggccctggccgtgctgagcgccctgctgtgccaggtgtggagcagcggcgtgttcgagctgaagctgcaggagttcgtgaacaagaagggcctgctgggcaacagaaactgctgcagaggcggcgccggcccccccccctgcgcctgcagaaccttcttcagagtgtgcctgaagcactaccaggccagcgtgagccccgagcccccctgcacctacggcagcgccgtgacccccgtgctgggcgtggacagcttcagcctgcccgacggcggcggcgccgacagcgccttcagcaaccccatcagattccccttcggcttcacctggcccggcaccttcagcctgatcatcgaggccctgcacaccgacagccccgacgacctggccaccgagaaccccgagagactgatcagcagactggccacccagagacacctgaccgtgggcgaggagtggagccaggacctgcacagcagcggcagaaccgacctgaagtacagctacagattcgtgtgcgacgagcactactacggcgagggctgcagcgtgttctgcagacccagagacgacgccttcggccacttcacctgcggcgagagaggcgagaaggtgtgcaaccccggctggaagggcccctactgcaccgagcccatctgcctgcccggctgcgacgagcagcacggcttctgcgacaagcccggcgagtgcaagtgcagagtgggctggcagggcagatactgcgacgagtgcatcagataccccggctgcctgcacggcacctgccagcagccctggcagtgcaactgccaggagggctggggcggcctgttctgcaaccaggacctgaactactgcacccaccacaagccctgcaagaacggcgccacctgcaccaacaccggccagggcagctacacctgcagctgcagacccggctacaccggcgccacctgcgagctgggcatcgacgagtgcgaccccagcccctgcaagaacggcggcagctgcaccgacctggagaacagctacagctgcacctgcccccccggcttctacggcaagatctgcgagctgagcgccatgacctgcgccgacggcccctgcttcaacggcggcagatgcagcgacagccccgacggcggctacagctgcagatgccccgtgggctacagcggcttcaactgcgagaagaagatcgactactgcagcagcagcccctgcagcaacggcgccaagtgcgtggacctgggcgacgcctacctgtgcagatgccaggccggcttcagcggcagacactgcgacgacaacgtggacgactgcgccagcagcccctgcgccaacggcggcacctgcagagacggcgtgaacgacttcagctgcacctgcccccccggctacaccggcagaaactgcagcgcccccgtgagcagatgcgagcacgccccctgccacaacggcgccacctgccacgagagaggccacagatacgtgtgcgagtgcgccagaggctacggcggccccaactgccagttcctgctgcccgagctgccccccggccccgccgtggtggacctgaccgagaagctggagggccagggcggccccttcccctgggtggccgtgtgcgccggcgtgatcctggtgctgatgctgctgctgggctgcgccgccgtggtggtgtgcgtgagactgagactgcagaagcacagaccccccgccgacccctgcagaggcgagaccgagaccatgaacaacctggccaactgccagagagagaaggacatcagcgtgagcatcatcggcgccacccagatcaagaacaccaacaagaaggccgacttccacggcgaccacagcgccgacaagaacggcttcaaggccagataccccgccgtggactacaacctggtgcaggacctgaagggcgacgacaccgccgtgagagacgcccacagcaagagagacaccaagtgccagccccagggcagcagcggcgaggagaagggcacccccaccaccctgagaggcggcgaggccagcgagagaaagagacccgacagcggctgcagcaccagcaaggacaccaagtaccagagcgtgtacgtgatcagcgaggagaaggacgagtgcgtgatcgccaccgaggtgtag

SEQ ID NO: 330250 - DNA, 2172 bp, Artificial Sequence
  derived and/or modified sequence
atggggtcccggtgcgccctggctctcgctgttcttagcgccttgttatgtcaggtgtggtcgagcggcgtctttgagctaaaactgcaagagtttgtaaacaaaaagggattgctgggaaacagaaactgttgtcgtggaggggctggtccacctccatgtgcatgccgtacattctttagggtctgccttaagcactaccaagctagtgtttcccccgaacctccctgtacttacgggagtgcggtgacaccagtcttgggggtggactccttctccctacccgatggcgggggtgctgacagcgcattctccaaccctattaggtttccctttggctttacttggcccgggacttttagtctgatcatcgaggccctgcacactgattctccggatgatctggctactgaaaacccagagagactgatttcaaggctggcaacccagcggcacctgacagtcggcgaggaatggtcccaggacctgcattcctcaggccgcaccgaccttaaatactcctatagatttgtgtgcgacgagcattactatggtgaaggctgttcagtcttctgccgccccagagatgatgcgtttggacactttacatgtggcgagaggggagaaaaggtttgcaaccctggttggaaaggcccttactgcaccgaacctatttgcttacctggttgtgacgagcagcatggtttctgtgacaagccaggagagtgcaaatgcagagtagggtggcaggggagatactgcgatgagtgtattcggtatccgggttgtctgcacggaacatgtcagcagccgtggcagtgcaactgtcaagaaggatggggaggccttttttgtaatcaggatttgaattactgtactcatcacaagccatgcaaaaacggcgcaacctgcacaaatacaggtcagggatcctacacttgctcttgcaggccaggatacaccggggctacctgtgaactaggtatcgatgagtgcgaccctagcccttgtaagaatgggggctcttgcactgatctcgagaactcatactcatgtacatgcccacccggcttctacgggaaaatttgcgaactctcggcaatgacatgcgccgatggcccatgttttaatggaggccgctgcagcgactctcccgatggcggctactcgtgtcggtgtcccgtggggtatagtgggttcaactgtgaaaaaaaaattgactactgctcatcttctccttgcagtaatggagccaaatgtgtggacctaggggatgcctatctctgcaggtgtcaggcggggttttccggaagacactgcgatgacaacgtggacgattgcgctagttctccatgtgctaacgggggcacgtgtcgcgacggagtgaacgacttttcctgcacgtgccctccgggctataccgggcgtaactgtagtgctccagtgtcacgctgtgagcatgctccatgccacaatggcgcaacgtgtcacgaaagaggacatcgatacgtctgcgagtgtgctagaggctacgggggacccaactgccaatttctactgccagagcttcctcccggcccagccgtggtagacctaacagaaaagttggaggggcaagggggccctttcccatgggtggctgtttgtgccggggtgattctggttctcatgctgttacttggatgtgctgctgttgttgtgtgcgtcagactccgtttgcaaaagcataggccacctgccgatccatgcaggggggagactgaaaccatgaacaatctcgctaattgtcagagagaaaaagacatttccgtatccatcatcggagctacccagataaaaaacacaaacaagaaggctgactttcacggagaccattccgctgacaaaaatggattcaaagctagatacccagccgtggactacaacctggtccaggacctaaaaggtgatgatactgccgtgcgtgatgctcactccaagcgggataccaaatgtcagccccaaggctctagcggcgaagagaaaggcacccctaccacactaagaggtggcgaggcgtccgagcgcaaacgcccagacagcggctgcagcaccagcaaggacactaaataccagtctgtgtatgtcatatccgaggaaaaggatgaatgtgtgatcgccaccgaagtgtag

SEQ ID NO: 330251 - DNA, 3174 bp, Artificial Sequence
  derived and/or modified sequence
aaaccaggaagccggcgaccctcacctcctcgggggctgggaggaaggaggaaaacgaaagtcgccgccgccgcgctgtcccccgagagctgcctttcctcgggcatccctggggctgccgcgggacctcgcagggcggatataaagaaccgcggccttgggaagaggcggagaccggcttttaaagaaagaagtcctgggtcctgcggtctggggcgaggcaagggcgcttttctgcccacgctccccgtggcccatcgatcccccgcgcgtccgccgctgttctaaggagagaagtgggggccccccaggctcgcgcgtggagcgaagcagcatgggcagtcggtgcgcgctggccctggcggtgctctcggccttgctgtgtcaggtctggagctctggggtgttcgaactgaagctgcaggagttcgtcaacaagaaggggctgctggggaaccgcaactgctgccgcgggggcgcggggccaccgccgtgcgcctgccggaccttcttccgcgtgtgcctcaagcactaccaggccagcgtgtcccccgagccgccctgcacctacggcagcgccgtcacccccgtgctgggcgtcgactccttcagtctgcccgacggcgggggcgccgactccgcgttcagcaaccccatccgcttccccttcggcttcacctggccgggcaccttctctctgattattgaagctctccacacagattctcctgatgacctcgcaacagaaaacccagaaagactcatcagccgcctggccacccagaggcacctgacggtgggcgaggagtggtcccaggacctgcacagcagcggccgcacggacctcaagtactcctaccgcttcgtgtgtgacgaacactactacggagagggctgctccgttttctgccgtccccgggacgatgccttcggccacttcacctgtggggagcgtggggagaaagtgtgcaaccctggctggaaagggccctactgcacagagccgatctgcctgcctggatgtgatgagcagcatggattttgtgacaaaccaggggaatgcaagtgcagagtgggctggcagggccggtactgtgacgagtgtatccgctatccaggctgtctccatggcacctgccagcagccctggcagtgcaactgccaggaaggctgggggggccttttctgcaaccaggacctgaactactgcacacaccataagccctgcaagaatggagccacctgcaccaacacgggccaggggagctacacttgctcttgccggcctgggtacacaggtgccacctgcgagctggggattgacgagtgtgaccccagcccttgtaagaacggagggagctgcacggatctcgagaacagctactcctgtacctgcccacccggcttctacggcaaaatctgtgaattgagtgccatgacctgtgcggacggcccttgctttaacgggggtcggtgctcagacagccccgatggagggtacagctgccgctgccccgtgggctactccggcttcaactgtgagaagaaaattgactactgcagctcttcaccctgttctaatggtgccaagtgtgtggacctcggtgatgcctacctgtgccgctgccaggccggcttctcggggaggcactgtgacgacaacgtggacgactgcgcctcctccccgtgcgccaacgggggcacctgccgggatggcgtgaacgacttctcctgcacctgcccgcctggctacacgggcaggaactgcagtgcccccgtcagcaggtgcgagcacgcaccctgccacaatggggccacctgccacgagaggggccaccgctatgtgtgcgagtgtgcccgaggctacgggggtcccaactgccagttcctgctccccgagctgcccccgggcccagcggtggtggacctcactgagaagctagagggccagggcgggccattcccctgggtggccgtgtgcgccggggtcatccttgtcctcatgctgctgctgggctgtgccgctgtggtggtctgcgtccggctgaggctgcagaagcaccggcccccagccgacccctgccggggggagacggagaccatgaacaacctggccaactgccagcgtgagaaggacatctcagtcagcatcatcggggccacgcagatcaagaacaccaacaagaaggcggacttccacggggaccacagcgccgacaagaatggcttcaaggcccgctacccagcggtggactataacctcgtgcaggacctcaagggtgacgacaccgccgtcagggacgcgcacagcaagcgtgacaccaagtgccagccccagggctcctcaggggaggagaaggggaccccgaccacactcaggggtggagaagcatctgaaagaaaaaggccggactcgggctgttcaacttcaaaagacaccaagtaccagtcggtgtacgtcatatccgaggagaaggatgagtgcgtcatagcaactgaggtgtaaaatggaagtgagatggcaagactcccgtttctcttaaaataagtaaaattccaaggatatatgccccaacgaatgctgctgaagaggagggaggcctcgtggactgctgctgagaaaccgagttcagaccgagcaggttctcctcctgaggtcctcgacgcctgccgacagcctgtcgcggcccggccgcctgcggcactgccttccgtgacgtcgccgttgcactatggacagttgctcttaagagaatatatatttaaatgggtgaactgaattacgcataagaagcatgcactgcctgagtgtatattttggattcttatgagccagtcttttcttgaattagaaacacaaacactgcctttattgtcctttttgatacgaagatgtgctttttctagatggaaaagatgtgtgttattttttggatttgtaaaaatatttttcatgatatctgtaaagcttgagtattttgtgatgttcgttttttataatttaaattttggtaaatatgtacaaaggcacttcgggtctatgtgactatatttttttgtatataaatgtatttatggaatattgtgcaaatgttatttgagttttttactgttttgttaatgaagaaattcctttttaaaatatttttccaaaataaattttatgaatgacaa

SEQ ID NO: 330252 - DNA, 2172 bp, Artificial Sequence
  derived and/or modified sequence
atgggcagccgctgtgccctggccctggccgtgctgagcgccctgctgtgccaggtgtggagcagcggcgtgtttgagctgaagctgcaggagtttgtgaacaagaagggcctgctgggcaacagaaactgctgccggggcggggccggccccccaccctgtgcctgcaggaccttcttccgggtgtgcctgaagcactaccaggcctctgtgtccccagagcccccctgcacctacggcagcgctgtgacccctgtgctgggcgtggacagcttcagcctgcctgatggcggcggcgctgacagcgccttcagcaaccccatccgcttccccttcggcttcacctggccaggcaccttcagcctcatcatcgaggccctgcacacagacagcccagatgacctggccacagagaaccctgagcggctcatcagccggctggccacccagaggcacctgactgtgggggaggagtggagccaggacctgcacagcagcggccgcacagacctgaagtacagctacagatttgtgtgtgatgagcactactacggggagggctgcagcgtcttctgccggcccagagatgatgccttcggccacttcacctgtggggagcggggggagaaggtgtgcaaccctggctggaagggcccctactgcacagagcccatctgcctgcccggctgtgatgagcagcacggcttctgtgacaagccaggagagtgcaagtgccgggtgggctggcagggccgctactgtgatgagtgcatccgctacccaggctgcctgcacggcacctgccagcagccctggcagtgcaactgccaggagggctggggcggcctcttctgcaaccaggacctgaactactgcacccaccacaagccctgcaagaatggagccacctgcaccaacacaggccagggcagctacacctgcagctgccggcccggctacacaggagccacctgtgagctgggcattgatgaatgtgaccccagcccctgcaagaatggaggcagctgcacagacctggagaacagctacagctgcacctgccccccaggcttctacggcaagatctgtgagctgagcgccatgacctgtgctgatggcccctgcttcaatggaggccgctgcagcgacagcccagatggcggctacagctgccgctgccctgtgggctacagcggcttcaactgtgagaagaagattgactactgcagcagcagcccctgcagcaatggagccaagtgtgtggacctgggagatgcctacctgtgccgctgccaggccggcttcagcggccgccactgtgatgacaacgtggatgactgtgccagcagcccctgtgccaacggcggcacctgcagagatggagtgaatgacttcagctgcacctgccccccaggctacacaggcaggaactgcagcgcccctgtgagccgctgtgaacatgccccctgccacaacggggccacctgccacgagcggggccacagatatgtgtgtgaatgtgcccggggctatggaggccccaactgccagttcctgctgcctgagctgcccccaggccctgctgtggtggacctgacagagaagctggagggccagggcggccccttcccctgggtggccgtgtgtgccggggtcatcctggtgctgatgctgctgctgggctgtgccgctgtggtggtgtgtgtgcggctgcggctgcagaagcaccggcccccagctgacccctgccgcggggagacagagaccatgaacaacctggccaactgccagcgggagaaggacatctctgtgtccatcattggagccacccagatcaagaacaccaacaagaaggctgacttccacggggaccacagcgctgacaagaatggcttcaaggcccgctacccagctgtggactacaacctggtgcaggacctgaagggagatgacacagctgtgagagatgcccacagcaagagggacaccaagtgccagccccagggcagcagtggagaggagaagggcacccccaccaccctgcggggcggggaggccagcgagaggaagaggccagacagcggctgcagcaccagcaaggacaccaagtaccagagcgtgtatgtgatcagcgaggagaaggatgaatgtgtgattgccacagaggtgtag

SEQ ID NO: 330253 - DNA, 2172 bp, Artificial Sequence
  derived and/or modified sequence
atgggcagccggtgcgccctggccctggccgtgctgagcgccctgctgtgtcaagtgtggtcctccggagtgttcgagctcaaactccaggagtttgtgaacaagaagggtcttctgggaaatcgaaactgttgtaggggcggtgccgggccgcccccgtgcgcttgccgtacttttttccgggtgtgcttgaagcactatcaagcaagcgtttctccagagccgccttgcacctatggctcagccgtgactcctgtcctgggcgtggactctttctccctccccgatgggggcggagctgattcggctttttcaaatcctattcgcttcccattcgggttcacctggcccggcactttcagcttaattatcgaggctcttcataccgactctcccgacgatctggccacggagaacccagaacggctgatctctagacttgcaacccagcgccatctgactgtgggtgaagagtggtcacaggaccttcacagttctggccggactgacttaaaatacagttatcggttcgtctgtgacgagcactactacggtgaaggatgctcggtgttctgccggcctagggacgatgccttcggtcacttcacttgcggagaaaggggcgagaaagtgtgcaacccaggctggaaaggcccatactgcaccgagcccatatgcctacccggttgtgacgagcagcacggcttttgtgataaaccaggggaatgcaaatgcagggtcggatggcaggggcgctactgcgatgagtgtatccgttatcctggctgtctgcatggcacctgtcagcaaccctggcagtgtaattgccaagaaggatgggggggtctcttctgcaatcaggatttaaattactgcacccatcataaaccctgcaaaaatggcgctacctgcacaaatactggacaggggtcctacacctgcagctgtaggcctggttacacaggcgccacttgcgaactgggcatcgatgagtgtgacccttcgccctgcaagaacggaggttcttgcaccgacctggaaaactcctacagttgcacgtgccctcccggcttttatggaaagatatgcgaactgtctgccatgacatgtgccgatgggccttgttttaacggtgggaggtgctccgattcacctgacggagggtactcatgcaggtgtcctgttggttatagcggctttaactgtgagaaaaagatcgactactgctcttcatccccttgctccaacggagcgaaatgtgtcgacctgggcgacgcttacctgtgccggtgtcaggcaggattttctggcagacactgcgatgacaatgtagacgactgcgcttcctcgccctgcgcaaatggcggaacctgccgcgacggcgtgaatgactttagctgtacctgcccacccggttatactggccgaaattgttcagcccccgtatccaggtgcgaacacgcgccttgtcacaatggagcaacatgtcatgagagaggtcacagatacgtgtgtgaatgtgccagaggatatggcggccccaattgccagttcctgctaccagagctgccaccaggccctgcagttgttgatctgaccgagaagctggaaggacaaggcggtccgtttccctgggtcgccgtgtgcgccggagtcatccttgtgttaatgctgctgcttggatgtgctgccgttgttgtgtgcgttagactcaggctgcagaagcacagacctcctgcagacccctgccggggcgagacggagaccatgaacaatctggcaaattgccagcgggagaaggatatatctgtttcaattattggagcaacccaaatcaagaataccaataaaaaggctgacttccatggggaccactcagcggataaaaatgggttcaaagctaggtaccccgcggttgactataatctcgtccaagacctgaagggtgacgacactgccgtgagagacgcacacagtaagagggacacaaagtgccagcctcagggctccagcggggaggagaaggggacaccgacgacgttgcgcggtggggaagccagcgagcgcaagcggcctgacagcgggtgctcaacttctaaggatacaaagtatcagtctgtttacgtgatttcagaggagaaggatgagtgtgttatagccactgaagtatag

SEQ ID NO: 330254 - RNA, 2172 nt, Artificial Sequence
  derived and/or modified sequence
augggcucccgcugugcucuggcgcuugcuguccucucagcccugcucugucaagugugguccucagguguguuugaauugaagcugcaggaguucguuaauaaaaaggggcuccucggcaaucgaaauugcuguagaggcggggcagggcccccuccaugugccugcagaacuuuuuuccgaguuugccucaagcacuaucaggccucugucuccccagaaccuccuuguaccuacggaagcgccguuacaccagugcugggcguggacucauucagccugccugauggcgggggagccgauucagcuuucucuaaucccauccgguuucccuuuggcuucacauggcccggcacuuucagucugaucauagaggcacuucauaccgacucucccgaugaucuggcaaccgagaacccugagagacugauuucuagauuggccacccagaggcaccuuaccguuggcgaggaauggagccaagaucuacacagcaguggcagaacugaucuaaaauauucauaccgguucgugugcgaugaacacuauuauggagaggguugcuccguguucugucgcccuagggacgacgcauuuggccacuucaccuguggcgagaggggcgagaagguguguaaccccggcuggaaaggaccauacuguaccgagccuaucugccucccaggaugugaugagcagcacgguuucugugacaagccgggggaguguaagugccggguuggguggcagggcagauacugugaugaguguaucagguauccagguugccuccaugggacaugucagcaaccauggcagugcaacugucaggagggcugggggggccuguucugcaaccaggaccugaauuacuguacacaucacaaaccaugcaaaaauggagccacauguacaaacacgggccagggaagcuauaccuguucaugucgacccggcuauacuggcgccaccugcgaguugggcaucgacgagugugauccgucgccuuguaaaaacggagggaguuguaccgaccuagaaaacagcuauucaugcaccugcccucccggauuuuaugggaaaauuugugaacuguccgccaugacuugugcugaugguccguguuuuaacggagggcgguguucugauucuccagauggcgguuauucauguaggugcccggugggcuauuccggauucaacugugaaaagaagauugauuauuguaguucauccccauguuccaacggagcaaagugcguggaucugggcgacgccuaucuuugccgaugccaggccggauucuccggacgacauugugacgauaacgucgaugacugugccucgagucccugcgccaauggcggaacuuguagggauggggugaaugacuucucguguacuugucccccagguuauaccggaagaaacugcagcgcuccuguuucucguugugagcacgcucccugccacaacggugccacuugucacgagcggggccaccguuaugugugcgaaugugcucgcggcuacggagggccaaauugucaguuucugcugccugagcugccccccggaccugccguggucgaccucacagagaagcucgaaggacaaggcggcccauuuccguggguggcagucugugcuggcgugauccuugucuugaugcuccugcucggcugugccgcugucgucgucuguguuaggcuucgacugcagaaacaccguccacccgcagauccuugcagaggcgaaaccgagacaaugaauaacuuggccaacugccagcgggaaaaggauauaucuguuuccaucauaggcgcgacgcagauaaaaaauaccaacaaaaaggcagacuuucauggcgaccacagcgccgacaaaaacggguuuaaagcaagguauccagcuguggacuauaaucuugugcaggacuugaaaggugacgauaccgcuguccgcgaugcacacuccaagcgagauacuaagugccagccgcagggauccucaggugaagaaaagggcacgccuaccacgcugcgggggggugaggcauccgaaaggaaaaggcccgacuccgguugcucuacaagcaaagacaccaaguaccaaucgguguacgucaucagugaagaaaaagacgagugcgugauagcuacagaaguguag

SEQ ID NO: 330255 - RNA, 2172 nt, Artificial Sequence
  derived and/or modified sequence
auggguagccgcugcgcauuggcuuuggcugugcugagcgcacugcucugccagguuuggucauccggagucuuugaauuaaagcugcaagaauucguaaacaagaaaggucuguuagguaaucguaacugcugccgcgggggagccggaccuccuccaugcgcuugucggacuuuuuuccguguuugccucaaacacuaccaagcauccguuagcccagagccaccguguacuuacggcagcgcugugaccccugugcucgguguagauaguuuuucucucccugaugguggaggggcggacagcgccuucaguaacccuauaagauuuccauucgguuuuacauggcccgguaccuucucccucaucauugaagcacuucauacagacuccccagacgaucuggccaccgagaaccccgaaaggcuuauuagcagauuagccacccagcggcaccucaccguuggugaagaauggucccaggaucuccacaguuccgggagaacggacuuaaaguauucauaucguuucgugugugaugaacauuauuauggcgaaggguguucuguguucugcagaccaagagacgacgccuuuggccauuucaccugcggcgaaagaggagaaaaaguaugcaacccgggcuggaaaggcccauauuguaccgaaccaauuuguuuaccggguugugacgagcagcauggcuuuugcgacaaaccgggggaguguaagugccgcguggguuggcaaggaagauauugcgacgaauguaucagauaucccggaugucuccacggaaccugccaacagccguggcaauguaauugccaagaagguuggggcggucuguucuguaaucaagauuugaacuauugcacacaccacaagcccugcaagaauggagcuacuuguacaaauacaggccaaggcagcuacacuugcucuuguagacccggguauacuggcgcgacuugugaacuuggcaucgacgaaugugaucccuccccaugcaagaacggcgggagcugcacagaccucgaaaauagcuacuccuguacuuguccccccggguuuuacggcaaaaucugcgaguuaagcgccaugacaugcgcugauggcccuuguuuuaacgggggacggugcuccgauuccccagacggaggauacagcugucgaugucccguaggcuacucugguuucaacugugagaagaagauugauuauuguuccucuaguccaugcucgaacggcgcaaaguguguggaucugggagaugccuaccugugccgcugucaggccggcuuuagcggacgccacugugaugacaauguggacgauugugcuaguuccccuugcgccaacggcggaacuugcagagacggcgugaacgauuuuucuugcacuugcccccccggauacacaggacgaaacuguuccgcucccgugucccguugcgaacacgcuccuugccauaauggcgcgacuugucaugaacguggccaccgcuauguuugcgaaugcgcccgaggcuauggcggccccaacugucaguuucugcuuccagaacuacccccagguccggccgugguggaccuuaccgaaaagcuggaaggucagggagguccuuucccauggguggccgucugcgcagguguuaucuugguauuaauguuguuacuaggcugugccgccguuguugugugcgugcgccuucgacuccagaaacaccgcccuccugccgaucccugcagaggcgaaacagagacuaugaauaaccuugcaaauugucagcgcgaaaaggacauuucaguuuccauaauaggcgccacacagaucaaaaacacuaacaaaaaggccgauuuccacggagaucacucugccgacaagaacggguuuaaggccagguauccagccgucgacuacaaccuagugcaggaucucaaaggagacgauacagccguacgggacgcacauagcaaacgagauacgaagugucaaccacaggggucaagcggcgaagagaaggggacaccgacgacacugcgcggcggagaggcuucagaacggaagcgaccagacucaggauguucuaccagcaaagauacgaaguaccaguccguuuauguaaucagcgaagaaaaagaugagugugucaucgcaaccgagguuuag

SEQ ID NO: 330256 - protein, 516 aa, Artificial Sequence
  derived and/or modified sequence
MVPGARGGGALARAAGRGLLALLLAVSAPLRLQAEELGDGCGHLVTYQDSGTMTSKNYPGTYPNHTVCEKTITVPKGKRLILRLGDLDIESQTCASDYLLFTSSSDQYGPYCGSMTVPKELLLNTSEVTVRFESGSHISGRGFLLTYASSDHPDLITCLERASHYLKTEYSKFCPAGCRDVAGDISGNMVDGYRDTSLLCKAAIHAGIIADELGGQISVLQRKGISRYEGILANGVLSRDGSLSDKRFLFTSNGINITTVAIPLVLLVVLVFAGMGIFAAFRKKKKKGSPYGSAEAQKTDCWKQIKYPFARHQSAEFTISYDNEKEMTQKLDLITSDMADYQQPLMIGTGTVTRKGSTFRPMDTDAEEAGVSTDAGGHYDCPQRAGRHEYALPLAPPEPEYATPIVERHVLRAHTFSAQSGYRVPGPQPGHKHSLSSGGFSPVAGVGAQDGDYQRPHSAQPADRGYDRPKAVSALATESGHPDSQKPPTHPGTSDSYSAPRDCLTPLNQTAMTALL

SEQ ID NO: 330257 - DNA, 1551 bp, Artificial Sequence
  derived and/or modified sequence
atggtgcccggcgccagaggcggcggcgccctggccagagccgccggcagaggcctgctggccctgctgctggccgtgagcgcccccctgagactgcaggccgaggagctgggcgacggctgcggccacctggtgacctaccaggacagcggcaccatgaccagcaagaactaccccggcacctaccccaaccacaccgtgtgcgagaagaccatcaccgtgcccaagggcaagagactgatcctgagactgggcgacctggacatcgagagccagacctgcgccagcgactacctgctgttcaccagcagcagcgaccagtacggcccctactgcggcagcatgaccgtgcccaaggagctgctgctgaacaccagcgaggtgaccgtgagattcgagagcggcagccacatcagcggcagaggcttcctgctgacctacgccagcagcgaccaccccgacctgatcacctgcctggagagagccagccactacctgaagaccgagtacagcaagttctgccccgccggctgcagagacgtggccggcgacatcagcggcaacatggtggacggctacagagacaccagcctgctgtgcaaggccgccatccacgccggcatcatcgccgacgagctgggcggccagatcagcgtgctgcagagaaagggcatcagcagatacgagggcatcctggccaacggcgtgctgagcagagacggcagcctgagcgacaagagattcctgttcaccagcaacggcatcaacatcaccaccgtggccatccccctggtgctgctggtggtgctggtgttcgccggcatgggcatcttcgccgccttcagaaagaagaagaagaagggcagcccctacggcagcgccgaggcccagaagaccgactgctggaagcagatcaagtaccccttcgccagacaccagagcgccgagttcaccatcagctacgacaacgagaaggagatgacccagaagctggacctgatcaccagcgacatggccgactaccagcagcccctgatgatcggcaccggcaccgtgaccagaaagggcagcaccttcagacccatggacaccgacgccgaggaggccggcgtgagcaccgacgccggcggccactacgactgcccccagagagccggcagacacgagtacgccctgcccctggccccccccgagcccgagtacgccacccccatcgtggagagacacgtgctgagagcccacaccttcagcgcccagagcggctacagagtgcccggcccccagcccggccacaagcacagcctgagcagcggcggcttcagccccgtggccggcgtgggcgcccaggacggcgactaccagagaccccacagcgcccagcccgccgacagaggctacgacagacccaaggccgtgagcgccctggccaccgagagcggccaccccgacagccagaagccccccacccaccccggcaccagcgacagctacagcgcccccagagactgcctgacccccctgaaccagaccgccatgaccgccctgctgtag

SEQ ID NO: 330258 - DNA, 1551 bp, Artificial Sequence
  derived and/or modified sequence
atggtccctggggcccgaggcgggggcgcactggcccgtgcagctggccgcggcctattagccctcctactcgctgtgtctgcaccattgcgacttcaagctgaagagctcggcgatggctgtggtcatttggttacctaccaggactctggtacaatgaccagcaagaactatccaggtacttatccaaaccataccgtctgcgagaagactattaccgtgcccaaagggaagcgtcttatcttgcgattaggcgatctggatattgaatcacaaacgtgcgcctctgactacctcttgtttacctccagttcagatcagtatgggccatactgcggctctatgaccgtgccgaaagagcttttgctcaacacttcggaggtcaccgtgagattcgagagcggcagtcatatatctggacgggggtttttactcacttacgcctcttcggatcaccccgacctaatcacatgtctggaacgggcgtcgcattacctcaaaacggagtattccaaattctgcccagccggttgcagagacgtggctggtgatatatcgggaaatatggtggacggctatagggacacttccctgttatgcaaggccgcaattcatgcggggatcatcgctgatgagcttggtggccagattagtgtgctgcaacgaaaggggatcagtaggtatgaaggcatcttggcaaacggggtactttctagagacggatcactgtctgacaaacgctttctcttcacaagcaacgggatcaatattacaaccgtggcaattcctctggtccttctcgtcgttcttgtgttcgcaggaatgggcatcttcgcagcttttcggaagaaaaaaaagaaaggctccccatacggcagtgccgaggcccagaagactgattgctggaaacaaataaaatacccatttgctcggcatcagagtgccgagttcaccatcagttatgacaacgagaaggaaatgacccagaagctggatctaatcacaagcgacatggcagattaccagcagcccctgatgattggcacaggaaccgtcacccgcaagggctcaacctttaggccaatggacaccgacgctgaggaggctggcgtcagtactgatgcgggaggccattacgactgcccccagagggctggtcgacatgagtacgctctgcctttggcacctccagagcccgagtatgcaacacctattgtggaacgccacgtactaagggcccataccttttcagcccagtccggctaccgggtgccaggcccccagcccggacataagcactccctttcttcaggtggctttagtcccgttgctggtgtcggagctcaggacggcgattatcagagaccccatagcgcccaaccagctgatcgcggatacgaccgaccgaaagccgtgagtgcactggctaccgagtccgggcatcccgactcccagaaaccgcctacacatcccggaactagtgacagctactcagcacctcgggactgcctgacccctctaaaccagactgcaatgacagccctcctctag

SEQ ID NO: 330259 - DNA, 1551 bp, Artificial Sequence
  derived and/or modified sequence
atggtgcctggggcccggggcggcggggccctggcccgggctgctggccggggcctgctggccctgctgctggccgtgtctgcccccctgcggctgcaggccgaggagctgggagatggctgcggccacctggtgacctaccaggacagcggcaccatgaccagcaagaactacccaggcacctaccccaaccacacagtgtgtgagaagaccatcaccgtgcccaagggcaagaggctcatcctgcggctgggggacctggacatcgagagccagacctgtgccagtgactacctgctcttcaccagcagcagtgaccagtatggcccctactgcggctccatgacagtgcccaaggagctgctgctgaacaccagcgaggtgacagtgcgctttgagagcggcagccacatcagcggccggggcttcctgctgacctacgccagcagtgaccacccagacctgatcacctgcctggagcgggccagccactacctgaagacagagtacagcaagttctgcccagctggctgcagagatgtggccggggacatcagcggcaacatggtggatggctacagagacaccagcctgctgtgcaaggccgccatccacgccggcatcatcgcagatgagctgggcggccagatctctgtgctgcagaggaagggcatcagccgctatgagggcatcctggccaacggggtgctgagcagagatggcagcctgagtgacaagcgcttcctgttcaccagcaatggcatcaacatcaccaccgtggccatccccctggtgctgctggtggtgctggtgtttgctggcatgggcatctttgctgccttcaggaagaagaagaagaagggcagcccctacggcagcgctgaggcccagaagacagactgctggaagcagatcaagtacccctttgcccggcaccagagcgctgagttcaccatctcctatgacaatgagaaggagatgacccagaagctggacctgatcaccagtgacatggctgactaccagcagcccctgatgattggaactggaacagtgaccaggaagggcagcaccttccggcccatggacacagatgctgaggaggccggcgtgtccacagatgctgggggccactatgactgcccccagagagctggaagacatgaatatgccctgcccctggcccctcctgagccagaatatgccacccccatcgtggagagacatgtgctgcgggcccacaccttcagcgcccagagcggctacagagtgcccggcccccagcccggccacaagcacagcctgagcagcggcggcttcagccctgtggccggcgtgggcgcccaggatggagactaccagaggccccacagcgcccagcctgctgaccggggctatgaccggcccaaggctgtgtctgccctggccacagaaagtggccacccagacagccagaagccacccacccaccctggcaccagtgacagctacagcgccccccgggactgcctgacccccctgaaccagacagccatgacagccctgctgtag

SEQ ID NO: 330260 - DNA, 1551 bp, Artificial Sequence
  derived and/or modified sequence
atggtgcccggcgcccggggcggcggcgccctggcccgggccgccggccggggtttgcttgctctcttgcttgcagtgagcgctccattgaggctccaggccgaggagctaggcgatggctgtggccatctggtcacataccaggacagcggaacaatgacaagcaaaaattatccaggaacctatccaaatcataccgtctgcgaaaagacaatcaccgtgccaaaggggaaacggctcattttgagacttggtgacttagacatagagtcccagacttgcgcatccgactacttgctgtttacatcctcctccgaccagtacggaccatattgcggcagcatgaccgtacctaaggagcttctgctcaacaccagcgaagtgacagtacggtttgaatctggaagtcacatttccgggaggggatttcttttgacctacgcctcttctgaccaccccgacctgattacttgcctcgaaagagccagccactacctcaagaccgaatactcgaaattctgtccggctgggtgcagggacgtagccggcgacatcagcgggaatatggtagacggatatcgggacacctccttactctgcaaggcagcaatccatgccgggataatagccgacgagctgggaggacagatctccgttctgcagcgaaaaggcatatcaagatatgaggggatcctcgccaatggggttttgtctagagatggttcgctttctgataaaaggttcttgttcactagcaacggcataaacatcaccaccgttgcaataccattagttctgttggttgtgctggtgttcgccggcatgggaattttcgccgcttttagaaaaaagaaaaaaaaaggctctccatacggaagtgccgaagcccagaaaaccgattgctggaagcaaattaagtacccatttgccaggcaccagtccgccgagttcaccattagttacgacaatgagaaagaaatgacccagaaactagacttaatcaccagcgatatggcagattatcagcagcccctaatgattgggacaggaacagtgactagaaagggcagcacatttaggcccatggacacggatgccgaagaggcgggtgtttcaactgatgccggtgggcattatgactgtcctcagcgggccggcagacatgaatacgctctgccactggctcctcccgaaccagagtacgccacaccaatagtcgagcggcatgtcctgcgggcccatactttttccgcccagtccggctaccgggtccccggtccacagcctggccacaagcattcattgtcatcgggggggtttagccctgtagccggagttggagcccaggatggggattaccagagaccccactcggcccagccagctgacagaggatatgatcgccccaaggcagtgagcgctctggctactgaatccgggcatcctgacagccagaagccaccgacacatccaggaacctcggactcgtacagcgccccccgcgactgccttacgccccttaaccagacagccatgacggcactgctttag

SEQ ID NO: 330261 - DNA, 1551 bp, Artificial Sequence
  derived and/or modified sequence
atggtcccgggtgcaagggggggaggggctctggctagagccgctggaagaggccttctggcactgctgctggccgtgagcgctcccctgaggcttcaagccgaggagctgggggacgggtgcggtcatcttgttacatatcaagattctggcacgatgacaagcaaaaattatccaggtacttatcctaaccatacagtgtgcgagaaaaccattacagtgcccaaggggaagcgattgatacttagactgggcgatcttgatatcgagagtcagacttgcgccagtgattatcttctgttcacgagttctagcgatcagtatggcccttactgcggttcaatgacagtaccaaaggagctgctgttgaatacctctgaggtaacagtgagatttgaaagtgggtcacatatttcaggcagaggctttctgttgacatacgctagtagcgaccatcccgatctgatcacatgcctggaaagggccagtcactacttgaagactgagtactctaaattttgcccggcaggttgcagagacgtcgccggagacatcagcggcaacatggtggatggctaccgggatactagcctgttatgcaaggctgccattcacgctggtatcattgccgacgagctgggcggtcagatatctgtcctgcagcggaaggggataagcagatacgaaggcatcctcgctaacggcgtgctgtctcgcgatgggtccctctcagataagagattcctgttcacatctaacggcatcaatattacaacagtcgctatccctctggtactgctagtggtgctcgtgttcgcaggaatgggaattttcgctgcgttccgaaaaaaaaagaaaaagggctctccatatggatccgccgaggcgcagaaaactgattgctggaagcagataaaatacccttttgccaggcaccagtccgcggaattcactatcagctacgataacgagaaagaaatgacccaaaagcttgaccttatcacatcagacatggctgattaccagcaacctcttatgatagggacagggaccgtaacacgtaaaggcagtaccttcagaccaatggacacagacgccgaggaagctggagtgtccactgatgccggaggtcactacgactgtcctcagcgcgcaggtcggcatgagtacgctcttcccctggcaccaccggaaccagagtacgctactccaatcgtggagcgacatgtcctaagggctcacacattctctgcccagtctggctatcgcgtcccagggcctcagccgggacataaacacagccttagctcaggagggttcagccctgtcgcaggggtgggagctcaggacggggactaccagcgtcctcattctgcacaacccgcagatcggggatatgaccgccctaaagctgtgagcgctctggctacagaaagcggacatccagattcacagaagccgcctacccaccctggcacttccgactcctactccgccccacgagactgtcttacacccctgaaccagaccgccatgactgccctgctgtag

SEQ ID NO: 330262 - protein, 205 aa, Artificial Sequence
  derived and/or modified sequence
MNFKNNNSKWKTYKGIVNNEEKVFQGNSNFRDPVQNNFIPPIVARYVRVVPQTWHQRIALKVELIGCQITQGNDSLVWRKTSQSTSVSTKKEDETITRPIPSEETSTGINITTVAIPLVLLVVLVFAGMGIFAAFRKKKKKGSPYGSAEAQKTDCWKQIKYPFARHQSAEFTISYDNEKEMTQKLDLITSDMAASPEPVSEPLPP

SEQ ID NO: 330263 - DNA, 1979 bp, Artificial Sequence
  derived and/or modified sequence
ggcagcgactgcgccccgtcccggcgccgcgctcgtccgcagaggaggcggcccggcccgggcagctgcggctcgggatccgtcgaggggaggccgagcttgccaagctggcgcccagcggggtcatggtgcccggcgcccgcggcggcggcgcactggcgcgggctgccgggcggggcctcctggctttgctgctcgcggtctccgccccgctccggctgcaggcggaggagctgggtgatggctgtggacacctagtgacttatcaggatagtggcacaatgacatctaagaattatcccgggacctaccccaatcacactgtttgcgaaaagacaattacagtaccaaaggggaaaagactgattctgaggttgggagatttggatatcgaatcccagacctgtgcttctgactatcttctcttcaccagctcttcagatcaatatggtccatactgtggaagtatgactgttcccaaagaactcttgttgaacacaagtgaagtaaccgtccgctttgagagtggatcccacatttctggccggggttttttgctgacctatgcgagcagcgaccatccagatttaataacatgtttggaacgagctagccattatttgaagacagaatacagcaaattctgcccagctggttgtagagacgtagcaggagacatttctgggaatatggtagatggatatagagatacctctttattgtgcaaagctgccatccatgcaggaataattgctgatgaactaggtggccagatcagtgtgcttcagcgcaaagggatcagtcgatatgaagggattctggccaatggtgttctttcgagggatggttccctgtcagacaagcgatttctgtttacctccaatggttgcagcagatccttgagttttgaacctgacgggcaaatcagagcttcttcctcatggcagtcggtcaatgagagtggagaccaagttcactggtctcctggccaagcccgacttcaggaccaaggcccatcatgggcttcgggcgacagtagcaacaaccacaaaccacgagagtggctggagatcgatttgggggagaaaaagaaaataacaggaattaggaccacaggatctacacagtcgaacttcaacttttatgttaagagttttgtgatgaacttcaaaaacaataattctaagtggaagacctataaaggaattgtgaataatgaagaaaaggtgtttcagggtaactctaactttcgggacccagtgcaaaacaatttcatccctcccatcgtggccagatatgtgcgggttgtcccccagacatggcaccagaggatagccttgaaggtggagctcattggttgccagattacacaaggtaatgattcattggtgtggcgcaagacaagtcaaagcaccagtgtttcaactaagaaagaagatgagacaatcacaaggcccatcccctcggaagaaacatccacaggaataaacattacaacggtggctattccattggtgctccttgttgtcctggtgtttgctggaatggggatctttgcagcctttagaaagaagaagaagaaaggaagtccgtatggatcagcagaggctcagaaaacagactgttggaagcagattaaatatccctttgccagacatcagtcagctgagtttaccatcagctatgataatgagaaggagatgacacaaaagttagatctcatcacaagtgatatggcaggttaactccgttgactgccaaaatagcatccccaacgtgcagccctccgcatctatcagcaggttgccccggatggatctcagagatgaggattggaacaccatgttctttcccaccctaacaacaacaaagggcagtaaattaaagtactctttgtaaggtacagttaccgattaatctagagataaaatattttcttaaaaatatatttcattaaacacctatgctgtctctataaa

SEQ ID NO: 330264 - DNA, 1778 bp, Artificial Sequence
  derived and/or modified sequence
ggcagcgactgcgccccgtcccggcgccgcgctcgtccgcagaggaggcggcccggcccgggcagctgcggctcgggatccgtcgaggggaggccgagcttgccaagctggcgcccagcggggtcatggtgcccggcgcccgcggcggcggcgcactggcgcgggctgccgggcggggcctcctggctttgctgctcgcggtctccgccccgctccggctgcaggcggaggagctgggtgatggctgtggacacctagtgacttatcaggatagtggcacaatgacatctaagaattatcccgggacctaccccaatcacactgtttgcgaaaagacaattacagtaccaaaggggaaaagactgattctgaggttgggagatttggatatcgaatcccagacctgtgcttctgactatcttctcttcaccagctcttcagatcaatatggtccatactgtggaagtatgactgttcccaaagaactcttgttgaacacaagtgaagtaaccgtccgctttgagagtggatcccacatttctggccggggttttttgctgacctatgcgagcagcgaccatccagatttaataacatgtttggaacgagctagccattatttgaagacagaatacagcaaattctgcccagctggttgtagagacgtagcaggagacatttctgggaatatggtagatggatatagagatacctctttattgtgcaaagctgccatccatgcaggaataattgctgatgaactaggtggccagatcagtgtgcttcagcgcaaagggatcagtcgatatgaagggattctggccaatggtgttctttcgagggatggttccctgtcagacaagcgatttctgtttacctccaatggttgcagcagatccttgagttttgaacctgacgggcaaatcagagcttcttcctcatggcagtcggtcaatgagagtggagaccaagttcactggtctcctggccaagcccgacttcaggaccaaggcccatcatgggcttcgggcgacagtagcaacaaccacaaaccacgagagtggctggagatcgatttgggggagaaaaagaaaataacaggaattaggaccacaggatctacacagtcgaacttcaacttttatgttaagagttttgtgatgaacttcaaaaacaataattctaagtggaagacctataaaggaattgtgaataatgaagaaaaggtgtttcagggtaactctaactttcgggacccagtgcaaaacaatttcatccctcccatcgtggccagatatgtgcgggttgtcccccagacatggcaccagaggatagccttgaaggtggagctcattggttgccagattacacaaggtaatgattcattggtgtggcgcaagacaagtcaaagcaccagtgtttcaactaagaaagaagatgagacaatcacaaggcccatcccctcggaagaaacatccacaggaataaacattacaacggtggctattccattggtgctccttgttgtcctggtgtttgctggaatggggatctttgcagcctttagaaagaagaagaagaaaggaagtccgtatggatcagcagaggctcagaaaacagactgttggaagcagattaaatatccctttgccagacatcagtcagctgagtttaccatcagctatgataatgagaaggagatgacacaaaagttagatctcatcacaagtgatatggcagcttctccagagccagtttcagagccacttcctccctga

SEQ ID NO: 330265 - DNA, 1676 bp, Artificial Sequence
  derived and/or modified sequence
ggcagcgactgcgccccgtcccggcgccgcgctcgtccgcagaggaggcggcccggcccgggcagctgcggctcgggatccgtcgaggggaggccgagcttgccaagctggcgcccagcggggtcatggtgcccggcgcccgcggcggcggcgcactggcgcgggctgccgggcggggcctcctggctttgctgctcgcggtctccgccccgctccggctgcaggcggaggagctgggtgatggctgtggacacctagtgacttatcaggatagtggcacaatgacatctaagaattatcccgggacctaccccaatcacactgtttgcgaaaagacaattacagtaccaaaggggaaaagactgattctgaggttgggagatttggatatcgaatcccagacctgtgcttctgactatcttctcttcaccagctcttcagatcaatatggtccatactgtggaagtatgactgttcccaaagaactcttgttgaacacaagtgaagtaaccgtccgctttgagagtggatcccacatttctggccggggttttttgctgacctatgcgagcagcgaccatccagatttaataacatgtttggaacgagctagccattatttgaagacagaatacagcaaattctgcccagctggttgtagagacgtagcaggagacatttctgggaatatggtagatggatatagagatacctctttattgtgcaaagctgccatccatgcaggaataattgctgatgaactaggtggccagatcagtgtgcttcagcgcaaagggatcagtcgatatgaagggattctggccaatggtgttctttcgagggatggttccctgtcagacaagcgatttctgtttacctccaatggaataaacattacaacggtggctattccattggtgctccttgttgtcctggtgtttgctggaatggggatctttgcagcctttagaaagaagaagaagaaaggaagtccgtatggatcagcagaggctcagaaaacagactgttggaagcagattaaatatccctttgccagacatcagtcagctgagtttaccatcagctatgataatgagaaggagatgacacaaaagttagatctcatcacaagtgatatggcagattaccagcagcccctcatgattggcaccgggacagtcacgaggaagggctccaccttccggcccatggacacggatgccgaggaggcaggggtgagcaccgatgccggcggccactatgactgcccgcagcgggccggccgccacgagtacgcgctgcccctggcgcccccggagcccgagtacgccacgcccatcgtggagcggcacgtgctgcgcgcccacacgttctctgcgcagagcggctaccgcgtcccagggccccagcccggccacaaacactccctctcctcgggcggcttctcccccgtagcgggtgtgggcgcccaggacggagactatcaaaggccacacagcgcacagcctgcggacaggggctacgaccggcccaaagctgtcagcgccctcgccaccgaaagcgggcaccctgactctcagaagcccccaacgcatcccgggacgagtgacagctattctgcccccagagactgcctcacacccctcaaccagacggccatgactgcccttttgtga

SEQ ID NO: 330266 - protein, 892 aa, Artificial Sequence
  derived and/or modified sequence
MKIIFPILSNPVFRRTVKLLLCLLWIGYSQGTTHVLRFGGIFEYVESGPMGAEELAFRFAVNTINRNRTLLPNTTLTYDTQKINLYDSFEASKKACDQLSLGVAAIFGPSHSSSANAVQSICNALGVPHIQTRWKHQVSDNKDSFYVSLYPDFSSLSRAILDLVQFFKWKTVTVVYDDSTGLIRLQELIKAPSRYNLRLKIRQLPADTKDAKPLLKEMKRGKEFHVIFDCSHEMAAGILKQALAMGMMTEYYHYIFTTLDLFALDVEPYRYSGVNMTGFRILNTENTQVSSIIEKWSMERLQAPPKPDSGLLDGFMTTDAALMYDAVHVVSVAVQQFPQMTVSSLQCNRHKPWRFGTRFMSLIKEAHWEGLTGRITFNKTNGLRTDFDLDVISLKEEGLEKIGTWDPASGLNMTESQKGKPANITDSLSNRSLIVTTILEEPYVLFKKSDKPLYGNDRFEGYCIDLLRELSTILGFTYEIRLVEDGKYGAQDDANGQWNGMVRELIDHKADLAVAPLAITYVREKVIDFSKPFMTLGISILYRKPNGTNPGVFSFLNPLSPDIWMYILLAYLGVSCVLFVIARFSPYEWYNPHPCNPDSDVVENNFTLLNSFWFGVGALMQQGSELMPKALSTRIVGGIWWFFTLIIISSYTANLAAFLTVERMESPIDSADDLAKQTKIEYGAVEDGATMTFFKKSKISTYDKMWAFMSSRRQSVLVKSNEEGIQRVLTSDYAFLMESTTIEFVTQRNCNLTQIGGLIDSKGYGVGTPMGSPYRDKITIAILQLQEEGKLHMMKEKWWRGNGCPEEESKEASALGVQNIGGIFIVLAAGLVLSVFVAVGEFLYKSKKNAQLEKRAKTKLPQDYVFLPILESVSISTVLSSSPSSSSLSSCS

SEQ ID NO: 330267 - protein, 584 aa, Artificial Sequence
  derived and/or modified sequence
MKIIFPILSNPVFRRTVKLLLCLLWIGYSQGTTHVLRFGGIFEYVESGPMGAEELAFRFAVNTINRNRTLLPNTTLTYDTQKINLYDSFEASKKACDQLSLGVAAIFGPSHSSSANAVQSICNALGVPHIQTRWKHQVSDNKDSFYVSLYPDFSSLSRAILDLVQFFKWKTVTVVYDDSTGLIRLQELIKAPSRYNLRLKIRQLPADTKDAKPLLKEMKRGKEFHVIFDCSHEMAAGILKQALAMGMMTEYYHYIFTTLDLFALDVEPYRYSGVNMTGFRILNTENTQVSSIIEKWSMERLQAPPKPDSGLLDGFMTTDAALMYDAVHVVSVAVQQFPQMTVSSLQCNRHKPWRFGTRFMSLIKEAHWEGLTGRITFNKTNGLRTDFDLDVISLKEEGLEKIGTWDPASGLNMTESQKGKPANITDSLSNRSLIVTTILEEPYVLFKKSDKPLYGNDRFEGYCIDLLRELSTILGFTYEIRLVEDGKYGAQDDANGQWNGMVRELIDHKADLAVAPLAITYVREKVIDFSKPFMTLGISILYRKPNGTNPGVFSFLNPLSPDIWMYILLAYLGVSCVLFVIARF

SEQ ID NO: 330268 - DNA, 2679 bp, Artificial Sequence
  derived and/or modified sequence
atgaaaattatcttccccattctttctaatccagtgttcaggcgcactgtcaagctgttgctgtgccttctctggatcggctactcgcagggaaccacacacgtcctgcgatttggggggatttttgagtacgtggaatcagggccaatgggcgctgaggagctagcattcaggtttgccgtgaataccattaaccgcaaccgcaccctcttgccaaatactaccttaacctacgacactcaaaaaatcaacctctatgactcctttgaagctagtaaaaaggcatgtgaccagctctccctgggggttgccgcaatttttggcccctctcattcttcttcagctaacgcggtgcaatccatctgtaatgccctcggggtgccacacattcaaacacgatggaaacatcaagtttccgacaataaggattccttttacgtatctttataccccgatttctcaagcctgagtagggcgattctggatcttgttcaatttttcaaatggaaaacagttaccgtcgtttacgacgactctactggccttatcagactgcaagagctaatcaaggctccgtcccgctacaatctccggttgaaaatcaggcagctacccgccgataccaaggacgccaaacctctgctgaaggagatgaaaagggggaaagaattccacgtgatcttcgactgctcccacgaaatggcagccgggatcctcaagcaagcacttgctatgggtatgatgactgaatattaccactatattttcactactctagacctctttgcccttgacgtggagccctaccggtactccggcgtcaatatgacaggattcagaatcctgaatacagagaacacacaggtgtcctctattatagaaaaatggagtatggaaagactgcaagcccctcccaagcccgacagtgggcttctggatggcttcatgaccaccgatgccgccctaatgtacgacgccgtacacgtagtaagtgtcgccgtccagcagttccctcagatgacagtcagctcactccagtgtaatcgccacaaaccctggcgctttggaacacgcttcatgagccttattaaggaggcacattgggaggggctgaccggtcgcatcactttcaataagactaacgggctccggaccgattttgatctggatgtgatttccctaaaagaagaaggcctcgaaaagatcggcacgtgggatcctgcctccggcttaaatatgaccgagagccagaaagggaagcccgctaacattaccgactccctcagcaacagatctcttattgtaaccaccatcctcgaagagccttatgttcttttcaaaaagtctgataagccactgtatggaaacgatcgcttcgagggatattgcatagacttattgagagagttgtcaactattctgggctttacatacgaaattcggctggtggaggacggtaaatacggggctcaagacgatgctaacggccaatggaatgggatggtacgggaactgatcgatcacaaagcagatttagccgtcgctcctctggcaatcacctatgtgagagaaaaggtaatcgacttctcgaagccattcatgaccctagggataagtattctttaccgcaaacccaacggaactaaccccggggtctttagtttcctgaaccctctgtctcctgatatctggatgtatattctcctcgcataccttggtgtgtcatgcgttctgtttgtcatcgcccgcttctcaccttacgaatggtataatcctcacccatgcaatccggactctgacgtggtggaaaataacttcacattgctcaattcattttggttcggtgtcggcgcactcatgcagcaaggtagtgagctgatgcctaaggcgctctcaacacgaatcgtcggcgggatatggtggttctttacgctgattattatcagctcatacacagccaacttagcggcttttctcactgtcgagcggatggaaagcccaatcgactctgcagacgacctggctaaacagaccaagatcgagtacggcgctgtcgaggacggagccacgatgaccttcttcaagaaatccaaaatatctacttatgacaaaatgtgggcttttatgtccagcaggagacagagcgtattagtgaagagcaacgaagaaggaattcagcgcgtcttgaccagcgattacgcgtttctgatggagagtacaacaattgagttcgtcacacagcgcaactgtaatttaacacagataggtggcctgatcgactcgaaggggtacggcgtcggcactcctatggggagtccataccgagacaagattactatagcgattctgcagctgcaggaagaaggcaagctgcacatgatgaaagagaagtggtggcgcggcaatgggtgtcccgaggaagaatccaaggaagcttctgccctgggcgtccaaaacatcggcggcatcttcatcgtgcttgctgctggcctcgtgctgtcagtgtttgtcgctgttggcgaattcctatacaagagtaagaagaacgcccagctggaaaaaagagcaaagacaaaactccctcaggactacgtgttcttaccaattcttgagagcgtttccatctccactgtgctctcctccagtccaagctccagttccttatcaagctgttcttag

SEQ ID NO: 330269 - DNA, 2679 bp, Artificial Sequence
  derived and/or modified sequence
atgaagatcatcttccccatcctgagcaaccctgtgttccggaggacagtgaagctgctgctgtgcctgctgtggattggctacagccagggcaccacccacgtgctgcgctttggaggcatctttgaatatgtggagagcggccccatgggcgctgaggagctggccttccgctttgctgtgaacaccatcaacagaaacagaaccctgctgcccaacaccaccctgacctatgacacccagaagatcaacctgtatgacagctttgaggccagcaagaaggcctgtgaccagctgagcctgggcgtggccgccatcttcggccccagccacagcagcagcgccaatgctgtgcagagcatctgcaatgccctgggcgtgccccacatccagacccgctggaagcaccaggtgtctgacaacaaggacagcttctacgtgtccctgtacccagacttcagcagcctgagccgggccatcctggacctggtgcagttcttcaagtggaagacagtgacagtggtgtatgatgacagcacaggcctcatccggctgcaggagctgatcaaggcccccagccgctacaacctgcggctgaagatccggcagctgcctgctgacaccaaggatgccaagcccctgctgaaggagatgaagaggggcaaggagttccacgtgatctttgactgcagccatgagatggccgccggcatcctgaagcaggccctggccatgggcatgatgacagagtactaccactacatcttcaccaccctggacctgtttgccctggatgtggagccctaccgctacagcggcgtgaacatgacaggcttccgcatcctgaacacagagaacacccaggtgagcagcatcatcgagaagtggagcatggagcggctgcaggccccacccaagccagattctggcctgctggatggcttcatgaccacagatgctgccctgatgtatgatgctgtgcacgtggtgtctgtggccgtgcagcagttcccccagatgacagtgagcagcctgcagtgcaacagacacaagccctggaggtttggcacccgcttcatgagcctcatcaaggaggcccactgggagggcctgaccggccgcatcaccttcaacaagaccaacggcctgaggacagactttgacctggatgtgatcagcctgaaggaggagggcctggagaagattggcacctgggaccctgccagcggcctgaacatgacagagagccagaagggcaagccagccaacatcacagacagcctgagcaacagaagcctcatcgtgaccaccatcctggaggagccctacgtgctcttcaagaagagtgacaagcccctgtatggaaatgacagatttgagggctactgcatcgacctgctgcgggagctgagcaccatcctgggcttcacctatgagatccggctggtggaggatggcaagtacggggcccaggatgatgccaacggccagtggaatggcatggtgcgggagctgattgaccacaaggctgacctggccgtggcccccctggccatcacctacgtgcgggagaaggtgattgacttcagcaagcccttcatgaccctgggcatcagcatcctgtacaggaagcccaacggcaccaaccctggggtcttctccttcctgaaccccctgagcccagacatctggatgtacatcctgctggcctacctgggcgtgtcctgtgtgctgtttgtgattgcccgcttcagcccctatgagtggtacaacccccacccctgcaacccagacagtgatgtggtggagaacaacttcaccctgctgaacagcttctggtttggagtgggcgccctgatgcagcagggcagcgagctgatgcccaaggccctgagcaccagaattgtgggcggcatctggtggttcttcaccctcatcatcatcagcagctacacagccaacctggccgccttcctgactgtggagaggatggagagccccatcgacagcgcagatgacctggccaagcagaccaagattgaatatggagctgtggaggatggagccaccatgaccttcttcaagaagagcaagatcagcacctatgacaagatgtgggccttcatgagcagccggcggcagagcgtgctggtgaagagcaatgaggagggcatccagagggtgctgaccagtgactatgccttcctgatggagagcaccaccatcgagtttgtgacccagaggaactgcaacctgacccagattggaggcctgattgacagcaagggctacggcgtgggcacccccatgggcagcccctacagagacaagatcaccatcgccatcctgcagctgcaggaggagggcaagctgcacatgatgaaggagaagtggtggagaggaaatggctgcccagaggaggagagcaaggaggccagcgccctgggcgtgcagaacatcggcggcatcttcatcgtgctggccgccggcctggtgctgtctgtgtttgtggccgtgggggagttcctgtacaagagcaagaagaatgcccagctggagaagagggccaagaccaagctgccccaggactatgtgttcctgcccatcctggagagcgtgtccatcagcacagtgctgagcagcagccccagcagcagcagcctgagcagctgcagctag

SEQ ID NO: 330270 - DNA, 2679 bp, Artificial Sequence
  derived and/or modified sequence
atgaagatcatcttccccatcctgagcaaccccgtgttccggcggactgtcaaactgctgctctgccttctgtggataggttattcacagggcaccacacacgtgttgcgattcggtggcatcttcgagtacgtggagagtggaccgatgggcgccgaagagctggcttttagatttgcagtgaacacgatcaatcgaaatagaaccctcctccctaatactacattgacttacgacacccagaagataaacttgtacgatagtttcgaagcctccaagaaggcatgcgatcagttgagtctcggagtggctgccatattcgggcccagtcattcctctagcgcaaatgctgttcaaagcatttgcaacgccctgggagttcctcatatccagacccgttggaagcatcaggtcagcgataataaggactcattttatgtttctctgtaccccgactttagctcactgagccgagctatccttgacctggttcagtttttcaagtggaaaacagtcacagtggtgtatgatgactctaccggtttaattcgtctacaggaactaataaaagccccatcccggtacaacttacgcctcaagatacgccagctgcctgccgatacaaaagacgccaagccccttttaaaagaaatgaagagaggcaaggagttccacgtgatttttgactgcagtcacgaaatggctgctggaatactgaaacaggcattggcaatgggcatgatgaccgagtactaccactatatctttaccacactcgatctcttcgcgctagatgtggagccctacagatatagcggcgtgaatatgaccgggttccgcattttgaacacagaaaatacgcaagtaagcagcatcatcgaaaagtggtcaatggagaggctacaagctccccctaagcccgactccgggttgcttgatgggtttatgaccaccgatgcggctctgatgtacgacgcagtccatgttgtgtctgtggcagttcagcaattccctcagatgaccgtgagtagtctgcaatgtaatcggcacaaaccatggcgcttcggcacacgcttcatgagtctcatcaaggaggctcactgggagggattgaccggcaggattacatttaacaagacgaacgggctccgcacagatttcgacctggacgtgatttcgttgaaagaggaggggctggaaaaaattggaacatgggatcccgcatctggtctcaatatgacagagtctcaaaaaggtaagcctgctaacataactgactccctcagcaacagatcactgattgtgaccacgatcctcgaagaaccctatgtccttttcaagaagtcggacaagcccttatatggaaatgaccggttcgagggctattgtatcgatctgcttcgagagctgtccacaatcttggggttcacttacgaaatacggttagtcgaggatggcaagtacggcgcacaggacgacgccaacgggcaatggaatggcatggtgcgggaactgatcgaccacaaagcagacttggctgttgctcccttagctataacctatgtacgggaaaaggtgatcgattttagtaagccgtttatgaccctcggcattagtatcttatatcgaaagcctaacgggactaacccgggggtcttttccttcttgaatccactcagccccgacatctggatgtatattctgctggcctacctgggcgtgagctgcgtactgttcgtgatcgcaagatttagtccatacgagtggtacaaccctcacccttgtaatcctgacagcgacgtggtggagaataacttcaccctccttaacagtttctggttcggtgttggcgccttaatgcagcaggggtcagaacttatgcccaaagcactgagcacgagaatagttggaggtatttggtggttttttaccttgatcatcattagcagttataccgctaaccttgccgcatttctgacagtagaacggatggagagcccaatcgactctgccgacgaccttgcaaagcagacaaagattgagtacggcgcggtggaggatggagccactatgaccttttttaagaaatctaagatctcgacttatgacaagatgtgggcctttatgagttctaggagacagtctgtgctggtaaagtccaacgaggagggtattcaaagggtgctgacctcagactacgccttcttgatggagtctacaaccatagagtttgtgactcaacgcaactgcaatcttactcagattggaggcctgattgactcaaaggggtacggtgtcggcaccccgatgggcagtccctaccgtgataagattactatcgccatactgcaattgcaagaggagggcaagctccatatgatgaaagaaaagtggtggagggggaacggctgtccagaggaggagagcaaggaggcgtctgcgctgggagtgcaaaatatcggcggaatcttcatcgtgctggctgccggcctggtgctttccgtgttcgtggctgtgggggagttcctttataagagcaaaaagaatgcccaactggagaaacgggctaagactaagctgcctcaagactacgtgttcctgcccattctggaatcagtcagcatatccaccgtcctgagttccagcccctcttcttcctcattgtcttcttgtagctag

SEQ ID NO: 330271 - DNA, 2679 bp, Artificial Sequence
  derived and/or modified sequence
atgaaaataatattccctattttgtccaaccctgtgtttaggcgcacagttaaactgcttctttgtctgctttggatcgggtacagccagggtacaacccacgtgttgcgattcgggggtatctttgagtatgtggagtcgggcccaatgggtgccgaggagctggcttttcgatttgccgtgaacacaattaaccggaatagaaccctcctcccaaacacaaccctcacatacgatactcagaagattaatctgtacgattcttttgaggcctccaagaaagcctgcgaccagctttccctgggcgtggcagccatattcggcccttcgcacagcagctccgctaatgccgtacaaagcatttgtaacgctcttggggtgccgcacatccagacacgctggaagcatcaggtttctgataacaaggactccttctatgttagtctctatcctgatttttctagcctctcacgtgctatcttagacctggttcagttttttaaatggaagacggtgacagtcgtctatgacgactccaccggcctcatacggcttcaagagttgataaaggccccttcaagatacaatctacggctgaagatccgacagctacctgcagacacgaaggatgccaagcccctgttaaaggaaatgaaaagaggtaaagagttccatgttatttttgattgtagccacgagatggccgcaggtattctgaagcaggccctcgccatgggcatgatgaccgaatactatcattacatctttacaacactggacctattcgccctcgatgtcgaaccctataggtacagtggtgtgaacatgacaggttttagaattttaaacacagagaacacccaagttagcagcattatcgaaaaatggtcgatggaacggttgcaggcgcctccaaagccagatagcggtctccttgacggctttatgacgaccgacgctgccctgatgtacgatgcagtgcacgtcgtaagcgtcgcagtccagcaattccctcagatgacagtgtcctctttgcagtgtaatagacataagccctggagatttggaacgcgtttcatgtccctaattaaagaggctcattgggaaggtctcaccggccgtattacctttaataaaacaaacggtctgcgcactgactttgatttggacgtgatttccctcaaggaggagggcctggagaagattggaacctgggaccccgcaagcgggctaaacatgaccgaatcacagaaaggtaaacccgctaatatcacagattcgctgtctaacaggagcctcatcgtaaccactatcctggaagaaccctacgttcttttcaaaaaaagcgacaaacctttatacggcaatgataggtttgagggctactgcatcgacctactccgggaattgagtaccattttgggttttacctacgaaatccggctggtggaggatggcaagtacggcgcacaggatgacgcgaacggacagtggaatggtatggtgagagaactcattgaccacaaggcggacctggctgtggcaccacttgccatcacctacgttagggagaaagtcatagacttctctaaaccctttatgactctggggatttccattctctacagaaagcccaacggaacgaatccaggcgtcttctcatttctgaatcccctgtctcctgatatttggatgtatatcctgttggcttacttaggggtaagctgtgtgctattcgtgattgccagatttagtccctatgagtggtataaccctcacccatgtaacccagacagtgatgttgttgaaaataacttcacattactgaatagcttctggtttggtgtgggcgcactcatgcaacaagggagtgaacttatgccaaaagccctttccacacggatagtgggcggaatctggtggtttttcacattaatcatcatttccagctacactgccaacctggccgcattccttaccgtcgagaggatggaatcgcctatagacagcgctgacgacctcgctaagcagacgaagatcgaatatggtgccgttgaggatggagccacgatgaccttcttcaaaaagagcaaaatctctacttacgataaaatgtgggcatttatgtcctcccggagacagagcgtcctggtgaaatcaaacgaggagggaattcaaagggtgctgacttccgattacgcattcttgatggagtcaacgactattgagttcgttacccaaagaaactgtaatctaacacagattggaggattgatagattctaaaggatatggggtgggtacacccatggggagtccatatcgggataagattactattgccattctgcagttacaagaggaaggcaaattacatatgatgaaagaaaaatggtggcgcggaaatggctgccctgaggaggaaagcaaggaggcgagtgcactcggcgtacagaacattggaggcattttcatcgtactggccgctggactcgtattgtcggtcttcgttgccgtgggggaatttctgtacaagtccaaaaagaatgcacagctagaaaagcgagcgaaaactaagctgcctcaagactatgtctttctgcccatcctggaaagtgtgtcaatctcaaccgttttaagctcatctcccagttcgagcagcctgtcatcatgctcctag

SEQ ID NO: 330272 - DNA, 2679 bp, Artificial Sequence
  derived and/or modified sequence
atgaagatcatcttccccatcctgagcaaccccgtgttcagaagaaccgtgaagctgctgctgtgcctgctgtggatcggctacagccagggcaccacccacgtgctgagattcggcggcatcttcgagtacgtggagagcggccccatgggcgccgaggagctggccttcagattcgccgtgaacaccatcaacagaaacagaaccctgctgcccaacaccaccctgacctacgacacccagaagatcaacctgtacgacagcttcgaggccagcaagaaggcctgcgaccagctgagcctgggcgtggccgccatcttcggccccagccacagcagcagcgccaacgccgtgcagagcatctgcaacgccctgggcgtgccccacatccagaccagatggaagcaccaggtgagcgacaacaaggacagcttctacgtgagcctgtaccccgacttcagcagcctgagcagagccatcctggacctggtgcagttcttcaagtggaagaccgtgaccgtggtgtacgacgacagcaccggcctgatcagactgcaggagctgatcaaggcccccagcagatacaacctgagactgaagatcagacagctgcccgccgacaccaaggacgccaagcccctgctgaaggagatgaagagaggcaaggagttccacgtgatcttcgactgcagccacgagatggccgccggcatcctgaagcaggccctggccatgggcatgatgaccgagtactaccactacatcttcaccaccctggacctgttcgccctggacgtggagccctacagatacagcggcgtgaacatgaccggcttcagaatcctgaacaccgagaacacccaggtgagcagcatcatcgagaagtggagcatggagagactgcaggccccccccaagcccgacagcggcctgctggacggcttcatgaccaccgacgccgccctgatgtacgacgccgtgcacgtggtgagcgtggccgtgcagcagttcccccagatgaccgtgagcagcctgcagtgcaacagacacaagccctggagattcggcaccagattcatgagcctgatcaaggaggcccactgggagggcctgaccggcagaatcaccttcaacaagaccaacggcctgagaaccgacttcgacctggacgtgatcagcctgaaggaggagggcctggagaagatcggcacctgggaccccgccagcggcctgaacatgaccgagagccagaagggcaagcccgccaacatcaccgacagcctgagcaacagaagcctgatcgtgaccaccatcctggaggagccctacgtgctgttcaagaagagcgacaagcccctgtacggcaacgacagattcgagggctactgcatcgacctgctgagagagctgagcaccatcctgggcttcacctacgagatcagactggtggaggacggcaagtacggcgcccaggacgacgccaacggccagtggaacggcatggtgagagagctgatcgaccacaaggccgacctggccgtggcccccctggccatcacctacgtgagagagaaggtgatcgacttcagcaagcccttcatgaccctgggcatcagcatcctgtacagaaagcccaacggcaccaaccccggcgtgttcagcttcctgaaccccctgagccccgacatctggatgtacatcctgctggcctacctgggcgtgagctgcgtgctgttcgtgatcgccagattcagcccctacgagtggtacaacccccacccctgcaaccccgacagcgacgtggtggagaacaacttcaccctgctgaacagcttctggttcggcgtgggcgccctgatgcagcagggcagcgagctgatgcccaaggccctgagcaccagaatcgtgggcggcatctggtggttcttcaccctgatcatcatcagcagctacaccgccaacctggccgccttcctgaccgtggagagaatggagagccccatcgacagcgccgacgacctggccaagcagaccaagatcgagtacggcgccgtggaggacggcgccaccatgaccttcttcaagaagagcaagatcagcacctacgacaagatgtgggccttcatgagcagcagaagacagagcgtgctggtgaagagcaacgaggagggcatccagagagtgctgaccagcgactacgccttcctgatggagagcaccaccatcgagttcgtgacccagagaaactgcaacctgacccagatcggcggcctgatcgacagcaagggctacggcgtgggcacccccatgggcagcccctacagagacaagatcaccatcgccatcctgcagctgcaggaggagggcaagctgcacatgatgaaggagaagtggtggagaggcaacggctgccccgaggaggagagcaaggaggccagcgccctgggcgtgcagaacatcggcggcatcttcatcgtgctggccgccggcctggtgctgagcgtgttcgtggccgtgggcgagttcctgtacaagagcaagaagaacgcccagctggagaagagagccaagaccaagctgccccaggactacgtgttcctgcccatcctggagagcgtgagcatcagcaccgtgctgagcagcagccccagcagcagcagcctgagcagctgcagctag

SEQ ID NO: 330273 - protein, 869 aa, Artificial Sequence
  derived and/or modified sequence
MKIIFPILSNPVFRRTVKLLLCLLWIGYSQGTTHVLRFGGIFEYVESGPMGAEELAFRFAVNTINRNRTLLPNTTLTYDTQKINLYDSFEASKKACDQLSLGVAAIFGPSHSSSANAVQSICNALGVPHIQTRWKHQVSDNKDSFYVSLYPDFSSLSRAILDLVQFFKWKTVTVVYDDSTGLIRLQELIKAPSRYNLRLKIRQLPADTKDAKPLLKEMKRGKEFHVIFDCSHEMAAGILKQALAMGMMTEYYHYIFTTLDLFALDVEPYRYSGVNMTGFRILNTENTQVSSIIEKWSMERLQAPPKPDSGLLDGFMTTDAALMYDAVHVVSVAVQQFPQMTVSSLQCNRHKPWRFGTRFMSLIKEAHWEGLTGRITFNKTNGLRTDFDLDVISLKEEGLEKIGTWDPASGLNMTESQKGKPANITDSLSNRSLIVTTILEEPYVLFKKSDKPLYGNDRFEGYCIDLLRELSTILGFTYEIRLVEDGKYGAQDDANGQWNGMVRELIDHKADLAVAPLAITYVREKVIDFSKPFMTLGISILYRKPNGTNPGVFSFLNPLSPDIWMYILLAYLGVSCVLFVIARFSPYEWYNPHPCNPDSDVVENNFTLLNSFWFGVGALMQQGSELMPKALSTRIVGGIWWFFTLIIISSYTANLAAFLTVERMESPIDSADDLAKQTKIEYGAVEDGATMTFFKKSKISTYDKMWAFMSSRRQSVLVKSNEEGIQRVLTSDYAFLMESTTIEFVTQRNCNLTQIGGLIDSKGYGVGTPMGSPYRDKITIAILQLQEEGKLHMMKEKWWRGNGCPEEESKEASALGVQNIGGIFIVLAAGLVLSVFVAVGEFLYKSKKNAQLEKESSIWLVPPYHPDTV

SEQ ID NO: 330274 - DNA, 2610 bp, Artificial Sequence
  derived and/or modified sequence
atgaagattatattccctatcctgtctaacccagtcttccgccgtacagttaaactactcctttgtttgctgtggattggctactcgcaaggcacaacccacgtcctgcgcttcggaggaatcttcgagtatgtcgagagtggacctatgggcgcagaggaactggcctttcggttcgccgtgaataccatcaaccgtaaccggactctattaccaaatacaaccctcacctacgacacccaaaagatcaatttgtatgattccttcgaggcttctaaaaaggcatgtgatcagctgtctctaggtgttgcggctatcttcgggcctagtcatagttcttcagctaatgcagtacagtcaatttgtaatgctctgggcgtgcctcatattcagaccaggtggaagcaccaggtatcagacaacaaggacagcttctacgtgagcctgtacccagatttctcgtccctgtcgagagcaatactggatctcgtccagttcttcaagtggaagaccgtaacagttgtctacgatgactccactgggctgattcgactgcaagaacttattaaggccccctcccgctataacctgcgcttgaagattcggcaactgcctgccgacactaaagacgcgaagccactcctcaaagagatgaaacggggcaaggagtttcacgtgatcttcgactgcagccacgagatggccgcaggcatactgaaacaagctttggcgatgggcatgatgaccgaatattaccattacattttcaccacactggacctcttcgccctggatgtcgagccttacagatacagcggcgtgaacatgacaggttttagaattctgaacactgaaaatacacaggtgagtagcatcatagagaaatggtcaatggaaaggctgcaagcccctcctaaaccagatagcggactgctcgacgggtttatgacaactgatgcagctctgatgtatgatgcagtccatgtagtgtcagtcgccgtgcagcaatttcctcagatgacagtgtcctctctacagtgtaacagacataaaccctggcgatttggcacccggttcatgtccctcattaaagaggcacactgggagggcctaactggacgcattactttcaataaaaccaacggtctgcgcacagatttcgatcttgacgtgatctcgctgaaagaagaaggactcgaaaagatagggacctgggatcccgcttccggtctgaacatgactgaaagtcagaagggcaaacctgctaacatcactgactccctatcgaatcgaagcctgatcgttaccaccattttggaagaaccttatgtgctgtttaaaaagagtgataaacctctctacggcaacgatcgatttgaggggtattgtatcgacttgttaagggagctcagtactatattaggtttcacctacgagatccgcctggtggaggatggaaaatacggcgcgcaggacgacgccaatgggcagtggaatggcatggtcagggaacttattgaccataaggctgacctggcagtggccccgctggcgatcacttacgttagggaaaaggtcatcgacttctccaagccctttatgaccctgggcatcagcatcctgtaccggaaacctaacggcactaaccctggggtgttctctttcctaaatcccctgagtcccgatatttggatgtacatcctcttggcgtatcttggagtgagctgcgtgttgttcgtcatcgcccgcttcagcccttatgagtggtataatccgcacccgtgcaaccccgacagtgatgtggtggaaaacaatttcaccctactgaattctttctggttcggcgtgggagccctgatgcagcagggttctgaattgatgcccaaagcgctttctacccgcatagttggaggtatctggtggttcttcaccctcatcatcatttccagctacaccgcaaatcttgctgcgtttcttacagtggagcgcatggagtctcccatagactccgccgatgatctggccaagcagacgaagatcgaatacggagctgttgaggacggtgccaccatgaccttttttaagaaaagcaagattagcacctacgacaaaatgtgggccttcatgtcttcgcgccggcaatctgtgctagtgaagagcaatgaggagggcatacagcgcgtgctaacaagtgattacgcctttctcatggagtccactacaatcgaatttgtgactcaacggaactgtaacctcacccaaattggagggctaatagattcaaagggatatggtgtcggtacccctatgggcagtccttacagggacaagattacaatcgccattctgcaactgcaggaggagggcaaattgcatatgatgaaagaaaagtggtggcggggtaacgggtgccccgaagaagaatctaaagaggccagcgcactcggcgttcagaacatcggcggcattttcattgtacttgcagcaggactggtcctgtcagtgtttgttgctgtcggtgagttcttatacaaatcaaagaaaaacgcacagctcgagaaagaaagcagtatttggctagtccctccttaccaccctgatactgtgtag

SEQ ID NO: 330275 - DNA, 2610 bp, Artificial Sequence
  derived and/or modified sequence
atgaagatcatattcccgatcctttcaaacccagtgtttcgccggaccgtaaagctcctgttgtgcttactgtggattggttacagccagggaaccacacacgttttacgttttggtgggatcttcgagtacgtagagtccggtccaatgggagctgaagagttggctttccgctttgctgtcaatacaatcaacaggaaccggacacttctgcctaacacaactctgacatatgatactcagaaaatcaatttatacgactctttcgaggcttccaaaaaggcatgcgaccaactgtcgttaggggtcgcagcgatttttggcccctctcattctagttcagcgaatgctgtgcagagcatatgcaacgccctaggggtaccacatatccagacccgctggaagcaccaggttagcgataacaaagattctttctacgtgtcactctaccccgatttctcctcgctctcacgggccattttggaccttgttcagttttttaaatggaagactgtgacagtggtgtatgatgattctacaggactcatacggctacaggaactgatcaaggcaccgtctcgatacaacctgaggctcaagatcagacagctcccggccgacacaaaagacgcaaagccactgcttaaggagatgaaacgaggcaaagagttccatgtcatcttcgactgctcacatgaaatggcggccggcattctcaaacaagcactcgctatgggcatgatgacggagtactatcactacatcttcactactctcgatctgttcgcccttgacgtagaaccttatcgctatagtggagttaatatgacaggtttcagaatcctcaatactgaaaacacacaggtgagctccatcattgagaaatggagcatggagaggctacaggcccctcccaagccagatagcgggctgctcgatggatttatgaccacagacgccgcccttatgtatgacgccgttcacgttgtcagcgtcgcggtccagcaatttccgcaaatgacagtgagctccctacagtgtaataggcacaaaccctggcgcttcggaactcgcttcatgtcgctcattaaagaggcacattgggagggcttaacgggacgcataacctttaacaagaccaatggcctacgaactgacttcgacctggatgtaatcagtctgaaagaggaggggctggagaaaataggcacatgggaccctgcttccggcctcaatatgaccgaaagtcagaaagggaagcctgccaacatcactgacagcctgagcaatcggagcctcattgtgacgaccattcttgaagagccgtatgttctgtttaaaaagtcagacaaacctttgtacggcaatgaccgcttcgagggatattgcattgatttgctgcgggagctctcgaccatcttaggctttacatatgaaatccgcctcgtcgaagatggaaagtatggggctcaggacgacgctaatggtcagtggaacggtatggttcgcgagttaatcgatcataaggctgacttggcagttgcgccactggccattacttatgtgagagagaaggttatcgatttcagcaaaccgttcatgacacttggcatctccattctgtaccgtaagccaaatggcactaacccgggggttttctcgtttctaaatccactgtcccctgatatctggatgtacatcctgctggcgtacctgggagtgtcctgtgtgctgttcgtcattgcaagattcagcccttacgagtggtacaacccacatccctgcaaccccgactctgacgtggtggaaaataatttcacactactgaacagtttctggtttggtgtgggggctctgatgcagcagggcagtgagctgatgcctaaggctctgagcaccaggatcgtaggggggatttggtggtttttcacgctaataatcatctcttcatacacagctaacctggccgccttccttaccgttgagcggatggaaagtcctatcgactctgcagacgacctggcaaaacaaacaaagattgaatacggagccgtggaagacggtgctactatgacattcttcaagaagagcaaaatctctacttatgacaagatgtgggcctttatgagctcacgtcgtcagagcgtgttggtgaaatccaatgaagagggcatacagcgcgtactgaccagcgactacgccttcctcatggagtccacgacaatcgaatttgtgactcagcgcaactgtaacctgacacagattggtggcctgattgacagcaaagggtatggagtcggaacacctatgggaagcccataccgcgacaaaatcaccatcgcaatcttgcagcttcaggaagaggggaagttgcacatgatgaaagaaaaatggtggagaggaaacggttgtccagaggaggaatcaaaagaggctagcgctctaggtgtacaaaatataggaggaattttcattgttcttgccgcgggcctggtgctgagtgtgttcgtggccgtgggcgagttcctctataagtccaagaagaatgcccagctggagaaagaaagctccatttggctggtaccgccgtatcatcctgacacagtgtag

SEQ ID NO: 330276 - DNA, 2610 bp, Artificial Sequence
  derived and/or modified sequence
atgaagattattttcccgattctaagtaatccagtcttcaggcgcaccgttaaactcctgctctgtttactgtggattggatattctcaaggaaccacacatgtattaagatttggtggtatttttgaatatgtggaatctggcccaatgggagctgaggaacttgcattcagatttgctgtgaacacaattaacagaaacagaacattgctacccaatactacccttacctatgatacccagaagataaacctttatgatagttttgaagcatccaagaaagcctgtgatcagctgtctcttggggtggctgccatcttcgggccttcacacagctcatcagcaaacgcagtgcagtccatctgcaatgctctgggagttccccacatacagacccgctggaagcaccaggtgtcagacaacaaagattccttctatgtcagtctctacccagacttctcttcactcagccgtgccattttagacctggtgcagtttttcaagtggaaaaccgtcacggttgtgtatgatgacagcactggtctcattcgtttgcaagagctcatcaaagctccatcaaggtataatcttcgactcaaaattcgtcagttacctgctgatacaaaggatgcaaaacccttactaaaagaaatgaaaagaggcaaggagtttcatgtaatctttgattgtagccatgaaatggcagcaggcattttaaaacaggcattagctatgggaatgatgacagaatactatcattatatctttaccactctggacctctttgctcttgatgttgagccctaccgatacagtggtgttaacatgacagggttcagaatattaaatacagaaaatacccaagtctcctccatcattgaaaagtggtcgatggaacgattgcaggcacctccgaaacccgattcaggtttgctggatggatttatgacgactgatgctgctctaatgtatgatgctgtgcatgtggtgtctgtggccgttcaacagtttccccagatgacagtcagttccttgcagtgtaatcgacataaaccctggcgcttcgggacccgctttatgagtctaattaaagaggcacattgggaaggcctcacaggcagaataactttcaacaaaaccaatggcttgagaacagattttgatttggatgtgatcagtctgaaggaagaaggtctagaaaagattggaacgtgggatccagccagtggcctgaatatgacagaaagtcaaaagggaaagccagcgaacatcacagattccttatccaatcgttctttgattgttaccaccattttggaagagccttatgtcctttttaagaagtctgacaaacctctctatggtaatgatcgatttgaaggctattgcattgatctcctcagagagttatctacaatccttggctttacatatgaaattagacttgtggaagatgggaaatatggagcccaggatgatgccaatggacaatggaatggaatggttcgtgaactaattgatcataaagctgaccttgcagttgctccactggctattacctatgttcgagagaaggtcatcgacttttccaagccctttatgacacttggaataagtattttgtaccgcaagcccaatggtacaaacccaggcgtcttctccttcctgaatcctctctcccctgatatctggatgtatattctgctggcttacttgggtgtcagttgtgtgctctttgtcatagccaggtttagtccttatgagtggtataatccacacccttgcaaccctgactcagacgtggtggaaaacaattttaccttgctaaatagtttctggtttggagttggagctctcatgcagcaaggttctgagctcatgcccaaagcactgtccaccaggatagtgggaggcatttggtggtttttcacacttatcatcatttcttcgtatactgctaacttagccgcctttctgacagtggaacgcatggaatcccctattgactctgctgatgatttagctaaacaaaccaagatagaatatggagcagtagaggatggtgcaaccatgacttttttcaagaaatcaaaaatctccacgtatgacaaaatgtgggcctttatgagtagcagaaggcagtcagtgctggtcaaaagtaatgaagaaggaatccagcgagtcctcacctctgattatgctttcctaatggagtcaacaaccatcgagtttgttacccagcggaactgtaacctgacacagattggcggccttatagactctaaaggttatggcgttggcactcccatgggttctccatatcgagacaaaattaccatagcaattcttcagctgcaagaggaaggcaaactgcatatgatgaaggagaaatggtggaggggcaatggttgcccagaagaggagagcaaagaggccagtgccctgggggttcagaatattggtggcatcttcattgttctggcagccggcttggtgctttcagtttttgtggcagtgggagaatttttatacaaatccaaaaaaaacgctcaattggaaaaggaatcttctatttggttagtgccaccataccatccagacactgtttag

SEQ ID NO: 330277 - DNA, 2610 bp, Artificial Sequence
  derived and/or modified sequence
atgaagatcatcttccccatcctgagcaaccctgtgttccggaggacagtgaagctgctgctgtgcctgctgtggattggctacagccagggcaccacccacgtgctgcgctttggaggcatctttgaatatgtggagagcggccccatgggcgctgaggagctggccttccgctttgctgtgaacaccatcaacagaaacagaaccctgctgcccaacaccaccctgacctatgacacccagaagatcaacctgtatgacagctttgaggccagcaagaaggcctgtgaccagctgagcctgggcgtggccgccatcttcggccccagccacagcagcagcgccaatgctgtgcagagcatctgcaatgccctgggcgtgccccacatccagacccgctggaagcaccaggtgtctgacaacaaggacagcttctacgtgtccctgtacccagacttcagcagcctgagccgggccatcctggacctggtgcagttcttcaagtggaagacagtgacagtggtgtatgatgacagcacaggcctcatccggctgcaggagctgatcaaggcccccagccgctacaacctgcggctgaagatccggcagctgcctgctgacaccaaggatgccaagcccctgctgaaggagatgaagaggggcaaggagttccacgtgatctttgactgcagccatgagatggccgccggcatcctgaagcaggccctggccatgggcatgatgacagagtactaccactacatcttcaccaccctggacctgtttgccctggatgtggagccctaccgctacagcggcgtgaacatgacaggcttccgcatcctgaacacagagaacacccaggtgagcagcatcatcgagaagtggagcatggagcggctgcaggccccacccaagccagattctggcctgctggatggcttcatgaccacagatgctgccctgatgtatgatgctgtgcacgtggtgtctgtggccgtgcagcagttcccccagatgacagtgagcagcctgcagtgcaacagacacaagccctggaggtttggcacccgcttcatgagcctcatcaaggaggcccactgggagggcctgaccggccgcatcaccttcaacaagaccaacggcctgaggacagactttgacctggatgtgatcagcctgaaggaggagggcctggagaagattggcacctgggaccctgccagcggcctgaacatgacagagagccagaagggcaagccagccaacatcacagacagcctgagcaacagaagcctcatcgtgaccaccatcctggaggagccctacgtgctcttcaagaagagtgacaagcccctgtatggaaatgacagatttgagggctactgcatcgacctgctgcgggagctgagcaccatcctgggcttcacctatgagatccggctggtggaggatggcaagtacggggcccaggatgatgccaacggccagtggaatggcatggtgcgggagctgattgaccacaaggctgacctggccgtggcccccctggccatcacctacgtgcgggagaaggtgattgacttcagcaagcccttcatgaccctgggcatcagcatcctgtacaggaagcccaacggcaccaaccctggggtcttctccttcctgaaccccctgagcccagacatctggatgtacatcctgctggcctacctgggcgtgtcctgtgtgctgtttgtgattgcccgcttcagcccctatgagtggtacaacccccacccctgcaacccagacagtgatgtggtggagaacaacttcaccctgctgaacagcttctggtttggagtgggcgccctgatgcagcagggcagcgagctgatgcccaaggccctgagcaccagaattgtgggcggcatctggtggttcttcaccctcatcatcatcagcagctacacagccaacctggccgccttcctgactgtggagaggatggagagccccatcgacagcgcagatgacctggccaagcagaccaagattgaatatggagctgtggaggatggagccaccatgaccttcttcaagaagagcaagatcagcacctatgacaagatgtgggccttcatgagcagccggcggcagagcgtgctggtgaagagcaatgaggagggcatccagagggtgctgaccagtgactatgccttcctgatggagagcaccaccatcgagtttgtgacccagaggaactgcaacctgacccagattggaggcctgattgacagcaagggctacggcgtgggcacccccatgggcagcccctacagagacaagatcaccatcgccatcctgcagctgcaggaggagggcaagctgcacatgatgaaggagaagtggtggagaggaaatggctgcccagaggaggagagcaaggaggccagcgccctgggcgtgcagaacatcggcggcatcttcatcgtgctggccgccggcctggtgctgtctgtgtttgtggccgtgggggagttcctgtacaagagcaagaagaatgcccagctggagaaggagagcagcatctggctggtgcccccctaccacccagacacagtgtag

SEQ ID NO: 330278 - DNA, 2610 bp, Artificial Sequence
  derived and/or modified sequence
atgaagatcatcttccccatcctgagcaaccccgtgttccggcggaccgtgaaacttctgctgtgcttgttatggatcggctacagtcagggaacaactcacgttttgaggtttggggggatcttcgaatatgttgagtcaggcccaatgggggccgaagagcttgccttccgctttgcagtcaatacgatcaacaggaatcgtactctactgcctaatacaacgctgacttacgacacccagaagatcaacttgtatgacagctttgaagcatctaaaaaggcttgtgatcaactttctcttggcgtcgccgccatcttcggcccaagccactcctcatctgccaatgctgtccagtcaatctgcaatgcccttggggtgccccacatccagactcgctggaagcaccaggtatctgacaacaaagactcgttttatgtgagtctgtatccagatttttcctccttgtcgagggccatactggatctcgtacagttcttcaagtggaaaacagtgacagtggtgtacgacgacagtaccgggctcattcggctgcaggaactcattaaggctccaagcaggtataatttgcgcctgaagattcgtcagctgcccgccgataccaaggatgctaagcctttacttaaggaaatgaagagaggcaaagagtttcatgtgatcttcgactgctcccatgagatggccgccggaatattgaaacaagccttagccatggggatgatgacggagtactatcattacatcttcactaccctggacttgttcgcacttgacgtcgagccttatcgctacagtggcgtgaacatgaccggcttcaggattcttaacaccgagaacacacaggtaagtagcatcatcgaaaaatggtcgatggagcggctgcaagccccaccaaagcccgatagcggactgcttgatggctttatgaccaccgacgccgcgctgatgtatgacgcggtgcacgtggttagcgtggccgtgcaacaatttccgcagatgactgtgtcctccctccagtgcaaccgacataagccgtggcggtttggaaccaggttcatgagcctgattaaggaagcacactgggaagggctcacaggtcgtattacctttaataagactaacggattgcgcaccgacttcgatctcgatgtgattagcctcaaggaagaggggctcgaaaagatcggaacgtgggatcccgcttctggcctgaacatgaccgaaagccagaagggcaagccagctaatatcacagacagcctcagcaatcgcagcctgatagtgacaacaattcttgaagaaccgtacgtgttgtttaaaaaatcagacaagcctctgtatggcaatgaccgatttgagggctactgtattgatttgcttagagagttgagtacaattctgggatttacttatgagatccgcctggttgaagacggaaagtacggagctcaggacgatgctaatggacagtggaatggtatggttagggagctgatagatcataaagctgacctcgctgtcgctccactcgcaatcacctatgtaagggaaaaagtaatcgatttttccaagccgttcatgactttgggcatcagcattctttacaggaagcctaacggcaccaaccctggagtctttagctttctcaatccgttgtctcccgacatctggatgtacatactgctggcctatctcggcgtgtcttgcgtgttgtttgttattgctcgtttcagtccctacgagtggtataacccccatccgtgcaatccagacagtgatgtggttgaaaacaactttacattgctaaattctttttggttcggcgtgggagcccttatgcagcaggggtccgaattgatgccaaaagccctgtcaacaagaatcgttggcggcatatggtggtttttcactctgatcattattagctcctatacggccaatctcgccgcattcctcacggttgagcgaatggaaagccccattgactctgctgacgacctcgcaaagcagactaaaattgagtacggagctgtcgaagatggcgccaccatgacattcttcaagaaatccaagatctctacatatgataagatgtgggctttcatgagctccagaagacagtctgtattggtcaagagcaacgaagagggcatccaaagagtccttacgtcagattatgcttttctgatggaaagtaccactatagaattcgtgactcagaggaattgcaacctgacccagatcggaggcttgattgatagtaagggatacggtgttggaacacctatgggttctccctatagagacaaaattactatcgctattctgcagctgcaggaggaagggaagctgcatatgatgaaggaaaaatggtggcgcgggaatggctgcccagaagaagaatcaaaagaggcttctgcgctgggtgttcagaatatcggagggattttcattgtcctggcagctggtctcgtacttagtgtgtttgtagccgtgggagaattcctgtataagagcaaaaagaatgcgcaactcgagaaggagtcctcgatctggctcgtgcctccttatcaccccgatacggtgtag

SEQ ID NO: 330279 - DNA, 2610 bp, Artificial Sequence
  derived and/or modified sequence
atgaagatcatcttccccatcctgagcaaccccgtgttccggcggacggtgaaattgctcctgtgtctactgtggataggatactctcagggtaccacgcacgtgttgcgcttcggaggcattttcgagtacgtggagtccggacctatgggggcggaggaactggctttccgctttgccgttaatactattaaccgtaataggacactgctccccaataccacccttacatatgacacacagaagattaacctttatgacagcttcgaggctagtaaaaaggcatgtgaccaattgtctttgggcgtcgcagctatttttggaccctcgcattcgtcttcagcaaatgcggtccagtctatctgcaatgcccttggagtcccacacatacagaccaggtggaaacaccaagtatccgacaataaagactccttctacgtcagcctgtaccctgatttttcaagtctgtccagagctatcctagacctggtccagttcttcaagtggaaaaccgtgaccgtagtttacgatgattcaactggtctgataaggttgcaggaactgatcaaagcaccaagtaggtataatctacggctcaagatccgtcagcttccagccgacacaaaagatgcaaaacctctgctcaaggagatgaagcggggaaaagagttccacgtcatcttcgattgcagtcacgagatggcggctggaattcttaaacaggccctggcaatgggaatgatgaccgagtactaccattatatctttacaaccctggaccttttcgcactcgacgtggaaccatatagatattccggagttaacatgacgggctttcgaatcctcaatacagagaacacacaggtctcctctataattgaaaaatggtcaatggagaggctgcaggcaccacctaaacctgactccggcctcctggacgggtttatgaccactgatgcagcattaatgtacgatgctgtccatgttgtcagcgtcgccgttcagcagtttcctcaaatgaccgtctcttccctccagtgcaaccggcataagccttggcgctttggaacccgctttatgtccctgatcaaagaagctcactgggaggggctgacaggaagaatcacttttaacaaaaccaacggactgcggacagattttgatctcgacgtcatctcccttaaagaagaaggtctcgaaaagatcgggacgtgggatccagcctccggcctgaacatgacagagtcccaaaaagggaagccagctaatataacggactcactaagtaacaggtctctcatcgtcaccacaattctggaagagccttacgtgttatttaagaagtctgacaagcctctctacggcaacgacagattcgagggctattgtattgacctgctccgtgagcttagcaccatactcggattcacatacgaaatcagattggtggaagacggcaagtacggggcccaggatgatgctaatggccagtggaatgggatggttcgtgagctgatcgaccataaggccgacctggcagttgccccgctagccataacctacgtgcgcgagaaggtcattgatttctcaaagccctttatgactctgggcatcagcatcctgtaccgcaaaccaaatggcaccaatcctggagtgttcagctttctcaatcccttaagtccagacatctggatgtacatcctcctggcttacttgggagtttcctgtgttctttttgttattgcgagattcagcccctacgagtggtacaacccgcacccctgcaaccctgattccgatgtggtggagaacaacttcacactgttaaacagcttctggtttggggtgggcgccctgatgcaacagggtagtgagctgatgcctaaggctctgtccacacgcattgtgggaggtatctggtggttttttacactgatcataatcagctcttataccgccaatctggcagcatttttgaccgtggagcggatggagtccccaatcgacagtgcagacgatctggccaagcagacaaaaatcgaatatggcgctgttgaagatggagccaccatgacttttttcaagaagtcgaaaataagcacgtacgataagatgtgggccttcatgagttcaagacgccagtccgtactggttaagagcaacgaagaaggcattcaaagggtgctgacatctgactacgcttttctgatggagagcaccacaattgaattcgtcacccagcggaattgtaacttgacccagattggaggcctgatagatagcaaaggttatggagtgggcaccccgatgggttcaccctacagggataaaataacaattgctatcctgcagcttcaggaagaaggcaaattgcacatgatgaaagaaaagtggtggcgcggcaatgggtgcccggaggaggaatccaaggaggcaagcgctctgggcgtgcagaatattggcgggatttttatagtgctggctgccggactagtcctttctgtgttcgtggccgtgggggagttcctgtataaaagcaagaagaatgcccaactcgagaaggagagttctatttggctggttcctccttatcatcctgacactgtctag

SEQ ID NO: 330280 - DNA, 2610 bp, Artificial Sequence
  derived and/or modified sequence
atgaaaatcatttttcccatcctaagtaacccagtcttccgtcgaaccgttaaactgctcctctgcctcctctggataggttattcacaaggcacgacccacgtcttaaggtttggcggaattttcgagtatgttgaaagcggaccgatgggcgctgaagagttggcgttccgctttgcagtgaatacgattaacaggaaccggacgctgctgccgaacaccactctaacttatgatacccagaagatcaatctctacgactcgtttgaagcctcaaagaaggcgtgcgatcaactgtcactgggggtggccgcaattttcggcccaagtcactcctcaagcgctaatgccgtgcagagcatctgcaacgctctgggagtaccccatatccagacaaggtggaaacaccaagtgagtgacaataaggatagtttctatgtaagtctctaccctgactttagcagcctgtcccgcgcaatactggatctcgttcaattcttcaagtggaagactgtgacagtggtgtatgacgattcgaccgggctcatcaggcttcaggagctgatcaaggcaccatctcgatataacctgagattgaagatccgacaactgcccgctgataccaaggacgcaaagccactgctgaaagaaatgaaaaggggtaaagagtttcacgtgatcttcgactgttcccatgagatggctgcagggattttgaagcaagccttagcaatgggtatgatgacagagtattatcactacatattcacaactctggaccttttcgctcttgacgtggagccatatagatattccggggtcaatatgactggattcagaatcctcaacaccgagaacacacaggtcagcagtataatagagaagtggtcgatggagagactgcaagccccacctaagccagattcgggtcttctcgatgggttcatgaccaccgatgccgctttgatgtatgatgccgtccacgtggtgagcgtggcagtgcagcagttccctcagatgacagtctcctctctgcagtgtaatcgtcacaagccctggcgtttcggtacccggttcatgtcgctcataaaggaagctcactgggaaggcctaacagggaggattacatttaataagactaacgggctcagaacggattttgatttggacgtgatcagcctaaaggaagaaggccttgagaagattgggacgtgggatcccgcatccggcttgaacatgaccgagtcccaaaagggtaagcccgctaatataacggatagcctgtctaaccgaagcctgattgtgacgacaatcctggaagaaccttatgtactttttaagaagagtgacaagcctctgtatggaaacgacaggtttgaggggtactgcattgatcttttaagggagctctccactattttaggttttacatacgagatccgcttggtcgaggacggtaagtatggcgcacaggacgacgccaatggccagtggaatggcatggtgagggaactaattgatcacaaagcagacctcgccgttgccccattggcaatcacatacgtgcgcgagaaggtgatcgatttctccaaacccttcatgactttgggcataagcattttgtacagaaaacctaatggcacaaatccaggtgtgttcagttttcttaaccccctatctccagatatctggatgtatattctgttagcttacctgggggtctcctgtgtgctattcgtgatcgcacgtttctcaccctacgagtggtataatcctcacccttgcaatcccgatagcgacgtagtggaaaacaacttcacactgttgaatagtttctggttcggcgtgggggcactaatgcagcagggttctgagctgatgcccaaggcactttcaaccaggatagtcgggggtatctggtggttcttcaccttgatcataatttcttcctacactgccaatctggcagcttttctgactgtggaaaggatggagtcacccattgattccgcagatgatttggcaaaacaaaccaagattgaatatggtgccgtcgaggatggggctacaatgacattttttaagaagtctaagatctccacatatgataagatgtgggccttcatgagtagtcgtaggcagtctgtcttggtaaagagcaacgaggagggaattcagagggtcctgacatctgattacgcatttctcatggagtcaacaactattgaattcgtcacccagcgaaattgtaacctgacacaaattggcggactcatagattctaagggctacggcgtcggcacacccatgggatctccctaccgagacaaaattaccattgcgattttgcaattacaggaagagggtaaactgcacatgatgaaggagaagtggtggcgcggtaacggatgcccggaggaagagtcaaaagaggcctctgcattgggcgtacagaatatcggcggaattttcatcgtactggccgcagggttggtcctgagcgtgtttgtcgctgtcggtgagttcctgtataagagcaagaaaaacgcccaactggagaaggagagctctatctggctggtcccgccataccatccagatactgtttag

SEQ ID NO: 330281 - DNA, 2610 bp, Artificial Sequence
  derived and/or modified sequence
atgaagattatatttcccatcctctccaaccctgtgttcaggcggactgttaaactcctgctgtgccttctatggataggatattcccaaggcacgacgcacgtgctgcgctttggtggaatattcgaatatgtggaaagcgggcctatgggggctgaagaactggcatttagattcgcagtcaatacgattaatcggaatagaaccctactgcctaacacaaccctcacgtacgatacacagaagatcaacctctacgatagtttcgaggcttcaaaaaaggcatgtgaccagttgtcattaggagttgccgcaatattcggcccttctcatagcagcagcgcaaacgcggtacaatctatctgtaatgctttgggcgtgccacacatccaaaccagatggaaacaccaggtatccgataacaaagattccttctatgttagcttgtacccagacttctcttctctgtccagggcgatactggatctggtccagttttttaagtggaagacagtcacagtcgtgtatgatgattcgaccggactgataagactgcaggagttaattaaagcaccctctcggtacaatctccgcctgaagatcaggcagctaccagcggatacaaaggatgctaagcctttgttaaaggaaatgaaacgtggcaaagagttccacgttattttcgattgtagccacgaaatggccgctgggattctgaaacaagctttagctatgggtatgatgacagagtattaccactacatattcaccactctcgacctcttcgctctcgacgttgagccctacagatacagcggtgttaatatgacagggtttaggatcctgaacacagaaaatacccaggtgtccagcataatagaaaagtggtccatggaaaggctacaggcaccaccgaagcctgattcagggctgctggatgggtttatgactactgatgctgcactgatgtacgatgctgtgcacgttgtcagcgtagctgtacagcagttcccccagatgacggtgtcctccctgcaatgtaaccgtcacaaaccctggagatttggaactcgttttatgtctctgatcaaagaggcacactgggaaggtctgaccggaagaatcacctttaataagacaaacggcctgcggacggattttgatctggatgtgatttcccttaaagaggagggactggagaaaatcggaacatgggaccccgcatccggtctgaacatgactgaatcccaaaaggggaagcctgcaaacataaccgacagcttgtccaataggtcactcatcgttaccactattttagaagaaccatatgtcctgttcaaaaagtccgataagccactatacggcaatgaccgcttcgagggatactgcatagatctgcttagggagctcagcacaatcctgggctttacttatgagattagactggtggaagacggaaagtacggggctcaggacgatgccaacggtcaatggaacggcatggtgcgggagctcatcgaccataaagccgatttagccgttgccccattagctattacatatgtccgcgaaaaagtgatcgacttttccaagccatttatgacactgggtatttccatcctctatcggaagccaaatggaaccaaccccggtgtcttctcctttctcaatcctctcagtcccgacatttggatgtatatcctgcttgcatatctcggagtgagttgtgtattgtttgttatcgcacggttctccccctacgagtggtataaccctcatccttgcaatcctgactctgatgtggtggagaacaattttacccttcttaattcattttggttcggcgtaggcgctctgatgcagcaaggtagcgagctgatgcctaaggcgttgtctacaaggatagtgggaggtatctggtggttcttcacactgattataatctcttcttacactgctaacctcgcagcctttttgactgtcgagaggatggaaagcccaatagactcggctgacgacttggcaaaacagactaaaattgagtacggcgcagtggaagacggagctacaatgacgtttttcaagaagtccaagatatctacatacgataagatgtgggcttttatgagttcccgcaggcagtcagttcttgtaaagtcaaacgaggaagggattcagcgcgtcctaacaagcgactacgcctttttaatggaatcaaccacgatagaattcgtcacccagaggaattgcaaccttacacagatcggtggcctgatagattccaaaggttatggcgtgggcacccctatgggctcaccctacagggataaaatcactattgcaatccttcagctgcaggaagagggaaaacttcatatgatgaaggagaaatggtggcgagggaatggttgtcccgaggaagagagtaaggaggctagcgccctcggcgtgcagaacatcggcggaatcttcatcgtcctggccgctggcctggtgctgtcagtctttgttgccgtcggagagttcttgtataagtcgaaaaagaatgctcaactcgaaaaagagtcttctatctggctcgtgccaccttatcatcccgatactgtttag

SEQ ID NO: 330282 - DNA, 2610 bp, Artificial Sequence
  derived and/or modified sequence
atgaagatcatcttccccatcctgagcaaccccgtgttcagaagaaccgtgaagctgctgctgtgcctgctgtggatcggctacagccagggcaccacccacgtgctgagattcggcggcatcttcgagtacgtggagagcggccccatgggcgccgaggagctggccttcagattcgccgtgaacaccatcaacagaaacagaaccctgctgcccaacaccaccctgacctacgacacccagaagatcaacctgtacgacagcttcgaggccagcaagaaggcctgcgaccagctgagcctgggcgtggccgccatcttcggccccagccacagcagcagcgccaacgccgtgcagagcatctgcaacgccctgggcgtgccccacatccagaccagatggaagcaccaggtgagcgacaacaaggacagcttctacgtgagcctgtaccccgacttcagcagcctgagcagagccatcctggacctggtgcagttcttcaagtggaagaccgtgaccgtggtgtacgacgacagcaccggcctgatcagactgcaggagctgatcaaggcccccagcagatacaacctgagactgaagatcagacagctgcccgccgacaccaaggacgccaagcccctgctgaaggagatgaagagaggcaaggagttccacgtgatcttcgactgcagccacgagatggccgccggcatcctgaagcaggccctggccatgggcatgatgaccgagtactaccactacatcttcaccaccctggacctgttcgccctggacgtggagccctacagatacagcggcgtgaacatgaccggcttcagaatcctgaacaccgagaacacccaggtgagcagcatcatcgagaagtggagcatggagagactgcaggccccccccaagcccgacagcggcctgctggacggcttcatgaccaccgacgccgccctgatgtacgacgccgtgcacgtggtgagcgtggccgtgcagcagttcccccagatgaccgtgagcagcctgcagtgcaacagacacaagccctggagattcggcaccagattcatgagcctgatcaaggaggcccactgggagggcctgaccggcagaatcaccttcaacaagaccaacggcctgagaaccgacttcgacctggacgtgatcagcctgaaggaggagggcctggagaagatcggcacctgggaccccgccagcggcctgaacatgaccgagagccagaagggcaagcccgccaacatcaccgacagcctgagcaacagaagcctgatcgtgaccaccatcctggaggagccctacgtgctgttcaagaagagcgacaagcccctgtacggcaacgacagattcgagggctactgcatcgacctgctgagagagctgagcaccatcctgggcttcacctacgagatcagactggtggaggacggcaagtacggcgcccaggacgacgccaacggccagtggaacggcatggtgagagagctgatcgaccacaaggccgacctggccgtggcccccctggccatcacctacgtgagagagaaggtgatcgacttcagcaagcccttcatgaccctgggcatcagcatcctgtacagaaagcccaacggcaccaaccccggcgtgttcagcttcctgaaccccctgagccccgacatctggatgtacatcctgctggcctacctgggcgtgagctgcgtgctgttcgtgatcgccagattcagcccctacgagtggtacaacccccacccctgcaaccccgacagcgacgtggtggagaacaacttcaccctgctgaacagcttctggttcggcgtgggcgccctgatgcagcagggcagcgagctgatgcccaaggccctgagcaccagaatcgtgggcggcatctggtggttcttcaccctgatcatcatcagcagctacaccgccaacctggccgccttcctgaccgtggagagaatggagagccccatcgacagcgccgacgacctggccaagcagaccaagatcgagtacggcgccgtggaggacggcgccaccatgaccttcttcaagaagagcaagatcagcacctacgacaagatgtgggccttcatgagcagcagaagacagagcgtgctggtgaagagcaacgaggagggcatccagagagtgctgaccagcgactacgccttcctgatggagagcaccaccatcgagttcgtgacccagagaaactgcaacctgacccagatcggcggcctgatcgacagcaagggctacggcgtgggcacccccatgggcagcccctacagagacaagatcaccatcgccatcctgcagctgcaggaggagggcaagctgcacatgatgaaggagaagtggtggagaggcaacggctgccccgaggaggagagcaaggaggccagcgccctgggcgtgcagaacatcggcggcatcttcatcgtgctggccgccggcctggtgctgagcgtgttcgtggccgtgggcgagttcctgtacaagagcaagaagaacgcccagctggagaaggagagcagcatctggctggtgcccccctaccaccccgacaccgtgtag

SEQ ID NO: 330283 - protein, 832 aa, Artificial Sequence
  derived and/or modified sequence
MKIIFPILSNPVFRRTVKLLLCLLWIGYSQGTTHVLRFGGIFEYVESGPMGAEELAFRFAVNTINRNRTLLPNTTLTYDTQKINLYDSFEASKKACDQLSLGVAAIFGPSHSSSANAVQSICNALGVPHIQTRWKHQVSDNKDSFYVSLYPDFSSLSRAILDLVQFFKWKTVTVVYDDSTGLIRLQELIKAPSRYNLRLKIRQLPADTKDAKPLLKEMKRGKEFHVIFDCSHEMAAGILKQALAMGMMTEYYHYIFTTLDLFALDVEPYRYSGVNMTGFRILNTENTQVSSIIEKWSMERLQAPPKPDSGLLDGFMTTDAALMYDAVHVVSVAVQQFPQMTVSSLQCNRHKPWRFGTRFMSLIKEAHWEGLTGRITFNKTNGLRTDFDLDVISLKEEGLEKIGTWDPASGLNMTESQKGKPANITDSLSNRSLIVTTILEEPYVLFKKSDKPLYGNDRFEGYCIDLLRELSTILGFTYEIRLVEDGKYGAQDDANGQWNGMVRELIDHKADLAVAPLAITYVREKVIDFSKPFMTLGISILYRKPNGSELMPKALSTRIVGGIWWFFTLIIISSYTANLAAFLTVERMESPIDSADDLAKQTKIEYGAVEDGATMTFFKKSKISTYDKMWAFMSSRRQSVLVKSNEEGIQRVLTSDYAFLMESTTIEFVTQRNCNLTQIGGLIDSKGYGVGTPMGSPYRDKITIAILQLQEEGKLHMMKEKWWRGNGCPEEESKEASALGVQNIGGIFIVLAAGLVLSVFVAVGEFLYKSKKNAQLEKRSFCSAMVEELRMSLKCQRRLKHKPQAPVIVKTEEVINMHTFNDRRLPGKETMA

SEQ ID NO: 330284 - protein, 644 aa, Artificial Sequence
  derived and/or modified sequence
GGIFEYVESGPMGAEELAFRFAVNTINRNRTLLPNTTLTYDTQKINLYDSFEASKKACDQLSLGVAAIFGPSHSSSANAVQSICNALGVPHIQTRWKHQVSDNKDSFYVSLYPDFSSLSRAILDLVQFFKWKTVTVVYDDSTGLIRLQELIKAPSRYNLRLKIRQLPADTKDAKPLLKEMKRGKEFHVIFDCSHEMAAGILKQALAMGMMTEYYHYIFTTLDLFALDVEPYRYSGVNMTGFRILNTENTQVSSIIEKWSMERLQAPPKPDSGLLDGFMTTDAALMYDAVHVVSVAVQQFPQMTVSSLQCNRHKPWRFGTRFMSLIKEAHWEGLTGRITFNKTNGLRTDFDLDVISLKEEGLEKIGTWDPASGLNMTESQKGKPANITDSLSNRSLIVTTILEEPYVLFKKSDKPLYGNDRFEGYCIDLLRELSTILGFTYEIRLVEDGKYGAQDDANGQWNGMVRELIDHKSKISTYDKMWAFMSSRRQSVLVKSNEEGIQRVLTSDYAFLMESTTIEFVTQRNCNLTQIGGLIDSKGYGVGTPMGSPYRDKITIAILQLQEEGKLHMMKEKWWRGNGCPEEESKEASALGVQNIGGIFIVLAAGLVLSVFVAVGEFLYKSKKNAQLEKESSIWLVPPYHPDTV

SEQ ID NO: 330285 - DNA, 2499 bp, Artificial Sequence
  derived and/or modified sequence
atgaaaataatattccccatcctgagtaatcccgtatttaggcggacagtgaaattgttactgtgcttactctggattggctactctcagggaaccacccatgttctcagattcggcggcatttttgaatatgtggagagtgggccaatgggcgcagaggagctcgctttcaggtttgctgtgaatacgatcaacaggaatagaaccctactgcctaacacaacgttaacttacgacacacagaagattaatttatatgattctttcgaggcttcaaaaaaggcctgcgaccagttgtccttgggagtggccgctatctttgggccttcgcattcgtccagcgccaacgctgtccagtccatttgtaatgcacttggcgttccacacatccagactcgctggaaacatcaggtttctgataataaagactccttctacgtatccctatacccggactttagctcgctgtcccgcgcaatccttgatctggtccagttctttaagtggaaaactgtgactgtggtgtacgatgatagcacaggcctgatccgcctgcaggagctgatcaaggcccctagccggtacaatctgcggctgaaaatccgtcagttgcccgccgatacgaaggatgcaaagcctctgctaaaagagatgaagcgcggtaaggagtttcacgttatttttgactgctcgcatgagatggcagccgggattctgaagcaggctctggccatgggtatgatgaccgaatactatcactatattttcactaccttagacttatttgcactcgatgtcgaaccatatcgttacagcggcgtgaacatgaccggctttcgcatccttaatactgaaaacacacaggtcagctctattatcgaaaaatggagcatggaaagattgcaggctccacctaaaccggactctgggcttttggatggcttcatgacaactgacgctgctttaatgtatgacgcagtacacgtggtttctgtggccgtccagcagtttccacagatgacagtgagtagtcttcaatgtaaccgacacaagccgtggcgatttgggacccggttcatgtctctaattaaggaagcccactgggagggactcacgggccgtatcacttttaacaaaacaaatggtctccggacagacttcgatctcgatgtgatctctctgaaggaggagggactcgagaaaataggcacatgggatcctgcgagtggcctgaacatgaccgagagccagaagggtaagcccgcaaacatcactgactctctcagtaatcggtcgttaatcgtaacaacaattttggaggaaccatatgttctgttcaagaagtccgataagcccctttatggaaacgatcgcttcgagggctattgtatagacctgttaagggagctctcgaccattctcggttttacatatgaaatcagactcgtcgaggatggaaagtacggagcacaggatgacgccaatggccaatggaatggaatggtcagggaacttatcgatcacaaggctgatttggctgtagcccccctggctatcacttacgtacgagaaaaagtcatagattttagcaagccttttatgacgctggggataagtatcctttatagaaagcccaacggtagtgagctaatgcctaaggccctgagtacacgcattgtgggtggcatctggtggttctttaccttaataattatttcgtcctacaccgccaatctggcagcctttttgaccgtagaaagaatggagtccccaattgatagcgccgatgacctggcaaaacagaccaagatcgagtacggcgcagtggaagacggtgcaacgatgactttttttaaaaaatcaaagatctccacctatgacaagatgtgggccttcatgtccagcaggcgacagagtgtcctagttaaatccaatgaggagggaattcagagggtacttacctcggactatgcctttttgatggaatccaccactatagagtttgtcactcagcgcaattgtaatttaactcagataggtggcctaattgatagcaagggatacggagttggcacacctatgggaagtccttaccgcgacaagataaccattgctatcctccagctacaggaggagggcaagctacatatgatgaaagaaaaatggtggcggggcaatgggtgtcccgaagaggaatcaaaggaggcttcagctctcggcgtgcaaaatatcgggggaatttttatagtgttggccgctggattagttctcagtgtcttcgttgccgtgggagaattcctgtacaaatctaagaagaatgcccagctcgaaaaacggagtttttgctcagccatggtggaagagctgagaatgtctttaaagtgtcagcgcaggctaaagcacaaaccgcaggcccccgtgattgtgaagaccgaagaggttattaatatgcacaccttcaacgacaggaggcttcccggcaaagagactatggcctag

SEQ ID NO: 330286 - DNA, 2499 bp, Artificial Sequence
  derived and/or modified sequence
atgaagattattttcccgattctaagtaatccagtcttcaggcgcaccgttaaactcctgctctgtttactgtggattggatattctcaaggaaccacacatgtattaagatttggtggtatttttgaatatgtggaatctggcccaatgggagctgaggaacttgcattcagatttgctgtgaacacaattaacagaaacagaacattgctacccaatactacccttacctatgatacccagaagataaacctttatgatagttttgaagcatccaagaaagcctgtgatcagctgtctcttggggtggctgccatcttcgggccttcacacagctcatcagcaaacgcagtgcagtccatctgcaatgctctgggagttccccacatacagacccgctggaagcaccaggtgtcagacaacaaagattccttctatgtcagtctctacccagacttctcttcactcagccgtgccattttagacctggtgcagtttttcaagtggaaaaccgtcacggttgtgtatgatgacagcactggtctcattcgtttgcaagagctcatcaaagctccatcaaggtataatcttcgactcaaaattcgtcagttacctgctgatacaaaggatgcaaaacccttactaaaagaaatgaaaagaggcaaggagtttcatgtaatctttgattgtagccatgaaatggcagcaggcattttaaaacaggcattagctatgggaatgatgacagaatactatcattatatctttaccactctggacctctttgctcttgatgttgagccctaccgatacagtggtgttaacatgacagggttcagaatattaaatacagaaaatacccaagtctcctccatcattgaaaagtggtcgatggaacgattgcaggcacctccgaaacccgattcaggtttgctggatggatttatgacgactgatgctgctctaatgtatgatgctgtgcatgtggtgtctgtggccgttcaacagtttccccagatgacagtcagttccttgcagtgtaatcgacataaaccctggcgcttcgggacccgctttatgagtctaattaaagaggcacattgggaaggcctcacaggcagaataactttcaacaaaaccaatggcttgagaacagattttgatttggatgtgatcagtctgaaggaagaaggtctagaaaagattggaacgtgggatccagccagtggcctgaatatgacagaaagtcaaaagggaaagccagcgaacatcacagattccttatccaatcgttctttgattgttaccaccattttggaagagccttatgtcctttttaagaagtctgacaaacctctctatggtaatgatcgatttgaaggctattgcattgatctcctcagagagttatctacaatccttggctttacatatgaaattagacttgtggaagatgggaaatatggagcccaggatgatgccaatggacaatggaatggaatggttcgtgaactaattgatcataaagctgaccttgcagttgctccactggctattacctatgttcgagagaaggtcatcgacttttccaagccctttatgacacttggaataagtattttgtaccgcaagcccaatggttctgagctcatgcccaaagcactgtccaccaggatagtgggaggcatttggtggtttttcacacttatcatcatttcttcgtatactgctaacttagccgcctttctgacagtggaacgcatggaatcccctattgactctgctgatgatttagctaaacaaaccaagatagaatatggagcagtagaggatggtgcaaccatgacttttttcaagaaatcaaaaatctccacgtatgacaaaatgtgggcctttatgagtagcagaaggcagtcagtgctggtcaaaagtaatgaagaaggaatccagcgagtcctcacctctgattatgctttcctaatggagtcaacaaccatcgagtttgttacccagcggaactgtaacctgacacagattggcggccttatagactctaaaggttatggcgttggcactcccatgggttctccatatcgagacaaaattaccatagcaattcttcagctgcaagaggaaggcaaactgcatatgatgaaggagaaatggtggaggggcaatggttgcccagaagaggagagcaaagaggccagtgccctgggggttcagaatattggtggcatcttcattgttctggcagccggcttggtgctttcagtttttgtggcagtgggagaatttttatacaaatccaaaaaaaacgctcaattggaaaagaggtccttctgtagtgccatggtagaagaattgaggatgtccctgaagtgccagcgtcggttaaaacataagccacaggccccagttattgtgaaaacagaagaagttatcaacatgcacacatttaacgacagaaggttgccaggtaaagaaaccatggcataa

SEQ ID NO: 330287 - DNA, 2499 bp, Artificial Sequence
  derived and/or modified sequence
atgaagatcatcttccccatcctgagcaaccctgtgttccggaggacagtgaagctgctgctgtgcctgctgtggattggctacagccagggcaccacccacgtgctgcgctttggaggcatctttgaatatgtggagagcggccccatgggcgctgaggagctggccttccgctttgctgtgaacaccatcaacagaaacagaaccctgctgcccaacaccaccctgacctatgacacccagaagatcaacctgtatgacagctttgaggccagcaagaaggcctgtgaccagctgagcctgggcgtggccgccatcttcggccccagccacagcagcagcgccaatgctgtgcagagcatctgcaatgccctgggcgtgccccacatccagacccgctggaagcaccaggtgtctgacaacaaggacagcttctacgtgtccctgtacccagacttcagcagcctgagccgggccatcctggacctggtgcagttcttcaagtggaagacagtgacagtggtgtatgatgacagcacaggcctcatccggctgcaggagctgatcaaggcccccagccgctacaacctgcggctgaagatccggcagctgcctgctgacaccaaggatgccaagcccctgctgaaggagatgaagaggggcaaggagttccacgtgatctttgactgcagccatgagatggccgccggcatcctgaagcaggccctggccatgggcatgatgacagagtactaccactacatcttcaccaccctggacctgtttgccctggatgtggagccctaccgctacagcggcgtgaacatgacaggcttccgcatcctgaacacagagaacacccaggtgagcagcatcatcgagaagtggagcatggagcggctgcaggccccacccaagccagattctggcctgctggatggcttcatgaccacagatgctgccctgatgtatgatgctgtgcacgtggtgtctgtggccgtgcagcagttcccccagatgacagtgagcagcctgcagtgcaacagacacaagccctggaggtttggcacccgcttcatgagcctcatcaaggaggcccactgggagggcctgaccggccgcatcaccttcaacaagaccaacggcctgaggacagactttgacctggatgtgatcagcctgaaggaggagggcctggagaagattggcacctgggaccctgccagcggcctgaacatgacagagagccagaagggcaagccagccaacatcacagacagcctgagcaacagaagcctcatcgtgaccaccatcctggaggagccctacgtgctcttcaagaagagtgacaagcccctgtatggaaatgacagatttgagggctactgcatcgacctgctgcgggagctgagcaccatcctgggcttcacctatgagatccggctggtggaggatggcaagtacggggcccaggatgatgccaacggccagtggaatggcatggtgcgggagctgattgaccacaaggctgacctggccgtggcccccctggccatcacctacgtgcgggagaaggtgattgacttcagcaagcccttcatgaccctgggcatcagcatcctgtacaggaagcccaacggcagcgagctgatgcccaaggccctgagcaccagaattgtgggcggcatctggtggttcttcaccctcatcatcatcagcagctacacagccaacctggccgccttcctgactgtggagaggatggagagccccatcgacagcgcagatgacctggccaagcagaccaagattgaatatggagctgtggaggatggagccaccatgaccttcttcaagaagagcaagatcagcacctatgacaagatgtgggccttcatgagcagccggcggcagagcgtgctggtgaagagcaatgaggagggcatccagagggtgctgaccagtgactatgccttcctgatggagagcaccaccatcgagtttgtgacccagaggaactgcaacctgacccagattggaggcctgattgacagcaagggctacggcgtgggcacccccatgggcagcccctacagagacaagatcaccatcgccatcctgcagctgcaggaggagggcaagctgcacatgatgaaggagaagtggtggagaggaaatggctgcccagaggaggagagcaaggaggccagcgccctgggcgtgcagaacatcggcggcatcttcatcgtgctggccgccggcctggtgctgtctgtgtttgtggccgtgggggagttcctgtacaagagcaagaagaatgcccagctggagaagaggagcttctgcagcgccatggtggaggagctgaggatgagcctgaagtgccagaggcggctgaagcacaagccccaggcccctgtgattgtgaagacagaggaggtgatcaacatgcacaccttcaatgaccggcggctgcccgggaaggagaccatggcctag

SEQ ID NO: 330288 - DNA, 2499 bp, Artificial Sequence
  derived and/or modified sequence
atgaagatcatcttccccatcctgagcaaccccgtgttccggcggacagtgaaattacttctgtgtctactgtggatcgggtatagccagggaaccacgcatgtccttaggtttggtgggattttcgagtacgttgagtctgggccaatgggagccgaagagttagcattccgcttcgccgtgaacaccattaatagaaaccgtacactccttccaaacacaacactaacatatgatactcaaaagatcaacctgtacgactccttcgaggctagcaagaaagcttgcgatcagctatccctgggggtcgccgcaatatttggaccatcccactcctcatccgccaacgccgttcagtccatatgcaatgcactaggtgtcccccacatccagacacgctggaagcatcaggtgagtgataacaaggactccttttatgtgtcactatatcccgactttagttcgctgtctagggccatactcgaccttgtacagttttttaaatggaaaaccgtgactgttgtatatgatgactcaacaggtcttattagactacaggaactgataaaagcaccgagccgctacaacctgcggctcaagataaggcagctccccgcagacaccaaggatgctaagccattgttaaaggagatgaaacgggggaaagagttccacgtgattttcgactgctctcatgaaatggctgccggcatcctcaagcaggctctcgcaatgggaatgatgactgagtattaccactatatattcacaacactggaccttttcgccctggatgttgagccttaccgttattctggagttaacatgactggtttcagaatcctaaatactgaaaacactcaggtgagttctattatagagaaatggagtatggaaaggttgcaggctcctcccaagcctgatagtggcctccttgatggatttatgacaacagatgctgccctgatgtacgacgccgtgcatgtcgtgagcgtagccgttcagcagtttcctcagatgacagtaagctctctccagtgcaataggcacaaaccttggaggttcgggacacgctttatgtccttgatcaaggaggcccactgggaggggctgactggccgaataaccttcaacaagaccaacggcttaaggactgatttcgatctggacgtgataagcctaaaagaggagggtctagagaagataggtacatgggatcccgcaagtggcctcaacatgaccgagagtcagaagggtaaacccgccaacatcaccgatagcttgtctaacagatcactgattgtcaccaccattctcgaggagccttatgtgttgtttaaaaagagtgataagcccctgtacgggaatgaccgatttgagggctactgtattgatctgttgagagaactgagtacaattctcgggtttacatacgagattcgtttagtggaagacggtaagtatggcgcacaggatgatgccaatggacagtggaacggcatggtgcgcgagctgattgatcacaaggccgatctggccgttgccccactggctatcacatacgttcgagagaaagtgatagattttagcaaacccttcatgacactgggtattagcatcttgtaccggaagcctaacggtagcgagctgatgccgaaggccctcagtaccaggatcgtgggcggaatctggtggtttttcacactcattattatttctagctacacagcgaatctggctgccttcctcacggttgaaaggatggaatcgccaattgacagtgccgacgatctcgccaagcagaccaagattgaatatggggccgtggaagacggcgccacgatgacttttttcaagaagagcaagataagtacctatgacaagatgtgggcattcatgtcctcccgccgccagtctgttcttgtcaaatccaacgaggaaggtattcaaagagtcctgacctccgactacgcttttctaatggagagcaccaccatcgaatttgtgacccaacggaactgtaatctcacacagatcggcggactgatcgactccaagggttatggagtcggtactcctatgggatccccctatcgagacaaaattactattgccatcctgcaattgcaggaggaaggaaaattgcacatgatgaaggagaagtggtggcgagggaatggctgcccagaggaggagtccaaggaagccagcgctctgggcgtgcagaacataggcgggatttttatcgtgcttgcggcaggcttagtgctttctgtgttcgtggcagttggcgaatttctgtataagtcgaaaaaaaacgcacaattggaaaagaggtccttctgctctgcgatggtggaagaactccgtatgagcctgaaatgccaacgcagactcaaacataaacctcaggcgcccgtgatcgtcaagacagaggaagtgattaacatgcacactttcaatgatcgccgactacctgggaaggagaccatggcatag

SEQ ID NO: 330289 - DNA, 2499 bp, Artificial Sequence
  derived and/or modified sequence
atgaagatcatattccccatcctgtctaatccagttttcagacgcactgtgaaactcctgctatgcctcctgtggatcggatattcccagggtaccactcatgtgctgcgattcggaggaatctttgaatacgtggaaagcgggccaatgggtgcggaggaactggcgttcagatttgctgtgaacaccatcaaccgtaaccggactctcctacctaatacaacccttacttacgacacgcagaagattaatctgtacgactcatttgaggcctcgaagaaggcgtgtgaccagctgtctctgggtgtggccgctatctttggtccctcacactcctcttctgccaacgctgttcagtccatatgcaacgcactgggggtgccgcatattcaaactaggtggaagcaccaggtttcagataacaaggatagcttctacgtatcactttacccagacttttcgtctttatcccgggctattttggatctcgtgcagtttttcaaatggaagacagtaacggtggtttacgacgactccacaggtcttattaggttgcaggagctgatcaaggccccttcgcgctacaatctcaggctcaaaatacggcaattgcccgcagatacaaaggacgcaaagcctctactaaaggaaatgaagcgcggtaaggaattccacgtgatcttcgattgctcacacgaaatggccgcaggaatactgaagcaagctctcgccatgggcatgatgaccgaatactaccattacatcttcacaaccctcgatctctttgccctggatgtggagccataccggtatagcggggtgaatatgactggtttcagaatactcaataccgagaacacacaggtgagttcaataattgaaaagtggtcaatggaaaggctgcaggcacccccaaaacctgactccggtctgttagacggattcatgactacagacgctgctctgatgtacgacgcagtacacgtggtgagcgttgcagtacagcagtttcctcagatgacagtgagcagcctgcagtgtaaccggcataagccttggcgttttggcacaaggttcatgagcctcataaaggaggcacactgggagggtctgactgggagaatcacgttcaataaaactaatgggctgaggaccgacttcgatctcgacgtgatctcgctcaaagaggagggcctcgagaagatcgggacctgggatcctgcttctggcttgaatatgacagagtcccaaaagggaaaacctgccaatatcacagattctctgtccaataggagcctgattgtcacgaccattctcgaagaaccgtatgttttatttaaaaaaagtgacaaacccctgtacggcaacgacaggttcgaagggtattgcattgacttactaagggagttgtccaccatcctgggcttcacttatgagatccggcttgtggaggacggcaagtacggcgcacaggatgacgctaacggtcagtggaacgggatggtgagagagctgatagatcacaaggccgacctcgccgtcgcccctttggctatcacatacgtacgtgagaaggtgattgacttcagtaagcctttcatgactcttgggattagcattttgtacaggaagcctaatggtagtgaacttatgcctaaggccctgtctacccggattgtgggtgggatttggtggtttttcactttaatcatcatatccagctacacggccaatctggctgcatttctgactgtggagaggatggagtctcctatcgatagtgccgatgatctcgccaagcagaccaagattgagtacggagctgtggaagacggggctacgatgacgttcttcaagaaatctaaaatttcaacatatgataagatgtgggccttcatgtcaagtagaaggcagtctgtattggtaaagtcaaatgaagaaggaatccaacgcgtcttaacttcagattacgctttcctgatggaatctacaactatcgagtttgtgacccagcgtaattgcaaccttacccaaatcggaggtcttatagactccaaggggtatggagtagggacaccaatgggcagtccttacagagataaaatcactatcgctattttgcagctgcaggaggaagggaagctccacatgatgaaagagaagtggtggcggggtaatgggtgcccagaggaggaaagcaaggaggcttcggccctcggcgtacaaaatattggtggtatctttatagttttggcagcaggccttgtgctgagcgtctttgtggccgttggcgaatttctctataaaagtaagaaaaacgctcagctggagaagcggtccttctgctccgccatggttgaggaactgcgaatgagtctaaaatgccaacgccgattaaaacacaagccgcaggcccctgtaatcgttaagactgaggaagtcatcaatatgcatacatttaacgatcgcaggcttcccggaaaggagacgatggcctag

SEQ ID NO: 330290 - DNA, 2499 bp, Artificial Sequence
  derived and/or modified sequence
atgaagatcatcttccccatcctgagcaaccccgtgttcagaagaaccgtgaagctgctgctgtgcctgctgtggatcggctacagccagggcaccacccacgtgctgagattcggcggcatcttcgagtacgtggagagcggccccatgggcgccgaggagctggccttcagattcgccgtgaacaccatcaacagaaacagaaccctgctgcccaacaccaccctgacctacgacacccagaagatcaacctgtacgacagcttcgaggccagcaagaaggcctgcgaccagctgagcctgggcgtggccgccatcttcggccccagccacagcagcagcgccaacgccgtgcagagcatctgcaacgccctgggcgtgccccacatccagaccagatggaagcaccaggtgagcgacaacaaggacagcttctacgtgagcctgtaccccgacttcagcagcctgagcagagccatcctggacctggtgcagttcttcaagtggaagaccgtgaccgtggtgtacgacgacagcaccggcctgatcagactgcaggagctgatcaaggcccccagcagatacaacctgagactgaagatcagacagctgcccgccgacaccaaggacgccaagcccctgctgaaggagatgaagagaggcaaggagttccacgtgatcttcgactgcagccacgagatggccgccggcatcctgaagcaggccctggccatgggcatgatgaccgagtactaccactacatcttcaccaccctggacctgttcgccctggacgtggagccctacagatacagcggcgtgaacatgaccggcttcagaatcctgaacaccgagaacacccaggtgagcagcatcatcgagaagtggagcatggagagactgcaggccccccccaagcccgacagcggcctgctggacggcttcatgaccaccgacgccgccctgatgtacgacgccgtgcacgtggtgagcgtggccgtgcagcagttcccccagatgaccgtgagcagcctgcagtgcaacagacacaagccctggagattcggcaccagattcatgagcctgatcaaggaggcccactgggagggcctgaccggcagaatcaccttcaacaagaccaacggcctgagaaccgacttcgacctggacgtgatcagcctgaaggaggagggcctggagaagatcggcacctgggaccccgccagcggcctgaacatgaccgagagccagaagggcaagcccgccaacatcaccgacagcctgagcaacagaagcctgatcgtgaccaccatcctggaggagccctacgtgctgttcaagaagagcgacaagcccctgtacggcaacgacagattcgagggctactgcatcgacctgctgagagagctgagcaccatcctgggcttcacctacgagatcagactggtggaggacggcaagtacggcgcccaggacgacgccaacggccagtggaacggcatggtgagagagctgatcgaccacaaggccgacctggccgtggcccccctggccatcacctacgtgagagagaaggtgatcgacttcagcaagcccttcatgaccctgggcatcagcatcctgtacagaaagcccaacggcagcgagctgatgcccaaggccctgagcaccagaatcgtgggcggcatctggtggttcttcaccctgatcatcatcagcagctacaccgccaacctggccgccttcctgaccgtggagagaatggagagccccatcgacagcgccgacgacctggccaagcagaccaagatcgagtacggcgccgtggaggacggcgccaccatgaccttcttcaagaagagcaagatcagcacctacgacaagatgtgggccttcatgagcagcagaagacagagcgtgctggtgaagagcaacgaggagggcatccagagagtgctgaccagcgactacgccttcctgatggagagcaccaccatcgagttcgtgacccagagaaactgcaacctgacccagatcggcggcctgatcgacagcaagggctacggcgtgggcacccccatgggcagcccctacagagacaagatcaccatcgccatcctgcagctgcaggaggagggcaagctgcacatgatgaaggagaagtggtggagaggcaacggctgccccgaggaggagagcaaggaggccagcgccctgggcgtgcagaacatcggcggcatcttcatcgtgctggccgccggcctggtgctgagcgtgttcgtggccgtgggcgagttcctgtacaagagcaagaagaacgcccagctggagaagagaagcttctgcagcgccatggtggaggagctgagaatgagcctgaagtgccagagaagactgaagcacaagccccaggcccccgtgatcgtgaagaccgaggaggtgatcaacatgcacaccttcaacgacagaagactgcccggcaaggagaccatggcctag

SEQ ID NO: 330291 - DNA, 1755 bp, Artificial Sequence
  derived and/or modified sequence
atgaagatcatcttccctatccttagcaacccagtttttcggcgtactgtgaagctgctcctctgtctgctctggattggctactcacagggcaccacccacgtcttgcgctttggcggcatattcgagtatgttgagagcggacccatgggggctgaagaactggcatttcggttcgcggtgaacaccattaaccggaatcgcacacttctccctaacaccacattgacatatgacacccagaaaattaacttatatgacagctttgaggcgtccaagaaagcttgtgatcagctgagcttaggtgtcgccgccattttcggacccagccatagttcatctgccaatgcagtgcaatctatctgtaatgctctgggagtcccccacatccaaactcgctggaagcaccaagtgtccgataacaaagacagtttctacgtcagcttgtatccagatttcagcagtctgagtagggctattttggatctagtgcagttctttaagtggaaaactgtgacggtggtctacgacgatagtacgggactgatccgactgcaggaactgataaaagccccatcccgctacaatctcaggcttaaaattaggcagctccccgctgataccaaggacgccaagcccctgctgaaggagatgaagcgtggcaaagagtttcatgtgattttcgactgctctcacgaaatggctgccggcattcttaagcaggctttagccatgggtatgatgacggaatactaccattatatcttcaccacccttgacctgtttgccctagacgttgagccctaccggtactcaggcgtcaatatgactggattccgcatattgaacaccgaaaacacccaggttagttcgatcattgaaaaatggagcatggagaggctgcaagccccccccaagccagatagcggccttttagatggtttcatgactactgatgcagccctgatgtatgacgccgtgcatgtggttagtgttgctgttcagcaattcccccagatgactgtgagcagcttacagtgtaatcgacacaaaccctggcgttttgggaccagatttatgtcactgatcaaggaagcccactgggaaggactgactggacggattacctttaataagaccaacggcctgcgcaccgacttcgatctggatgtcatttctttaaaagaagaaggactcgaaaaaatcgggacgtgggacccagcatccggactgaatatgacagaatcacagaagggcaagcccgcaaatataactgactctctctctaaccgatccttgatcgttacaactattctggaggagccatacgtgctcttcaaaaagagcgacaaacctctgtacggaaatgatcgctttgagggatactgcatcgatctgctgcgcgagcttagcacaatcttaggttttacctatgagatccggctggtggaggacggcaagtacggggcacaggacgatgctaatggacaatggaacgggatggtgcgcgaacttatagatcacaaagcagatcttgctgtggccccccttgctattacgtatgtcagggaaaaagtcattgatttcagcaagccatttatgaccttagggatttcgatactctaccggaagcccaatggaactaaccctggagttttctcattcctgaatcctctgtctcctgatatctggatgtatatcttgcttgcatatttgggagtgagctgcgtgctgttcgtgatcgcccggttttag

SEQ ID NO: 330292 - DNA, 1752 bp, Artificial Sequence
  derived and/or modified sequence
atgaagattattttcccgattctaagtaatccagtcttcaggcgcaccgttaaactcctgctctgtttactgtggattggatattctcaaggaaccacacatgtattaagatttggtggtatttttgaatatgtggaatctggcccaatgggagctgaggaacttgcattcagatttgctgtgaacacaattaacagaaacagaacattgctacccaatactacccttacctatgatacccagaagataaacctttatgatagttttgaagcatccaagaaagcctgtgatcagctgtctcttggggtggctgccatcttcgggccttcacacagctcatcagcaaacgcagtgcagtccatctgcaatgctctgggagttccccacatacagacccgctggaagcaccaggtgtcagacaacaaagattccttctatgtcagtctctacccagacttctcttcactcagccgtgccattttagacctggtgcagtttttcaagtggaaaaccgtcacggttgtgtatgatgacagcactggtctcattcgtttgcaagagctcatcaaagctccatcaaggtataatcttcgactcaaaattcgtcagttacctgctgatacaaaggatgcaaaacccttactaaaagaaatgaaaagaggcaaggagtttcatgtaatctttgattgtagccatgaaatggcagcaggcattttaaaacaggcattagctatgggaatgatgacagaatactatcattatatctttaccactctggacctctttgctcttgatgttgagccctaccgatacagtggtgttaacatgacagggttcagaatattaaatacagaaaatacccaagtctcctccatcattgaaaagtggtcgatggaacgattgcaggcacctccgaaacccgattcaggtttgctggatggatttatgacgactgatgctgctctaatgtatgatgctgtgcatgtggtgtctgtggccgttcaacagtttccccagatgacagtcagttccttgcagtgtaatcgacataaaccctggcgcttcgggacccgctttatgagtctaattaaagaggcacattgggaaggcctcacaggcagaataactttcaacaaaaccaatggcttgagaacagattttgatttggatgtgatcagtctgaaggaagaaggtctagaaaagattggaacgtgggatccagccagtggcctgaatatgacagaaagtcaaaagggaaagccagcgaacatcacagattccttatccaatcgttctttgattgttaccaccattttggaagagccttatgtcctttttaagaagtctgacaaacctctctatggtaatgatcgatttgaaggctattgcattgatctcctcagagagttatctacaatccttggctttacatatgaaattagacttgtggaagatgggaaatatggagcccaggatgatgccaatggacaatggaatggaatggttcgtgaactaattgatcataaagctgaccttgcagttgctccactggctattacctatgttcgagagaaggtcatcgacttttccaagccctttatgacacttggaataagtattttgtaccgcaagcccaatggtacaaacccaggcgtcttctccttcctgaatcctctctcccctgatatctggatgtatattctgctggcttacttgggtgtcagttgtgtgctctttgtcatagccagattt

SEQ ID NO: 330293 - DNA, 1755 bp, Artificial Sequence
  derived and/or modified sequence
atgaagatcatcttccccatcctgagcaaccctgtgttccggaggacagtgaagctgctgctgtgcctgctgtggattggctacagccagggcaccacccacgtgctgcgctttggaggcatctttgaatatgtggagagcggccccatgggcgctgaggagctggccttccgctttgctgtgaacaccatcaacagaaacagaaccctgctgcccaacaccaccctgacctatgacacccagaagatcaacctgtatgacagctttgaggccagcaagaaggcctgtgaccagctgagcctgggcgtggccgccatcttcggccccagccacagcagcagcgccaatgctgtgcagagcatctgcaatgccctgggcgtgccccacatccagacccgctggaagcaccaggtgtctgacaacaaggacagcttctacgtgtccctgtacccagacttcagcagcctgagccgggccatcctggacctggtgcagttcttcaagtggaagacagtgacagtggtgtatgatgacagcacaggcctcatccggctgcaggagctgatcaaggcccccagccgctacaacctgcggctgaagatccggcagctgcctgctgacaccaaggatgccaagcccctgctgaaggagatgaagaggggcaaggagttccacgtgatctttgactgcagccatgagatggccgccggcatcctgaagcaggccctggccatgggcatgatgacagagtactaccactacatcttcaccaccctggacctgtttgccctggatgtggagccctaccgctacagcggcgtgaacatgacaggcttccgcatcctgaacacagagaacacccaggtgagcagcatcatcgagaagtggagcatggagcggctgcaggccccacccaagccagattctggcctgctggatggcttcatgaccacagatgctgccctgatgtatgatgctgtgcacgtggtgtctgtggccgtgcagcagttcccccagatgacagtgagcagcctgcagtgcaacagacacaagccctggaggtttggcacccgcttcatgagcctcatcaaggaggcccactgggagggcctgaccggccgcatcaccttcaacaagaccaacggcctgaggacagactttgacctggatgtgatcagcctgaaggaggagggcctggagaagattggcacctgggaccctgccagcggcctgaacatgacagagagccagaagggcaagccagccaacatcacagacagcctgagcaacagaagcctcatcgtgaccaccatcctggaggagccctacgtgctcttcaagaagagtgacaagcccctgtatggaaatgacagatttgagggctactgcatcgacctgctgcgggagctgagcaccatcctgggcttcacctatgagatccggctggtggaggatggcaagtacggggcccaggatgatgccaacggccagtggaatggcatggtgcgggagctgattgaccacaaggctgacctggccgtggcccccctggccatcacctacgtgcgggagaaggtgattgacttcagcaagcccttcatgaccctgggcatcagcatcctgtacaggaagcccaacggcaccaaccctggggtcttctccttcctgaaccccctgagcccagacatctggatgtacatcctgctggcctacctgggcgtgtcctgtgtgctgtttgtgattgcccgcttctag

SEQ ID NO: 330294 - DNA, 1755 bp, Artificial Sequence
  derived and/or modified sequence
atgaagatcatcttccccatcctgagcaaccccgtgttccggcggaccgtgaaacttcttttgtgtctcctgtggatcggctactcccagggcactacacatgtgctgaggttcggaggaatttttgagtatgttgagtcaggcccaatgggcgcagaagagctggcctttcggtttgctgttaatactattaatcgcaatagaaccctgctgccgaacacaaccctgacctatgacactcagaaaattaacctgtatgacagctttgaggccagcaaaaaggcttgcgatcaactgagtctgggggtggctgctatcttcgggcctagccactccagtagtgctaacgcagttcagagcatctgtaacgccctaggcgtgcctcacattcagacgaggtggaagcaccaggtatctgataacaaggactcgttttacgtgtcactgtaccccgacttcagttccctaagtagagcaatcctagatctcgttcagtttttcaaatggaaaactgtaacggttgtttacgatgattcaaccggcctaatccgactacaagagctgattaaggcccctagcagatacaatctcagactgaagatcaggcagttgcctgccgataccaaagatgccaagccgctcctgaaggaaatgaagcggggaaaggagtttcatgtcatattcgattgtagccatgaaatggctgccgggatcctgaaacaggctcttgccatggggatgatgaccgagtattatcattatattttcaccacgctggacctgttcgccctggacgtcgagccttaccgctacagtggcgtcaacatgacaggctttagaatcctcaatactgagaatacacaggtgtcaagcatcattgagaagtggtccatggagcggctccaggcacctcccaagccagatagcggactcctggatggctttatgactacagatgctgccctgatgtacgacgccgtacacgttgtgagcgtagccgttcaacagtttccccagatgaccgtctccagtctgcaatgtaaccgccataaaccgtggaggtttggcaccaggtttatgtcactcattaaggaagcacattgggagggcctgactggccgcattacattcaataagactaatgggttgcggaccgatttcgatctggacgtgattagtctcaaggaagagggtttagagaaaatcggcacatgggatccagccagcgggttgaacatgaccgaatcccagaaaggcaagccagctaacattacagattccctaagcaatagaagcttgatcgtcacaactattcttgaggagccttacgtcctattcaagaagagcgacaagcctctttacgggaacgataggtttgaagggtactgtatcgacctgctgcgggagcttagcaccatactcgggttcacatacgagatccgactcgtggaggatggaaagtatggcgcccaggacgacgcaaatggtcagtggaacggtatggttagagagctcatcgatcataaggcggacctcgcggtcgccccccttgctatcacatacgttcgggagaaagtgatcgactttagcaagccatttatgactctgggtattagcatactctaccgtaagcccaacgggaccaaccctggggtgttctctttcttgaaccctctgtcccctgacatctggatgtacatactgctggcgtacctgggcgtaagctgcgtacttttcgttatcgcgagattttag

SEQ ID NO: 330295 - DNA, 1755 bp, Artificial Sequence
  derived and/or modified sequence
atgaagataatctttccgattctgtcaaaccccgtttttcgtcgtaccgtgaagctactgctgtgtctgctgtggataggctacagccagggaacaactcatgtgctacgattcggaggcatcttcgaatacgtggaatccggtcccatgggggcagaggaactggcgttccggtttgctgtcaataccattaaccgtaaccgtaccttgctccctaacacaactcttacgtacgacacccaaaagatcaatctgtacgattcattcgaagcctccaagaaggcctgtgaccaactatcccttggggtggccgcaatctttggccctagccattccagttccgcaaacgccgttcaaagtatctgcaacgctcttggcgttccccacattcaaacccggtggaagcaccaagtaagcgacaacaaagactccttttacgtctccctgtacccggatttcagcagcctctcgcgggcaatcctcgatttggtacaattcttcaaatggaagacagtgactgtcgtttacgatgactccaccgggctcatacgattacaggaattaatcaaagccccaagtagatacaatcttcgcctcaaaattcgccaattgccagcagacacaaaggatgctaagcccctgctgaaggaaatgaagcggggtaaagaatttcatgtgatcttcgattgcagccatgagatggctgcaggtattctcaaacaggccttagccatgggaatgatgaccgagtactaccactacattttcactaccttagatttgttcgccctggacgtcgagccgtatcggtactcaggtgtgaacatgacaggtttccggattctgaacactgagaacacacaggtatcttctattatcgagaagtggagcatggaaaggctgcaagccccacctaaacctgattccggcctgctggatggattcatgacaaccgatgccgcactcatgtacgacgctgtgcatgtggtgtccgtggccgtccaacagtttccccagatgactgtcagctcccttcagtgcaaccgtcacaaaccctggaggttcggtaccagattcatgagcctcataaaggaggcgcactgggaaggcttgaccggcagaataactttcaacaagactaacggcctccggacagacttcgacttggatgtcatctcgctgaaggaagaggggctcgaaaaaattggtacgtgggaccctgcatccggacttaatatgactgagtcacagaaggggaaacctgccaacattacagattcactgtctaaccggagcttgatcgtaaccaccatccttgaggagccttacgtgctgttcaaaaaaagcgacaagcccctgtacggcaatgaccgctttgagggctattgcatcgatctgttaagggagctcagcaccattctcggcttcacctatgagatcagactcgtggaggacgggaagtatggggctcaagacgatgcaaacggccagtggaatggaatggtgagggagttaattgatcacaaggctgaccttgccgtcgcacctctggctatcacatatgtgcgagaaaaagtcatagacttctcaaaaccctttatgactctaggaatttcaattttatacagaaagcctaatggaacaaaccctggagtgtttagctttctgaacccactctcacctgatatctggatgtatatccttctcgcctacctgggtgtttcctgtgtgttattcgtgatcgcgaggttctag

SEQ ID NO: 330296 - DNA, 1755 bp, Artificial Sequence
  derived and/or modified sequence
atgaagatcatcttccccatcctgagcaaccccgtgttcagaagaaccgtgaagctgctgctgtgcctgctgtggatcggctacagccagggcaccacccacgtgctgagattcggcggcatcttcgagtacgtggagagcggccccatgggcgccgaggagctggccttcagattcgccgtgaacaccatcaacagaaacagaaccctgctgcccaacaccaccctgacctacgacacccagaagatcaacctgtacgacagcttcgaggccagcaagaaggcctgcgaccagctgagcctgggcgtggccgccatcttcggccccagccacagcagcagcgccaacgccgtgcagagcatctgcaacgccctgggcgtgccccacatccagaccagatggaagcaccaggtgagcgacaacaaggacagcttctacgtgagcctgtaccccgacttcagcagcctgagcagagccatcctggacctggtgcagttcttcaagtggaagaccgtgaccgtggtgtacgacgacagcaccggcctgatcagactgcaggagctgatcaaggcccccagcagatacaacctgagactgaagatcagacagctgcccgccgacaccaaggacgccaagcccctgctgaaggagatgaagagaggcaaggagttccacgtgatcttcgactgcagccacgagatggccgccggcatcctgaagcaggccctggccatgggcatgatgaccgagtactaccactacatcttcaccaccctggacctgttcgccctggacgtggagccctacagatacagcggcgtgaacatgaccggcttcagaatcctgaacaccgagaacacccaggtgagcagcatcatcgagaagtggagcatggagagactgcaggccccccccaagcccgacagcggcctgctggacggcttcatgaccaccgacgccgccctgatgtacgacgccgtgcacgtggtgagcgtggccgtgcagcagttcccccagatgaccgtgagcagcctgcagtgcaacagacacaagccctggagattcggcaccagattcatgagcctgatcaaggaggcccactgggagggcctgaccggcagaatcaccttcaacaagaccaacggcctgagaaccgacttcgacctggacgtgatcagcctgaaggaggagggcctggagaagatcggcacctgggaccccgccagcggcctgaacatgaccgagagccagaagggcaagcccgccaacatcaccgacagcctgagcaacagaagcctgatcgtgaccaccatcctggaggagccctacgtgctgttcaagaagagcgacaagcccctgtacggcaacgacagattcgagggctactgcatcgacctgctgagagagctgagcaccatcctgggcttcacctacgagatcagactggtggaggacggcaagtacggcgcccaggacgacgccaacggccagtggaacggcatggtgagagagctgatcgaccacaaggccgacctggccgtggcccccctggccatcacctacgtgagagagaaggtgatcgacttcagcaagcccttcatgaccctgggcatcagcatcctgtacagaaagcccaacggcaccaaccccggcgtgttcagcttcctgaaccccctgagccccgacatctggatgtacatcctgctggcctacctgggcgtgagctgcgtgctgttcgtgatcgccagattctag

SEQ ID NO: 330297 - DNA, 1935 bp, Artificial Sequence
  derived and/or modified sequence
ggcggtatcttcgaatatgtggagagcggacctatgggagcagaagagctggctttccggttcgcagtcaacacaataaaccgcaataggaccctgctgcctaataccaccttaacgtacgatactcagaagatcaacctgtacgacagcttcgaggcttccaaaaaagcttgcgatcagctttctctgggcgtggccgctatctttgggccttcacatagctcatccgctaatgcagtccaatccatctgcaacgcccttggtgttccacacattcagacacggtggaaacatcaggtgtccgataacaaggactctttctacgtgagtctctatcctgacttcagctccctctcccgtgcaatccttgatctggtgcagttttttaagtggaagaccgtgaccgtggtctatgatgacagtaccggtcttattcgcttgcaagagctgattaaggctccctcacggtacaacctgcgattgaaaattcggcaactgccggctgatacaaaagatgccaagcccttgctgaaggaaatgaagagggggaaggagtttcatgtcattttcgactgctcacacgagatggcggcgggcattcttaaacaggcccttgcaatggggatgatgaccgagtactaccattatatctttactactctggatctgtttgccctagacgtggagccgtaccgttacagcggcgtgaatatgacgggcttccggattttaaacaccgaaaacacacaggtgagttccatcatcgaaaagtggtccatggagagactgcaggcaccacctaagcctgactccggtctcctcgatggatttatgactaccgacgccgcgctgatgtacgacgccgtgcacgtcgtgtctgtcgccgtacagcagttcccacagatgactgtatccagcctgcagtgcaacaggcacaaaccatggcgatttggcactcgcttcatgagtctcattaaggaagcgcattgggaaggcctgaccggcaggatcactttcaataaaacaaacggtctgcgtacagacttcgatctggacgtcattagcttgaaggaggagggccttgagaagatcggtacctgggaccctgctagcgggctgaacatgaccgaatcacagaaggggaaaccagccaatattacagactctctgtcaaatcgatctctgatagttaccactatcctggaagagccttacgtgctgttcaagaaatctgacaagccactgtacggaaacgacagatttgagggatactgtattgatctgttgcgggagttatcaacaattctgggcttcacatacgaaatccggctcgtcgaagatggcaaatatggtgcccaggatgacgcaaacggccagtggaacgggatggtacgggaactaatcgatcacaaatcaaagatctcaacctatgacaagatgtgggcttttatgagcagtcggagacagtctgtcttagtgaagagcaatgaggaggggattcaaagggtgcttacctcagactatgccttcttgatggagtccaccaccatcgagttcgttacacagcgtaactgtaatctgacccagatcggtggactgattgacagtaagggttacggagtcggcacaccgatggggagtccctatcgcgacaagattacgatcgcaatcctgcagcttcaagaagagggaaagctgcatatgatgaaagaaaaatggtggcgcggaaacgggtgcccagaggaagaatctaaagaggcgagtgccctgggagttcagaacatcggaggtatcttcattgtgttggccgccggactcgttctatctgtgttcgtggctgtgggtgagttcctatataagtccaagaaaaacgctcagctggaaaaggagtcctccatttggctagtcccaccctatcacccagatacggtttag

SEQ ID NO: 330298 - DNA, 2139 bp, Artificial Sequence
  derived and/or modified sequence
ggtggtatttttgaatatgtggaatctggcccaatgggagctgaggaacttgcattcagatttgctgtgaacacaattaacagaaacagaacattgctacccaatactacccttacctatgatacccagaagataaacctttatgatagttttgaagcatccaagaaagcctgtgatcagctgtctcttggggtggctgccatcttcgggccttcacacagctcatcagcaaacgcagtgcagtccatctgcaatgctctgggagttccccacatacagacccgctggaagcaccaggtgtcagacaacaaagattccttctatgtcagtctctacccagacttctcttcactcagccgtgccattttagacctggtgcagtttttcaagtggaaaaccgtcacggttgtgtatgatgacagcactggtctcattcgtttgcaagagctcatcaaagctccatcaaggtataatcttcgactcaaaattcgtcagttacctgctgatacaaaggatgcaaaacccttactaaaagaaatgaaaagaggcaaggagtttcatgtaatctttgattgtagccatgaaatggcagcaggcattttaaaacaggcattagctatgggaatgatgacagaatactatcattatatctttaccactctggacctctttgctcttgatgttgagccctaccgatacagtggtgttaacatgacagggttcagaatattaaatacagaaaatacccaagtctcctccatcattgaaaagtggtcgatggaacgattgcaggcacctccgaaacccgattcaggtttgctggatggatttatgacgactgatgctgctctaatgtatgatgctgtgcatgtggtgtctgtggccgttcaacagtttccccagatgacagtcagttccttgcagtgtaatcgacataaaccctggcgcttcgggacccgctttatgagtctaattaaagaggcacattgggaaggcctcacaggcagaataactttcaacaaaaccaatggcttgagaacagattttgatttggatgtgatcagtctgaaggaagaaggtctagaaaagattggaacgtgggatccagccagtggcctgaatatgacagaaagtcaaaagggaaagccagcgaacatcacagattccttatccaatcgttctttgattgttaccaccattttggaagagccttatgtcctttttaagaagtctgacaaacctctctatggtaatgatcgatttgaaggctattgcattgatctcctcagagagttatctacaatccttggctttacatatgaaattagacttgtggaagatgggaaatatggagcccaggatgatgccaatggacaatggaatggaatggttcgtgaactaattgatcataaatcaaaaatctccacgtatgacaaaatgtgggcctttatgagtagcagaaggcagtcagtgctggtcaaaagtaatgaagaaggaatccagcgagtcctcacctctgattatgctttcctaatggagtcaacaaccatcgagtttgttacccagcggaactgtaacctgacacagattggcggccttatagactctaaaggttatggcgttggcactcccatgggttctccatatcgagacaaaattaccatagcaattcttcagctgcaagaggaaggcaaactgcatatgatgaaggagaaatggtggaggggcaatggttgcccagaagaggagagcaaagaggccagtgccctgggggttcagaatattggtggcatcttcattgttctggcagccggcttggtgctttcagtttttgtggcagtgggagaatttttatacaaatccaaaaaaaacgctcaattggaaaaggaatcttctatttggttagtgccaccataccatccagacactgtttagtaatcttttgaaacttactaaaagaggtttttaataatgaggtccttctgtagtgccatggtagaagaattgaggatgtccctgaagtgccagcgtcggttaaaacataagccacaggccccagttattgtgaaaacagaagaagttatcaacatgcacacatttaacgacagaaggttgccaggtaaagaaaccatggcataa

SEQ ID NO: 330299 - DNA, 1935 bp, Artificial Sequence
  derived and/or modified sequence
gggggcatctttgaatatgtggagagcggccccatgggcgctgaggagctggccttccgctttgctgtgaacaccatcaacagaaacagaaccctgctgcccaacaccaccctgacctatgacacccagaagatcaacctgtatgacagctttgaggccagcaagaaggcctgtgaccagctgagcctgggcgtggccgccatcttcggccccagccacagcagcagcgccaatgctgtgcagagcatctgcaatgccctgggcgtgccccacatccagacccgctggaagcaccaggtgtctgacaacaaggacagcttctacgtgtccctgtacccagacttcagcagcctgagccgggccatcctggacctggtgcagttcttcaagtggaagacagtgacagtggtgtatgatgacagcacaggcctcatccggctgcaggagctgatcaaggcccccagccgctacaacctgcggctgaagatccggcagctgcctgctgacaccaaggatgccaagcccctgctgaaggagatgaagaggggcaaggagttccacgtgatctttgactgcagccatgagatggccgccggcatcctgaagcaggccctggccatgggcatgatgacagagtactaccactacatcttcaccaccctggacctgtttgccctggatgtggagccctaccgctacagcggcgtgaacatgacaggcttccgcatcctgaacacagagaacacccaggtgagcagcatcatcgagaagtggagcatggagcggctgcaggccccacccaagccagattctggcctgctggatggcttcatgaccacagatgctgccctgatgtatgatgctgtgcacgtggtgtctgtggccgtgcagcagttcccccagatgacagtgagcagcctgcagtgcaacagacacaagccctggaggtttggcacccgcttcatgagcctcatcaaggaggcccactgggagggcctgaccggccgcatcaccttcaacaagaccaacggcctgaggacagactttgacctggatgtgatcagcctgaaggaggagggcctggagaagattggcacctgggaccctgccagcggcctgaacatgacagagagccagaagggcaagccagccaacatcacagacagcctgagcaacagaagcctcatcgtgaccaccatcctggaggagccctacgtgctcttcaagaagagtgacaagcccctgtatggaaatgacagatttgagggctactgcatcgacctgctgcgggagctgagcaccatcctgggcttcacctatgagatccggctggtggaggatggcaagtacggggcccaggatgatgccaacggccagtggaatggcatggtgcgggagctgattgaccacaagagcaagatcagcacctatgacaagatgtgggccttcatgagcagccggcggcagagcgtgctggtgaagagcaatgaggagggcatccagagggtgctgaccagtgactatgccttcctgatggagagcaccaccattgaatttgtgacccagaggaactgcaacctgacccagatcggcggcctgattgacagcaagggctatggagtgggcacccccatgggcagcccctacagagacaagatcaccatcgccatcctgcagctgcaggaggagggcaagctgcacatgatgaaggagaagtggtggagaggaaatggctgcccagaggaggagagcaaggaggccagcgccctgggcgtgcagaacattggaggcatcttcatcgtgctggccgccggcctggtgctgtctgtgtttgtggccgtgggggagttcctgtacaagagcaagaagaatgcccagctggagaaggagagcagcatctggctggtgcccccctaccacccagacacagtgtag

SEQ ID NO: 330300 - DNA, 1935 bp, Artificial Sequence
  derived and/or modified sequence
ggcggcatcttcgagtacgtggagagcggccccatgggcgccgaggagctggctttccggtttgctgtcaacaccattaatcgaaatcggaccctgttgcccaatacaaccctcacatatgacacacagaaaattaatctttatgacagctttgaggcaagtaagaaggcatgtgaccaactttctttgggcgtcgcggccatttttggccctagccactcatcaagtgccaatgctgtgcagtccatttgcaacgctttaggtgtcccccacattcagaccagatggaagcatcaagtgagcgacaataaagacagcttttatgtatctctgtatccggatttcagctcactgagtcgcgccatcctggacctggtccagtttttcaagtggaaaaccgtaactgtggtttacgatgacagcactgggttgatcagactgcaagagttgatcaaggctcccagcagatacaatctgcgattgaagatcagacagctgcccgctgataccaaggatgcaaagccactccttaaggaaatgaaacgaggaaaagagttccacgtaatcttcgactgctcccacgaaatggccgcaggcattctgaaacaggcccttgccatgggcatgatgaccgaatattaccattatatcttcacgaccttggatctctttgccttggacgtggaaccctaccggtacagcggagtcaatatgactgggtttaggatcttaaataccgaaaatacacaggtctcaagcattatcgaaaagtggtcgatggaacggttgcaggcgcccccaaagcccgactccggactcctagatgggtttatgacaactgacgcagccttaatgtacgacgcagtacacgtggtgagtgtggcggtgcagcagttcccgcagatgaccgtgtcatccctgcaatgtaatagacataagccatggcgattcggaactaggtttatgtccctgattaaggaagcccattgggaagggcttaccgggcggattacattcaataagactaatggactgcggacggatttcgatctcgacgtcatttctctgaaggaagagggtcttgaaaaaataggcacctgggatccagctagtggcctgaatatgacagaatcccaaaagggcaagcccgcaaatatcactgacagcttgagcaacaggagtctgatcgtgacaaccatccttgaagaaccttacgtgctgttcaaaaaatctgacaaacccttgtatgggaacgaccggttcgagggatactgcatcgatctgctacgcgaactaagcactattttgggtttcacttatgaaattagactggtggaggacgggaagtatggagcacaagacgacgccaatgggcagtggaacggcatggtgagggaattaattgaccacaaaagcaaaatatccacctacgataagatgtgggcattcatgtcatcacgccgccagtcggtcctcgtgaaatccaacgaagaaggcattcagagagttctcaccagtgattacgctttcctgatggagtccaccacgatcgaattcgttacccaaaggaactgcaacctaacccagataggaggcctgattgattcaaaaggctacggcgtgggaacgccaatgggaagcccgtatagggacaaaataacaattgccatcctgcagctccaagaggaggggaagctccatatgatgaaggaaaagtggtggagaggaaacgggtgccccgaagaggagagtaaggaggcctccgctttgggggtacaaaatatcggggggatcttcattgtgttggcagctggacttgtgctgagcgtgtttgtggcagtgggtgagttcctttacaaatctaaaaagaatgcccaattggagaaggaatcctcaatttggcttgtgccaccctatcaccctgatactgtgtag

SEQ ID NO: 330301 - DNA, 1935 bp, Artificial Sequence
  derived and/or modified sequence
gggggtatcttcgagtacgtagagagcggccctatgggggctgaggagctggcctttcgcttcgctgtgaacaccattaaccggaacagaacactgctcccaaacacaactctgacctacgacacacagaagatcaacctctacgattctttcgaggccagcaaaaaggcctgcgatcaactctccctgggcgtggcagcaatcttcggaccttcccatagctcttccgccaatgccgtgcaaagcatatgcaatgccttgggagtgccccacatccagaccaggtggaagcatcaggtgtccgacaataaggattcgttctatgtttccctttatcccgattttagcagtctgtccagggcaatactcgatctcgttcagttttttaaatggaagacagtgacggtggtatatgacgactctactggcttaattagactccaagagttaatcaaggcccctagtaggtacaatctgaggctgaagattagacagctgccagccgacaccaaggatgccaaaccacttttaaaggaaatgaagagaggaaaggagtttcacgtcatctttgactgctctcatgagatggctgccggtatcctgaaacaggctctcgcaatgggtatgatgactgagtactatcactacatttttacaaccctggatttgttcgccctggatgtcgaaccatataggtatagcggcgtgaacatgacagggttccgtattctgaacacagaaaatacacaggtgtcctcaatcatagagaaatggtcaatggagcggctgcaggcacccccaaagcctgattctgggctcctcgacgggtttatgacgacagacgctgcccttatgtacgacgctgtccatgttgtgagtgtggctgtgcagcagttcccacagatgacggtgtctagtctgcagtgcaatagacacaagccttggagattcggaactagattcatgagtcttatcaaggaagcgcactgggaaggcttgacaggcaggatcaccttcaataagacgaatggacttcggacagactttgatctggacgtgatctccctgaaggaagaaggactggagaagattggcacgtgggatccggcttcaggcctgaatatgaccgaaagtcagaaaggtaaacccgcaaatattaccgatagcctatccaacaggtccttgatcgtcaccactatactcgaagaaccttacgtgctcttcaagaagtcagacaaacctttatacggcaacgatcgattcgaagggtattgcatcgacctgctgagggaactgagcacaattctcgggttcacatatgaaatccgactggtagaggacggaaaatacggggctcaagacgatgcgaatggccagtggaacggaatggtccgcgagctcattgaccacaagtcaaagatttctacctatgacaagatgtgggccttcatgtcctcaagacgccagtcagtgcttgtcaagtccaatgaggagggaatccaacgcgtgctcacgagtgactatgcttttctaatggaaagcacgactattgaattcgtgacccagaggaactgtaatctgacgcaaatagggggactcatcgactctaagggatacggtgtgggtactcccatgggctcaccttacagggataagatcactattgccatactgcagctgcaggaggagggaaagctacacatgatgaaggaaaagtggtggcggggtaacggttgtcctgaggaggagtctaaagaggcctcagccttaggcgtgcaaaatattggcggaatctttattgtcctggcagcaggacttgtcctttccgtgttcgtcgctgtgggggagttcctgtacaaaagcaagaagaatgcccagttggagaaggagtcttctatctggctcgtgcccccataccatcccgacactgtgtag

SEQ ID NO: 330302 - DNA, 1935 bp, Artificial Sequence
  derived and/or modified sequence
ggcggcatcttcgagtacgtggagagcggccccatgggcgccgaggagctggccttcagattcgccgtgaacaccatcaacagaaacagaaccctgctgcccaacaccaccctgacctacgacacccagaagatcaacctgtacgacagcttcgaggccagcaagaaggcctgcgaccagctgagcctgggcgtggccgccatcttcggccccagccacagcagcagcgccaacgccgtgcagagcatctgcaacgccctgggcgtgccccacatccagaccagatggaagcaccaggtgagcgacaacaaggacagcttctacgtgagcctgtaccccgacttcagcagcctgagcagagccatcctggacctggtgcagttcttcaagtggaagaccgtgaccgtggtgtacgacgacagcaccggcctgatcagactgcaggagctgatcaaggcccccagcagatacaacctgagactgaagatcagacagctgcccgccgacaccaaggacgccaagcccctgctgaaggagatgaagagaggcaaggagttccacgtgatcttcgactgcagccacgagatggccgccggcatcctgaagcaggccctggccatgggcatgatgaccgagtactaccactacatcttcaccaccctggacctgttcgccctggacgtggagccctacagatacagcggcgtgaacatgaccggcttcagaatcctgaacaccgagaacacccaggtgagcagcatcatcgagaagtggagcatggagagactgcaggccccccccaagcccgacagcggcctgctggacggcttcatgaccaccgacgccgccctgatgtacgacgccgtgcacgtggtgagcgtggccgtgcagcagttcccccagatgaccgtgagcagcctgcagtgcaacagacacaagccctggagattcggcaccagattcatgagcctgatcaaggaggcccactgggagggcctgaccggcagaatcaccttcaacaagaccaacggcctgagaaccgacttcgacctggacgtgatcagcctgaaggaggagggcctggagaagatcggcacctgggaccccgccagcggcctgaacatgaccgagagccagaagggcaagcccgccaacatcaccgacagcctgagcaacagaagcctgatcgtgaccaccatcctggaggagccctacgtgctgttcaagaagagcgacaagcccctgtacggcaacgacagattcgagggctactgcatcgacctgctgagagagctgagcaccatcctgggcttcacctacgagatcagactggtggaggacggcaagtacggcgcccaggacgacgccaacggccagtggaacggcatggtgagagagctgatcgaccacaagagcaagatcagcacctacgacaagatgtgggccttcatgagcagcagaagacagagcgtgctggtgaagagcaacgaggagggcatccagagagtgctgaccagcgactacgccttcctgatggagagcaccaccatcgagttcgtgacccagagaaactgcaacctgacccagatcggcggcctgatcgacagcaagggctacggcgtgggcacccccatgggcagcccctacagagacaagatcaccatcgccatcctgcagctgcaggaggagggcaagctgcacatgatgaaggagaagtggtggagaggcaacggctgccccgaggaggagagcaaggaggccagcgccctgggcgtgcagaacatcggcggcatcttcatcgtgctggccgccggcctggtgctgagcgtgttcgtggccgtgggcgagttcctgtacaagagcaagaagaacgcccagctggagaaggagagcagcatctggctggtgcccccctaccaccccgacaccgtgtag

SEQ ID NO: 330303 - protein, 1194 aa, Artificial Sequence
  derived and/or modified sequence
MVGLLLFFFPAIFLEVSLLPRSPGRKVLLAGASSQRSVARMDGDVIIGALFSVHHQPPAEKVPERKCGEIREQYGIQRVEAMFHTLDKINADPVLLPNITLGSEIRDSCWHSSVALEQSIEFIRDSLISIRDEKDGINRCLPDGQSLPPGRTKKPIAGVIGPGSSSVAIQVQNLLQLFDIPQIAYSATSIDLSDKTLYKYFLRVVPSDTLQARAMLDIVKRYNWTYVSAVHTEGNYGESGMDAFKELAAQEGLCIAHSDKIYSNAGEKSFDRLLRKLRERLPKARVVVCFCEGMTVRGLLSAMRRLGVVGEFSLIGSDGWADRDEVIEGYEVEANGGITIKLQSPEVRSFDDYFLKLRLDTNTRNPWFPEFWQHRFQCRLPGHLLENPNFKRICTGNESLEENYVQDSKMGFVINAIYAMAHGLQNMHHALCPGHVGLCDAMKPIDGSKLLDFLIKSSFIGVSGEEVWFDEKGDAPGRYDIMNLQYTEANRYDYVHVGTWHEGVLNIDDYKIQMNKSGVVRSVCSEPCLKGQIKVIRKGEVSCCWICTACKENEYVQDEFTCKACDLGWWPNADLTGCEPIPVRYLEWSNIESIIAIAFSCLGILVTLFVTLIFVLYRDTPVVKSSSRELCYIILAGIFLGYVCPFTLIAKPTTTSCYLQRLLVGLSSAMCYSALVTKTNRIARILAGSKKKICTRKPRFMSAWAQVIIASILISVQLTLVVTLIIMEPPMPILSYPSIKEVYLICNTSNLGVVAPLGYNGLLIMSCTYYAFKTRNVPANFNEAKYIAFTMYTTCIIWLAFVPIYFGSNYKIITTCFAVSLSVTVALGCMFTPKMYIIIAKPERNVRSAFTTSDVVRMHVGDGKLPCRSNTFLNIFRRKKAGAGNANSNGKSVSWSEPGGGQVPKGQHMWHRLSVHVKTNETACNQTAVIKPLTKSYQGSGKSLTFSDTSTKTLYNVEEEEDAQPIRFSPPGSPSMVVHRRVPSAATTPPLPSHLTAEETPLFLAEPALPKGLPPPLQQQQQPPPQQKSLMDQLQGVVSNFSTAIPDFHAVLAGPGGPGNGLRSLYPPPPPPQHLQMLPLQLSTFGEELVSPPADDDDDSERFKLLQEYVYEHEREGNTEEDELEEEEEDLQAASKLTPDDSPALTPPSPFRDSVASGSSVPSSPVSESVLCTPPNVSYASVILRDYKQSSSTL

SEQ ID NO: 330304 - DNA, 3585 bp, Artificial Sequence
  derived and/or modified sequence
atggtgggactgctcctgttcttctttcctgccatcttcctcgaggtgagcctgttgcctagaagcccaggaagaaaggtcctgcttgctggggcttcgtcccagagatcagtggcaagaatggacggagacgtcatcataggggccctgttttctgtgcaccaccaacctcctgccgaaaaagtgcctgaacgcaagtgtggagagattagagaacagtacgggattcagcgggtggaagcaatgttccacacgctcgacaagataaacgcagatcccgtgctgttgccgaatataaccctggggtccgagatcagagactcatgttggcattcgtccgtcgccctcgagcaatcaatagagttcattcgagattccctgatttcgatccgggacgaaaaagacggcataaatcgctgtctgccagatggtcagtcactgccacccggccggaccaaaaaacctattgcaggggtcatcggccctggaagttcttcagtagccatccaggttcaaaacctgttgcagctgtttgatattcctcagatagcgtacagtgccacttccatcgatttatccgataagactctgtacaagtattttctgagagtcgtccctagcgacaccctccaggcaagggcaatgttagatatcgtgaaacggtacaattggacctacgtgagtgctgtccatactgaaggtaactacggtgaaagcggcatggacgcctttaaggagctcgccgctcaagaaggcctgtgcattgctcactccgacaaaatttattccaacgcgggcgagaagagcttcgataggctgttaaggaaacttagagaacgtctccccaaagcacgtgtggttgtctgcttttgtgaaggtatgaccgtgagaggcctgctaagtgccatgcgtagactcggcgtggtgggggaattctcactaattggaagcgatgggtgggccgaccgtgacgaagtgatcgaggggtatgaggtcgaagcaaatggtggtatcactattaagctgcaatcccctgaagtgagaagctttgacgattactttctgaagttgagactcgacacaaatacgcgcaacccttggttcccagaattctggcagcaccggttccagtgtcgcctccctgggcaccttctcgagaaccctaattttaaaaggatttgcaccggtaacgagagtcttgaggaaaactatgtccaggactccaagatgggcttcgtgattaatgccatctacgctatggcgcatggcctccagaacatgcatcacgcgctgtgccctggccacgtgggcttgtgtgatgccatgaagcctatcgacgggtcgaagttgttggacttcctgatcaaatccagctttataggggtgagtggagaagaggtatggtttgatgaaaagggggacgcgccggggcggtacgatattatgaacctccagtacacagaagcaaataggtatgattatgtccacgtcggtacctggcacgaaggggtgctcaacatagacgactacaaaatccagatgaacaaaagtggagtggtaagaagcgtatgcagcgagccttgtctcaaaggccagataaaagtgattcggaaaggtgaagttagctgctgctggatctgtaccgcctgcaaggaaaatgagtatgtccaagatgagttcacatgcaaagcctgtgatctcggctggtggccaaatgctgacctcactggctgcgagcccattccggtaagatatcttgaatggtctaatatcgagtccattatcgcaattgcattctcttgccttggcatattggtgaccctcttcgtgaccctaatcttcgtactgtaccgggatacacccgtcgtgaagagcagctcacgtgagctttgttatatcatcctagccggtatcttccttggttacgtgtgcccattcactctcattgccaagcccaccaccactagttgttacctgcagcgtcttttggtggggttgtcatctgccatgtgttattctgccctggtgaccaaaaccaataggatagctcggattctggctggatcaaagaaaaaaatatgtactaggaaaccaaggtttatgtctgcttgggctcaggtgatcatagcttcgatcctgatcagtgtccagctgaccctcgtggtgacgctgatcattatggaaccacccatgccaattctaagctatccttctatcaaggaagtgtacttgatctgcaataccagcaatctgggcgtcgtggccccgctggggtataacggactgttgattatgagttgcacctactacgcatttaaaacacgcaatgtgccggcaaactttaacgaggctaagtatatcgccttcactatgtataccacctgcatcatttggctcgctttcgtgccgatctacttcgggagcaattataaaattatcactacctgctttgcggtaagcctgtccgtgactgtggcactaggctgtatgtttacacccaaaatgtatatcattatcgcgaaaccagagagaaacgttcgcagcgcctttacaactagcgacgtagtccgaatgcacgtgggagatggtaaactaccctgtagatctaataccttcctgaacattttcaggcggaaaaaggcaggggcagggaatgctaattctaatggcaagtccgttagttggagtgaacccgggggcgggcaagtccccaaaggacagcacatgtggcatcgtctcagcgtccacgttaagaccaatgaaacagcatgcaaccagacagcagtcataaaacccctgactaaaagttatcaaggcagcggtaaatccctcacattttccgacacatccacaaagacactctataacgttgaggaagaagaggacgcacagcctatccgcttttcaccgcccggctcacccagcatggtcgtgcatcgccgcgtgcccagcgccgccaccaccccacctctgccgtctcaccttacagcagaggagacacccctgtttctcgcagagcctgccctgcctaagggattgccacctcctctgcagcaacagcagcagcccccgccccagcagaagagtttgatggatcagctccaaggcgtcgtgagcaatttctccaccgccattccagacttccacgctgtgctggctggtcccggaggcccgggtaatggcttgcggagcttgtatccgcccccccccccacctcagcacctgcagatgcttcccctgcaactgtccaccttcggcgaggagttggtttctccgcctgcagatgacgacgatgattcagagaggtttaaactgctgcaggagtacgtgtacgagcatgagagagagggaaacacggaggaagatgagctagaggaggaggaggaagatctgcaggccgctagtaaactgacccccgacgatagcccagctttaacacctccctcaccattcagagactccgtggcctccgggtcgtccgtgccaagctccccagtcagcgagtccgtgttgtgcaccccacctaatgtgtcttatgcaagcgtcatacttagggactacaaacagtccagcagtactctctag

SEQ ID NO: 330305 - DNA, 3585 bp, Artificial Sequence
  derived and/or modified sequence
atggtaggacttctcctgtttttctttcctgccatatttctggaggttagtctcctgccgaggtcacccggccggaaggtgcttctggctggagcttcgtcacaaagatccgtcgcgcgaatggacggagatgttattattggagctctatttagcgtccatcatcagccccctgcggagaaggtccccgagcgaaaatgtggcgagattcgagagcagtatggaatacagagggtggaggccatgtttcataccctggacaaaatcaacgccgatcccgtattgttacctaacatcacactgggaagtgagattcgggacagttgttggcattcctcagtggcccttgaacaaagcatcgagtttatccgagactctctcatcagtatcagggacgagaaagatggtatcaatagatgtttaccagacggccagtctcttccacctggaaggactaagaaaccaatcgcgggcgtcataggccccgggtcttcatcggtggccattcaggttcagaacctccttcaattgttcgatattcctcagatcgcatatagcgccacaagcatcgacctgagtgataagacactttataaatatttcttgcgggtggtgccgtcggacactctgcaggcgcgcgcaatgctagacattgtgaagcggtacaattggacctacgtgagcgctgttcataccgaaggaaactatggagaatctggcatggatgcattcaaggaactcgctgcacaagagggcctgtgtatagcccattcggataagatctacagcaatgcaggcgaaaagtctttcgaccggctgctgcgaaaactgagggaaagactgcctaaagcccgggtcgtagtgtgcttttgtgagggaatgactgtgcggggccttctctcagctatgcggcgtctcggggtagtcggcgaattttctctgatcggtagcgacggctgggccgaccgggacgaggtcatagaaggctacgaagttgaggccaatgggggaataactattaaacttcagagtcccgaagttagaagcttcgacgactacttcctcaaattacgattggacactaacacaagaaacccctggtttcctgagttctggcagcaccgctttcagtgccgcttgccaggccacctgctagagaatcctaatttcaagcggatctgtaccggtaatgagagcttggaggagaactatgtccaagacagcaagatgggcttcgtgattaacgctatctacgccatggcacacggattgcagaacatgcaccacgctctgtgtcctggacacgtcgggctctgcgacgctatgaaacccattgatgggtcaaaactgcttgactttctcataaagtcaagcttcattggcgtctccggcgaggaggtttggttcgacgaaaagggcgatgcgcctggcaggtacgatataatgaacttacaatacacagaggctaataggtatgattacgtccacgttgggacatggcatgaaggagtgctgaatattgacgattacaagatccaaatgaataagtccggagtagtacggtccgtatgctccgagccctgtctgaaggggcagattaaggtcattagaaagggagaggtaagctgttgttggatctgtaccgcctgcaaggagaacgaatatgtacaggacgaatttacctgcaaagcttgcgacttaggttggtggcctaacgccgaccttacaggttgtgagcctattcctgtccgttacctggaatggagcaatatagaaagtattatcgcgatagctttctcctgcctgggcatcctcgtgacattatttgttactcttatatttgtgctctacagagacaccccagtggtaaaatccagctccagagaactatgctatatcattctcgcaggtatctttttaggctatgtgtgtccgtttacgctgatcgccaagcctacgactacttcttgctaccttcaaaggctgctggtgggcctgtccagcgccatgtgttacagtgctcttgttactaaaaccaaccgcattgctaggatcctcgctggctcgaaaaaaaaaatttgcacacggaagccaaggtttatgtctgcatgggcgcaggtaattatcgcgagtattttaatatctgtccagctcactttggtggtcaccttgattatcatggagccacctatgccaatcctcagctacccctccatcaaggaggtctatctgatttgtaatacttctaatctcggagttgtggcacctctcggctataacggcctgctgataatgtcatgcacatactatgcgttcaaaaccaggaacgtgcctgcaaatttcaatgaggcaaaatacatagctttcacaatgtatactacatgtattatctggcttgccttcgtccccatttactttggatccaactacaaaattatcacaacatgtttcgccgtgagcttgagtgtgaccgtggcactgggctgcatgttcacgcccaagatgtacataatcatagccaagcccgagcggaacgtacgcagtgcattcaccacgtcggatgtcgtcaggatgcatgtcggtgacggaaagttgccttgtagatctaatacattcctcaatatctttcggagaaaaaaagctggcgcgggaaatgcaaactctaacggtaaaagtgttagttggagcgagcctggtggcggtcaagtcccaaaaggacaacacatgtggcacaggctctcggtccatgtcaagactaatgaaacagcttgtaatcaaaccgccgttatcaaacctctaacaaagtcttatcaggggtctggaaagtctttgacattttccgatactagcactaaaacactgtacaatgtcgaggaggaagaagacgcccagcccatccgtttttcaccacctggctccccttccatggtggtgcatcggcgggtgccttctgccgccacaaccccaccactgcctagccatctgacagccgaggagaccccattattccttgccgagcccgctctacccaagggcttgccacccccacttcaacagcaacagcagcctcctcctcagcagaagtcactgatggaccagctccagggggtcgtttctaacttctccaccgccatccccgacttccatgcagtacttgctggaccaggcggaccgggcaacggactgaggtctctttacccccctcccccgccaccgcagcatcttcaaatgttgcccctccagctatcaacttttggagaagagttggtctctccaccggccgatgatgacgatgacagcgaacggttcaaactgctccaggaatatgtttatgagcatgaacgggaaggtaacaccgaggaggacgagctggaagaggaagaggaggacttgcaagcggcaagcaaactcacaccagacgattcccctgcacttactccgcctagccccttcagggacagtgtggcatccggaagctctgtgccttctagcccagtgtctgagtccgtcctgtgcactcctcccaacgtcagctacgcctcggtgatcctgcgcgattacaagcagtcctcgtcaactctgtag

SEQ ID NO: 330306 - DNA, 6622 bp, Artificial Sequence
  derived and/or modified sequence
gaattcccttacaaacgcctccagcttgtagaggcggtcgtggaggacccagaggaggagacgaaggggaaggaggcggtggtggaggaggcaaaggccttggacgaccattgttggcgaggggcaccactccgggagaggcggcgctgggcgtcttgggggtgcgcgccgggagcctgcagcgggaccagcgtgggaacgcggctggcaggctgtggacctcgtcctcaccaccatggtcgggctccttttgttttttttcccagcgatctttttggaggtgtcccttctccccagaagccccggcaggaaagtgttgctggcaggagcgtcgtctcagcgctcggtggccagaatggacggagatgtcatcattggagccctcttctcagtccatcaccagcctccggccgagaaagtgcccgagaggaagtgtggggagatcagggagcagtatggcatccagagggtggaggccatgttccacacgttggataagatcaacgcggacccggtcctcctgcccaacatcaccctgggcagtgagatccgggactcctgctggcactcttccgtggctctggaacagagcattgagttcattagggactctctgatttccattcgagatgagaaggatgggatcaaccggtgtctgcctgacggccagtccctccccccaggcaggactaagaagcccattgcgggagtgatcggtcccggctccagctctgtagccattcaagtgcagaacctgctccagctcttcgacatcccccagatcgcttattcagccacaagcatcgacctgagtgacaaaactttgtacaaatacttcctgagggttgtcccttctgacactttgcaggcaagggccatgcttgacatagtcaaacgttacaattggacctatgtctctgcagtccacacggaagggaattatggggagagcggaatggacgctttcaaagagctggctgcccaggaaggcctctgtatcgcccattctgacaaaatctacagcaacgctggggagaagagctttgaccgactcttgcgcaaactccgagagaggcttcccaaggctagagtggtggtctgcttctgtgaaggcatgacagtgcgaggactcctgagcgccatgcggcgccttggcgtcgtgggcgagttctcactcattggaagtgatggatgggcagacagagatgaagtcattgaaggttatgaggtggaagccaacgggggaatcacgataaagctgcagtctccagaggtcaggtcatttgatgattatttcctgaaactgaggctggacactaacacgaggaatccctggttccctgagttctggcaacatcggttccagtgccgccttccaggacaccttctggaaaatcccaactttaaacgaatctgcacaggcaatgaaagcttagaagaaaactatgtccaggacagtaagatggggtttgtcatcaatgccatctatgccatggcacatgggctgcagaacatgcaccatgccctctgccctggccacgtgggcctctgcgatgccatgaagcccatcgacggcagcaagctgctggacttcctcatcaagtcctcattcattggagtatctggagaggaggtgtggtttgatgagaaaggagacgctcctggaaggtatgatatcatgaatctgcagtacactgaagctaatcgctatgactatgtgcacgttggaacctggcatgaaggagtgctgaacattgatgattacaaaatccagatgaacaagagtggagtggtgcggtctgtgtgcagtgagccttgcttaaagggccagattaaggttatacggaaaggagaagtgagctgctgctggatttgcacggcctgcaaagagaatgaatatgtgcaagatgagttcacctgcaaagcttgtgacttgggatggtggcccaatgcagatctaacaggctgtgagcccattcctgtgcgctatcttgagtggagcaacatcgaatccattatagccatcgccttttcatgcctgggaatccttgttaccttgtttgtcaccctaatctttgtactgtaccgggacacaccagtggtcaaatcctccagtcgggagctctgctacatcatcctagctggcatcttccttggttatgtgtgcccattcactctcattgccaaacctactaccacctcctgctacctccagcgcctcttggttggcctctcctctgcgatgtgctactctgctttagtgactaaaaccaatcgtattgcacgcatcctggctggcagcaagaagaagatctgcacccggaagcccaggttcatgagtgcctgggctcaggtgatcattgcctcaattctgattagtgtgcaactaaccctggtggtaaccctgatcatcatggaaccccctatgcccattctgtcctacccaagtatcaaggaagtctaccttatctgcaataccagcaacctgggtgtggtggcccctttgggctacaatggactcctcatcatgagctgtacctactatgccttcaagacccgcaacgtgcccgccaacttcaacgaggccaaatatatcgcgttcaccatgtacaccacctgtatcatctggctagcttttgtgcccatttactttgggagcaactacaagatcatcacaacttgctttgcagtgagtctcagtgtaacagtggctctggggtgcatgttcactcccaagatgtacatcattattgccaagcctgagaggaatgtccgcagtgccttcaccacctctgatgttgtccgcatgcatgttggcgatggcaagctgccctgccgctccaacactttcctcaacatcttccgaagaaagaaggcaggggcagggaatgccaattctaatggcaagtctgtgtcatggtctgaaccaggtggaggacaggtgcccaagggacagcatatgtggcaccgcctctctgtgcacgtgaagaccaatgagacggcctgcaaccaaacagccgtcatcaagcccctcactaaaagttaccaaggctctggcaagagcctgaccttttcagataccagcaccaagaccctttacaacgtagaggaggaggaggatgcccagccgattcgctttagcccgcctggtagcccttccatggtggtgcacaggcgcgtgccaagcgcggcgaccactccgcctctgccgtcccacctgaccgcagaggagacccccctcttcctggccgaaccagccctccccaagggcttgccccctcctctccagcagcagcagcaaccccctccacagcagaaatcgctgatggaccagctccagggagtggtcagcaacttcagtaccgcgatcccggattttcacgcggtgctggcaggccccggtggtcccgggaacgggctgcggtccctgtacccgcccccgccacctccgcagcacctgcagatgctgccgctgcagctgagcacctttggggaggagctggtctccccgcccgcggacgacgacgacgacagcgagaggtttaagctcctccaggagtacgtgtatgagcacgagcgggaagggaacacggaagaagacgaactggaagaggaggaggaggacctgcaggcggccagcaaactgaccccggatgattcgcctgcgctgacgcctccgtcgcctttccgcgactcggtggcctcgggcagctcggtgcccagctcccccgtgtccgagtcggtgctctgcacccctcccaacgtatcctacgcctctgtcattctgcgggactacaagcaaagctcttccaccctgtaagggggaagggtccacatagaaaagcaagacaagccagagatctcccacacctccagagatgtgcaaacagctgggaggaaaagcctgggagtggggggcctcgtcgggaggacaggagaccgctgctgctgctgccgctactgctgctgctgccttaagtaggaagagagggaaggacaccaagcaaaaaatgttccaggccaggattcggattcttgaattactcgaagccttctctgggaagaaagggaattctgacaaagcacaattccatatggtatgtaacttttatcacaaatcaaatagtgacatcacaaacataatgtcctcttttgcacaattgtgcatagatatatatatgcccacacacactgggccatgcttgccaaggaacagcccacgtggacatgccagtcggatcatgagttcacctgatggcattcggagtgagctggtggagccagacagagcaggtgcggggaagggaagggcccaggccagacccatcccaaacggatgatgggatgatgggacagcagctccttgctcagaagcccttctccccgctgggctgacagactcctcatcttcaggagactcaggaatggagcggcacaggggtctctcttcatccactgcaacccatccagtgccagctttgagattgcacttgaagaaaggtgcatggaccccctgctgctctgcagattccctttatttaggaaaacaggaataagagcaaaattatcaccaaaaagtgcttcatcaggcgtgctacaggaggaaggagctagaaatagaacaatccatcagcatgagactttgaaaaaaaaacacatgatcagcttctcatgttccatattcacttattggcgatttggggaaaaggccggaacaagagattgttacgagagtggcagaaacccttttgtagattgacttgtgtttgtgccaagcgggctttccattgaccttcagttaaagaacaaaccatgtgacaaaattgttaccttccacttactgtagcaaataatacctacaagttgaacttctaagatgcgtatatgtacaatttggtgccattatttctcctacgtattagagaaacaaatccatctttgaatctaatggtgtactcatagcaactattactggtttaaatgacaaataattctatcctattgtcactgaagtccttgtaactagcgagtgaatgtgttcctgtgtccttgtatatgtgcgatcgtaaaatttgtgcaatgtaatgtcaaattgactggtcaatgtcaacctagtagtcaatctaactgcaattagaaattgtcttttgaatatactatatatattttttatgttccaataatgttttgtacatcattgtcatcaatatctacagaagctctttgacggtttgaatactatggctcaaggttttcatatgcagctcggatggacatttttcttctaagatggaacttatttttcagatattttctgatgtggagatatgttattaatgaagtggtttgaaaatttgttatattaaaagtgcacaaaaactgagagtgaaaataaaaggtacattttataagcttgcacacattattaacacataagattgaacaaagcatttagattattccaggttatatcatttttttaaagattttccacagctacttgagtgtctaacatacagtaacatctaactcagctaataatttgtaaaatctttatcaatcacattttgccttcttttaatttttatgttcatggacttttattcctgtgtcttggctgtcataactttttatttctgctatttgctgttgtgtaatatccatggacatgtaatccacttactccatctttacaatccctttttaccaccaataaaaggatttttcttgctgttttgatttcttctattatttgtggaatgaattataccccccttaaatatctttgtttatgccttatgttcagtcatattttaatatgcttccttcatattgaagctgctgatttctcagccaaaaatcatcttagaatctttaaatatccattgcatcatttgttcagaatttaacatccattccaatgttggaggcttgtattacttatatttcatcatattctattgccaagtttagtcagttccacaccaagaatgaactgcatttcctttaaaaattattttaaaacacctttattgaaaagatctcatgactgagatgtggactttggttccatgttttcattgtaagaaagcagagagcggaaaatcaatggctccagtgattaatagatgggtttttagtaattgacaaattcatgagggaaagcatatgatctctttattagtgaatcatgcttattttttactcttaatgccactaatatacatccctaatatcacagggcttgtgcattcagatttttaaaaaattaggatagataaggaaacaacttatattcaagtgtaagatgatatcaggttggtctaagacttttggtgaacacgttcattcaactgtgatcactttattactctgaatgcctactattatcctgattatggggtctcctgaataaatagagtattagtccttatgtcatcattgttcaaaattggagatgtacacatacataccctataccaagagggccgaaactcttcaccttgatgtatgttctgatacaagttgttcagcttcttgtaaatgtgttttccttcggcttgttactgccttttgtcaaataatcttgacaatgctgtataataaatattttctatttatt

SEQ ID NO: 330307 - DNA, 6854 bp, Artificial Sequence
  derived and/or modified sequence
agtgctgaagaaagagggcactagtgtacagcccagatcgcatccttgcaccgtctggattagagctgaggcgtctgcaagccgagcgtggccacggtcctctggccccgggaccatagcgctgtctaccccgactcaggtactcagcagcatctagctcaccgctgccaacacgacttccactgtactcttgatcaatttaccttgatgcactaccggtgaagaacggggactcgaattcccttacaaacgcctccagcttgtagaggcggtcgtggaggacccagaggaggagacgaaggggaaggaggcggtggtggaggaggcaaaggccttggacgaccattgttggcgaggggcaccactccgggagaggcggcgctgggcgtcttgggggtgcgcgccgggagcctgcagcgggaccagcgtgggaacgcggctggcaggctgtggacctcgtcctcaccaccatggtcgggctccttttgttttttttcccagcgatctttttggaggtgtcccttctccccagaagccccggcaggaaagtgttgctggcaggagcgtcgtctcagcgctcggtggccagaatggacggagatgtcatcattggagccctcttctcagtccatcaccagcctccggccgagaaagtgcccgagaggaagtgtggggagatcagggagcagtatggcatccagagggtggaggccatgttccacacgttggataagatcaacgcggacccggtcctcctgcccaacatcaccctgggcagtgagatccgggactcctgctggcactcttccgtggctctggaacagagcattgagttcattagggactctctgatttccattcgagatgagaaggatgggatcaaccggtgtctgcctgacggccagtccctccccccaggcaggactaagaagcccattgcgggagtgatcggtcccggctccagctctgtagccattcaagtgcagaacctgctccagctcttcgacatcccccagatcgcttattcagccacaagcatcgacctgagtgacaaaactttgtacaaatacttcctgagggttgtcccttctgacactttgcaggcaagggccatgcttgacatagtcaaacgttacaattggacctatgtctctgcagtccacacggaagggaattatggggagagcggaatggacgctttcaaagagctggctgcccaggaaggcctctgtatcgcccattctgacaaaatctacagcaacgctggggagaagagctttgaccgactcttgcgcaaactccgagagaggcttcccaaggctagagtggtggtctgcttctgtgaaggcatgacagtgcgaggactcctgagcgccatgcggcgccttggcgtcgtgggcgagttctcactcattggaagtgatggatgggcagacagagatgaagtcattgaaggttatgaggtggaagccaacgggggaatcacgataaagctgcagtctccagaggtcaggtcatttgatgattatttcctgaaactgaggctggacactaacacgaggaatccctggttccctgagttctggcaacatcggttccagtgccgccttccaggacaccttctggaaaatcccaactttaaacgaatctgcacaggcaatgaaagcttagaagaaaactatgtccaggacagtaagatggggtttgtcatcaatgccatctatgccatggcacatgggctgcagaacatgcaccatgccctctgccctggccacgtgggcctctgcgatgccatgaagcccatcgacggcagcaagctgctggacttcctcatcaagtcctcattcattggagtatctggagaggaggtgtggtttgatgagaaaggagacgctcctggaaggtatgatatcatgaatctgcagtacactgaagctaatcgctatgactatgtgcacgttggaacctggcatgaaggagtgctgaacattgatgattacaaaatccagatgaacaagagtggagtggtgcggtctgtgtgcagtgagccttgcttaaagggccagattaaggttatacggaaaggagaagtgagctgctgctggatttgcacggcctgcaaagagaatgaatatgtgcaagatgagttcacctgcaaagcttgtgacttgggatggtggcccaatgcagatctaacaggctgtgagcccattcctgtgcgctatcttgagtggagcaacatcgaatccattatagccatcgccttttcatgcctgggaatccttgttaccttgtttgtcaccctaatctttgtactgtaccgggacacaccagtggtcaaatcctccagtcgggagctctgctacatcatcctagctggcatcttccttggttatgtgtgcccattcactctcattgccaaacctactaccacctcctgctacctccagcgcctcttggttggcctctcctctgcgatgtgctactctgctttagtgactaaaaccaatcgtattgcacgcatcctggctggcagcaagaagaagatctgcacccggaagcccaggttcatgagtgcctgggctcaggtgatcattgcctcaattctgattagtgtgcaactaaccctggtggtaaccctgatcatcatggaaccccctatgcccattctgtcctacccaagtatcaaggaagtctaccttatctgcaataccagcaacctgggtgtggtggcccctttgggctacaatggactcctcatcatgagctgtacctactatgccttcaagacccgcaacgtgcccgccaacttcaacgaggccaaatatatcgcgttcaccatgtacaccacctgtatcatctggctagcttttgtgcccatttactttgggagcaactacaagatcatcacaacttgctttgcagtgagtctcagtgtaacagtggctctggggtgcatgttcactcccaagatgtacatcattattgccaagcctgagaggaatgtccgcagtgccttcaccacctctgatgttgtccgcatgcatgttggcgatggcaagctgccctgccgctccaacactttcctcaacatcttccgaagaaagaaggcaggggcagggaatgccaattctaatggcaagtctgtgtcatggtctgaaccaggtggaggacaggtgcccaagggacagcatatgtggcaccgcctctctgtgcacgtgaagaccaatgagacggcctgcaaccaaacagccgtcatcaagcccctcactaaaagttaccaaggctctggcaagagcctgaccttttcagataccagcaccaagaccctttacaacgtagaggaggaggaggatgcccagccgattcgctttagcccgcctggtagcccttccatggtggtgcacaggcgcgtgccaagcgcggcgaccactccgcctctgccgtcccacctgaccgcagaggagacccccctcttcctggccgaaccagccctccccaagggcttgccccctcctctccagcagcagcagcaaccccctccacagcagaaatcgctgatggaccagctccagggagtggtcagcaacttcagtaccgcgatcccggattttcacgcggtgctggcaggccccggtggtcccgggaacgggctgcggtccctgtacccgcccccgccacctccgcagcacctgcagatgctgccgctgcagctgagcacctttggggaggagctggtctccccgcccgcggacgacgacgacgacagcgagaggtttaagctcctccaggagtacgtgtatgagcacgagcgggaagggaacacggaagaagacgaactggaagaggaggaggaggacctgcaggcggccagcaaactgaccccggatgattcgcctgcgctgacgcctccgtcgcctttccgcgactcggtggcctcgggcagctcggtgcccagctcccccgtgtccgagtcggtgctctgcacccctcccaacgtatcctacgcctctgtcattctgcgggactacaagcaaagctcttccaccctgtaagggggaagggtccacatagaaaagcaagacaagccagagatctcccacacctccagagatgtgcaaacagctgggaggaaaagcctgggagtggggggcctcgtcgggaggacaggagaccgctgctgctgctgccgctactgctgctgctgccttaagtaggaagagagggaaggacaccaagcaaaaaatgttccaggccaggattcggattcttgaattactcgaagccttctctgggaagaaagggaattctgacaaagcacaattccatatggtatgtaacttttatcacaaatcaaatagtgacatcacaaacataatgtcctcttttgcacaattgtgcatagatatatatatgcccacacacactgggccatgcttgccaaggaacagcccacgtggacatgccagtcggatcatgagttcacctgatggcattcggagtgagctggtggagccagacagagcaggtgcggggaagggaagggcccaggccagacccatcccaaacggatgatgggatgatgggacagcagctccttgctcagaagcccttctccccgctgggctgacagactcctcatcttcaggagactcaggaatggagcggcacaggggtctctcttcatccactgcaacccatccagtgccagctttgagattgcacttgaagaaaggtgcatggaccccctgctgctctgcagattccctttatttaggaaaacaggaataagagcaaaattatcaccaaaaagtgcttcatcaggcgtgctacaggaggaaggagctagaaatagaacaatccatcagcatgagactttgaaaaaaaaacacatgatcagcttctcatgttccatattcacttattggcgatttggggaaaaggccggaacaagagattgttacgagagtggcagaaacccttttgtagattgacttgtgtttgtgccaagcgggctttccattgaccttcagttaaagaacaaaccatgtgacaaaattgttaccttccacttactgtagcaaataatacctacaagttgaacttctaagatgcgtatatgtacaatttggtgccattatttctcctacgtattagagaaacaaatccatctttgaatctaatggtgtactcatagcaactattactggtttaaatgacaaataattctatcctattgtcactgaagtccttgtaactagcgagtgaatgtgttcctgtgtccttgtatatgtgcgatcgtaaaatttgtgcaatgtaatgtcaaattgactggtcaatgtcaacctagtagtcaatctaactgcaattagaaattgtcttttgaatatactatatatattttttatgttccaataatgttttgtacatcattgtcatcaatatctacagaagctctttgacggtttgaatactatggctcaaggttttcatatgcagctcggatggacatttttcttctaagatggaacttatttttcagatattttctgatgtggagatatgttattaatgaagtggtttgaaaatttgttatattaaaagtgcacaaaaactgagagtgaaaataaaaggtacattttataagcttgcacacattattaacacataagattgaacaaagcatttagattattccaggttatatcatttttttaaagattttccacagctacttgagtgtctaacatacagtaacatctaactcagctaataatttgtaaaatctttatcaatcacattttgccttcttttaatttttatgttcatggacttttattcctgtgtcttggctgtcataactttttatttctgctatttgctgttgtgtaatatccatggacatgtaatccacttactccatctttacaatccctttttaccaccaataaaaggatttttcttgctgttttgatttcttctattatttgtggaatgaattataccccccttaaatatctttgtttatgccttatgttcagtcatattttaatatgcttccttcatattgaagctgctgatttctcagccaaaaatcatcttagaatctttaaatatccattgcatcatttgttcagaatttaacatccattccaatgttggaggcttgtattacttatatttcatcatattctattgccaagtttagtcagttccacaccaagaatgaactgcatttcctttaaaaattattttaaaacacctttattgaaaagatctcatgactgagatgtggactttggttccatgttttcattgtaagaaagcagagagcggaaaatcaatggctccagtgattaatagatgggtttttagtaattgacaaattcatgagggaaagcatatgatctctttattagtgaatcatgcttattttttactcttaatgccactaatatacatccctaatatcacagggcttgtgcattcagatttttaaaaaattaggatagataaggaaacaacttatattcaagtgtaagatgatatcaggttggtctaagacttttggtgaacacgttcattcaactgtgatcactttattactctgaatgcctactattatcctgattatggggtctcctgaataaatagagtattagtccttatgtcatcattgttcaaaattggagatgtacacatacataccctataccaagagggccgaaactcttcaccttgatgtatgttctgatacaagttgttcagcttcttgtaaatgtgttttccttcggcttgttactgccttttgtcaaataatcttgacaatgctgtataataaatattttctattt

SEQ ID NO: 330308 - DNA, 3585 bp, Artificial Sequence
  derived and/or modified sequence
atggtgggcctgctgctcttcttcttccctgccatcttcctggaggtgtccctgctgcccaggagccctggcaggaaggtgctgctggccggggccagcagccagaggtctgtggccaggatggatggagatgtgatcattggagccctcttctctgtgcaccaccagcccccagctgagaaggtgcctgagaggaaatgtggggagatccgggagcagtatggcatccagagggtggaggccatgttccacaccctggacaagatcaatgctgaccctgtgctgctgcccaacatcaccctgggcagcgagatccgggacagctgctggcacagctctgtggccctggagcagagcattgagttcatccgggacagcctcatcagcatcagagatgagaaggatggcatcaaccgctgcctgcctgatggccagagcctgcccccaggccgcaccaagaagcccatcgccggggtcatcggccctggcagcagctctgtggccatccaggtgcagaacctgctgcagctgtttgacatcccccagatcgcctacagcgccaccagcattgacctgagtgacaagaccctgtacaagtacttcctgcgggtggtgcccagcgacaccctgcaggcccgggccatgctggacatcgtgaagcgctacaactggacctacgtgtctgctgtgcacacagagggcaactacggggagagcggcatggatgccttcaaggagctggccgcccaggagggcctgtgcatcgcccacagcgacaagatctacagcaatgctggggagaagagctttgaccggctgctgaggaagctgcgggagcggctgcccaaggcccgggtggtggtgtgcttctgtgagggcatgacagtgcggggcctgctgagcgccatgaggcggctgggcgtggtgggggagttcagcctgattggaagtgatggctgggccgacagagatgaggtgattgagggctatgaggtggaggccaatggaggcatcaccatcaagctgcagagccctgaggtgcgcagctttgatgactacttcctgaagctgcggctggacaccaacaccaggaacccctggttccctgagttctggcagcaccgcttccagtgccgcctgcccggccacctgctggagaaccccaacttcaagaggatctgcacaggaaatgaaagcctggaggagaactacgtgcaggacagcaagatgggcttcgtcatcaatgccatctatgccatggcccacggcctgcagaacatgcaccacgccctgtgccccggccacgtgggcctgtgtgatgccatgaagcccattgatggcagcaagctgctggacttcctgatcaagagcagcttcatcggcgtgtctggagaggaggtgtggtttgatgagaagggagatgcccctggccgctatgacatcatgaacctgcagtacacagaggccaacagatatgactatgtgcacgtgggcacctggcatgaaggagtgctgaacattgatgactacaagatccagatgaacaagtctggagtggtgcgctctgtgtgcagcgagccctgcctgaagggccagatcaaggtgatcaggaagggggaggtgtcctgctgctggatctgcacagcctgcaaggaaaatgaatatgtgcaggatgagttcacctgcaaggcctgtgacctgggctggtggcccaatgctgacctgaccggctgtgagcccatccctgtgcgctacctggagtggagcaacatcgagagcatcatcgccatcgccttcagctgcctgggcatcctggtgaccctgtttgtgaccctcatctttgtgctgtacagagacacccctgtggtgaagagcagcagccgggagctgtgctacatcatcctggccggcatcttcctgggctacgtgtgccccttcaccctgattgccaagcccaccaccaccagctgctacctgcagaggctgctggtgggcctgagcagcgccatgtgctacagcgccctggtgaccaagaccaaccgcatcgcccgcatcctggccggcagcaagaagaagatctgcaccaggaagccccgcttcatgtctgcctgggcccaggtgatcatcgccagcatcctgatctctgtgcagctgaccctggtggtgaccctcatcatcatggagccccccatgcccatcctgagctaccccagcatcaaggaggtgtacctgatctgcaacaccagcaacctgggcgtggtggcccccctgggctacaacggcctgctgatcatgagctgcacctactatgccttcaagaccagaaatgtgcctgccaacttcaatgaggccaagtacatcgccttcaccatgtacaccacctgcatcatctggctggcctttgtgcccatctacttcggcagcaactacaagatcatcaccacctgctttgctgtgtccctgtctgtgacagtggccctgggctgcatgttcacccccaagatgtacatcatcatcgccaagccagagagaaatgtgcgcagcgccttcaccaccagtgatgtggtgaggatgcacgtgggagatggcaagctgccctgccgcagcaacaccttcctgaacatcttccggaggaagaaggccggggctggaaatgccaacagcaatggcaagtctgtgtcctggagcgagcccggcggcggccaggtgcccaagggccagcacatgtggcaccggctgtctgtgcacgtgaagaccaatgaaacagcctgcaaccagacagctgtgatcaagcccctgaccaagagctaccagggcagcggcaagagcctgaccttcagtgacaccagcaccaagaccctgtacaacgtggaggaggaggaggatgcccagcccatccgcttcagccccccaggcagccccagcatggtggtgcaccggcgggtgcccagcgctgccaccaccccacccctgcccagccacctgacagctgaggagacccccctcttcctggccgagcccgccctgcccaagggcctgcccccacccctgcagcagcagcagcagcccccaccccagcagaagagcctgatggaccagctgcagggcgtggtgagcaacttcagcacagccatcccagacttccacgctgtgctggccggccctgggggccctggaaatggcctgcggagcctgtacccacctcctcctccaccccagcacctgcagatgctgcccctgcagctgagcacctttggagaggagctggtgagccccccagcagatgatgatgatgacagcgagcgcttcaagctgctgcaggagtatgtgtatgaacatgagcgggagggcaacacagaagaagatgagctggaggaggaggaggaggacctgcaggccgccagcaagctgaccccagatgacagccctgccctgaccccacccagccccttccgggacagcgtggccagcggcagctctgtgcccagcagccctgtgtctgagagcgtgctgtgcaccccacccaacgtgtcctatgccagcgtcatcctgcgggactacaagcagagcagcagcaccctgtag

SEQ ID NO: 330309 - DNA, 3585 bp, Artificial Sequence
  derived and/or modified sequence
atggtgggcctgctgctgttcttcttccccgccatcttcctggaggtttcacttctgcctcgcagtcctggccgaaaagtgctgctggctggagcgtctagccaacgctcagtagcgaggatggacggcgacgtgattatcggcgcgctcttctcggtccatcatcaaccacctgccgaaaaagttccagaacggaagtgtggggaaatacgcgaacagtacgggatacagagggtcgaggccatgtttcatacactcgacaaaattaatgcagacccagtgctgcttcctaacatcacacttggaagtgaaatcagggatagctgctggcatagttccgtggcccttgaacagagtattgaattcattagggattcacttatctccattcgcgatgagaaggatggtataaaccgctgtctacccgacggacaatctctcccacctggacgcaccaagaaacccattgccggagttatcggcccaggcagtagttctgtcgccattcaggtccagaatctgctccaactctttgacatccctcagatcgcctacagtgctaccagcatagacctgtccgacaaaacactgtacaagtattttctccgggtggtccctagcgataccctgcaggccagagctatgctggacatcgtcaaacgctacaactggacctatgtgtccgccgtccacactgagggcaattatggcgaatctggcatggacgcttttaaggaactcgctgcgcaggagggcttatgcatcgctcactccgataagatatattccaatgctggcgaaaagtcctttgaccgcctgctgcgtaaattgagggaaagactcccaaaggcccgtgtggtggtctgcttttgtgaaggtatgacagtgaggggcttgctctctgcaatgcgcaggctgggtgtagtcggagaattcagcttgatcggctcagatggttgggctgatcgggatgaggtaatagaaggatacgaggtggaagccaacggcgggatcactataaaactacagagtcccgaggttagaagcttcgatgactattttctgaagctgcggctcgacaccaatacacgcaatccgtggtttccagagttctggcagcacaggtttcaatgtaggcttcctggccacctccttgagaatccgaactttaagagaatttgcaccggaaatgagagcctcgaggaaaactacgtgcaagatagtaagatgggttttgtcataaacgccatctacgcaatggcccacggcttgcagaacatgcaccatgccttgtgccctggccatgtcgggctgtgcgatgctatgaagcctatcgacggatctaaactcctggatttcctgatcaagtcctctttcattggagtgagcggggaagaggtgtggttcgatgagaagggcgatgcgccaggacggtatgatatcatgaacctgcagtataccgaagctaatagatatgattacgtccatgtgggaacatggcacgagggcgtactaaacattgatgattacaaaattcagatgaataaatcaggcgtggtccgttcagtatgcagcgaaccttgcctgaaaggacagatcaaggtgatcaggaaaggagaagtcagttgctgctggatctgtacagcatgcaaggaaaacgagtatgtgcaagacgagttcacttgcaaggcgtgtgacctggggtggtggcccaatgccgatctcactgggtgcgagcctattccagttcgctacctggaatggtccaacatcgagtccataatcgccatagccttcagctgcctcggcatactcgtgaccctttttgtaacactgattttcgtgctctatagggacacgccagtggtgaagtcctcctccagagagctgtgttacattatactggctggcatattcctaggatatgtttgcccattcacactcatcgccaagccaactaccacctcttgttacctccagcgacttctcgttggcctgtcatcagcgatgtgttattctgctttagtgaccaagacaaacagaatcgccagaattctcgcgggaagtaagaaaaaaatttgtactcgcaaaccccgatttatgagcgcttgggctcaggtcattatcgcttctatcttgatcagcgtgcaactgaccttggttgtgacactgattatcatggaaccccccatgcccattctgagttatccctcgataaaagaggtgtacctgatttgcaatacctccaatcttggcgttgtcgctcctctggggtataatgggctactcatcatgtcctgcacttactacgcatttaaaacccggaacgtgcccgctaattttaacgaggctaaatacatcgccttcaccatgtacaccacctgcattatttggcttgccttcgtcccgatttatttcgggtccaactacaagatcatcaccacgtgcttcgcggtcagccttagcgtcaccgtagcattgggctgcatgttcacccccaaaatgtatattataatagctaaaccagaaagaaatgtccggtccgcctttaccacttctgacgtggtaaggatgcacgttggcgatggtaagctgccgtgcaggagcaacacttttttgaacatatttcgccggaagaaggcaggcgcaggaaacgcgaactcaaacggaaagagtgtttcctggagcgagcccggtggaggacaggtgcccaagggacagcatatgtggcacagactcagcgtccacgtgaagacaaacgagactgcatgcaatcagacagccgtgattaagccacttacgaaaagctatcagggaagtggaaaatcactgacattcagcgatacttcgacaaagacattatacaacgtggaggaggaagaagatgcacagcctatcaggttttcccccccgggaagtcctagtatggtcgttcatcggagagtccccagcgccgcaaccaccccgcctcttccgtcccatttgaccgcggaggaaaccccactgttccttgctgaacccgccttgcctaaggggcttcccccaccgctgcagcagcaacagcagcctccgccccagcagaaatccttaatggaccagctgcagggcgtggtgtctaacttctctacagcaattcccgacttccatgctgttttggccggacccggtgggccagggaatggactgcggagcctctaccctcccccaccacctcctcagcacctgcagatgctcccgctgcagctgtcaacatttggcgaagaactggtttccccccccgctgacgatgacgacgacagtgaaagatttaagctgctccaggaatatgtgtatgagcacgagagagagggaaatacggaggaagacgagctcgaagaggaggaggaggatctccaggccgcaagcaagctcactcccgatgattcacccgccttaacacctccatctcctttccgcgacagcgttgcctcagggagctccgtgccctcttcaccggtgtcagagtctgtcctatgtacaccgcctaatgtctcttacgcctcagttattctcagagactataaacaatccagctccactctttag

SEQ ID NO: 330310 - DNA, 3585 bp, Artificial Sequence
  derived and/or modified sequence
atggtgggcctgctgctgttcttcttccccgccatcttcctggaggtcagcctgctgcccagatctccaggaaggaaggttctgctggcaggcgcatcgagccaacgaagcgtggctcgaatggacggagacgttatcattggcgctttgttctcagtgcaccatcagccccccgccgaaaaagtgcccgaacgcaagtgcggggagatacgcgaacaatatgggatccagcgggttgaggcaatgtttcataccctggacaagatcaatgccgatccagttctgctgccgaacatcacgctgggatcagaaatacgggacagttgctggcatagctccgtcgccttggagcagtcgatcgagtttatcagggactcgctgattagtataagggatgagaaagacggcatcaatagatgcttgccggacggacagagcctgccccctgggcgcaccaagaaacctattgctggcgtcatcggcccgggctccagctctgtggccattcaggttcagaatctactccaactgttcgacatcccccagatcgcgtactcagctacatcaatagacctctctgataagactttgtacaaatacttccttcgggtggtaccaagcgacacactgcaagccagggccatgttggacatcgtgaaacgatataattggacctacgtcagtgctgtgcatacagaggggaattacggggagtccggcatggacgcatttaaagaactggctgctcaggagggcttatgtatcgcacattctgacaagatttactctaatgcaggcgaaaagtccttcgaccgattgctgcgtaagctaagagagagactgccgaaagccagggtggtggtgtgcttttgcgagggtatgactgtgagaggactgttaagcgctatgcggcggctgggtgtggtcggggagttctccctaataggatccgacggatgggcagatcgcgacgaagtgattgaggggtatgaagtcgaggcaaacggagggattaccattaagctgcagtcgccggaggtcagaagtttcgacgattatttcttgaagttgcggttagacaccaacactagaaacccatggtttcccgagttttggcagcatcgctttcagtgcagacttcccggtcacctgcttgaaaacccaaatttcaagaggatctgtaccgggaacgagtctctcgaggagaactacgtgcaggactcgaaaatgggctttgtgatcaatgccatctacgccatggcacacggcctacaaaatatgcaccacgctctctgccctggccacgtgggactctgcgatgcaatgaaacccatcgatggaagcaagctgttggattttcttattaagtcttccttcattggcgtctctggggaggaggtgtggtttgatgagaaaggcgatgcccccggaaggtacgatatcatgaatttgcaatacacagaagctaatcgctacgactacgtgcacgtgggaacttggcacgagggggtgttgaatatcgatgattataagatacaaatgaacaagagtggggtggtccgctctgtgtgtagcgaaccgtgcctgaagggtcagatcaaggtcatcagaaaaggagaggttagctgttgttggatttgtacggcatgtaaagaaaacgaatacgtacaggacgagttcacttgtaaagcctgtgacctcggctggtggccgaacgctgacctcactggctgcgagcccatcccagtccgctacctcgagtggtcgaacattgagtccattatcgccatcgccttctcctgtttaggcatcttggtgactcttttcgttacgttgatttttgtcttgtatcgagatacacccgtggtgaagagttcgagccgcgagctctgttacataattctggctggaatcttcctgggttatgtctgtccatttactttgatcgctaagccgactactacttcgtgctacctacagaggctgttggtcgggctttcatccgctatgtgctactccgccctggtaacaaaaacaaataggattgcccgcattttggctggcagcaagaaaaagatatgtacacggaaacctcgttttatgagcgcctgggcacaggttatcattgcatctatcctgatctcggttcagcttacactggtggtgaccttgattatcatggaacctcccatgcctatcctgagttaccctagcatcaaggaggtgtacttgatctgtaacacgtccaacctcggagttgtggcccctctgggatataatgggctgctgatcatgtcctgcacatattacgcatttaaaactcggaatgtgccagcaaactttaatgaggcaaagtacatagcgttcaccatgtacacaacttgtattatttggttagcttttgtcccaatctactttggctccaattataagattatcacgacctgttttgctgtgagcctgtcagttaccgttgccttgggttgtatgtttacgcctaagatgtacattatcatcgccaaaccagagcgaaatgtaaggtctgcattcaccacctccgatgtcgtgcggatgcacgtcggggacggaaagctgccatgtagaagcaacacatttctgaacatctttcgccgcaagaaagccggcgcagggaacgcaaattccaatgggaaatcagtgagctggagcgaacccggggggggccaggtgcccaagggccagcacatgtggcaccgtttgtcggtccacgtaaaaactaatgaaacggcgtgcaatcagaccgccgtgatcaagcctctcaccaagtcgtaccagggtagtggaaagtctctcacattcagtgacacctctactaaaacattatataatgtggaagaagaggaagatgctcagccgattcggttttctcctccaggttcaccctcaatggtggtgcatcggagggtgccatcggccgccactactccacccctgccctcacacctaaccgcagaagaaacacccctctttctggctgaaccagcactcccaaaggggcttccccctcccctgcagcaacagcaacagccgcccccccaacagaagagtctgatggaccagcttcaaggcgtcgtgtccaacttttccacggctatccctgacttccacgctgtgctcgccggcccgggggggccagggaacgggctgcggtctctctatccgccacctcccccaccccagcacctccaaatgctgcctctccagctttcaactttcggcgaggagttggtttctccaccggccgacgatgatgatgatagcgaacgattcaagctgctgcaggagtatgtgtatgagcacgagagagagggtaacaccgaagaggacgagcttgaagaggaagaggaagacttgcaggcggcctccaaactcacgcctgatgactcacctgcactgacaccaccctccccattccgggactctgtcgcaagtggctcaagcgtgccctcctcaccagtgagcgagagtgtactgtgtacgccaccgaatgtgtcatacgcttccgtgatacttcgagattacaagcaatcctccagcacattgtag

SEQ ID NO: 330311 - DNA, 3585 bp, Artificial Sequence
  derived and/or modified sequence
atggtgggcttattgctcttcttctttcctgcaatattcctggaggtaagcctgctgccccgtagtcctggccgtaaggtgctacttgctggcgcatcaagccaacgaagcgtggccaggatggacggcgacgtgatcatcggggctcttttctctgttcaccaccagcccccagcagagaaagtgcccgagaggaaatgcggggagatcagagagcagtacggcatacaacgagtggaagcgatgttccacaccttggataaaatcaacgcagatccagtgttacttccaaatattaccttaggctccgagattcgtgattcgtgctggcattcctccgtcgcattagagcagtccatagaatttattcgggactctcttatctcgatcagagatgagaaggacgggatcaataggtgcctgcctgatggccagagtctgcccccaggcagaaccaaaaaaccgatcgcgggagtcattgggcctggaagttcatctgttgccatccaggttcaaaatcttttgcaactgttcgatattccccaaattgcttactctgcaacatccatcgacctgtcagacaaaactctttataagtatttccttcgagtggtgccttccgacacattgcaggcaagggcgatgttggacatcgtgaaaagatataactggacatatgtctctgccgtgcataccgaaggtaactacggtgaaagtggaatggacgcattcaaagagttagcggcacaggaaggattgtgtatagctcactccgacaagatctacagcaatgccggagagaagtctttcgatcggctgctgcgcaagttgagagagcggctgccaaaggctcgagtagtggtttgtttttgtgaaggcatgacagtgagaggactgctcagtgctatgcgcaggctgggggttgtcggagagttttccctgattggcagtgatggctgggccgatagagatgaagtaatcgaagggtatgaggtggaggcaaacggaggcatcacaataaagctacagagccccgaggtgcgctcatttgacgattacttcctgaaactaaggctcgacactaatactagaaatccctggttccccgagttctggcagcaccgctttcagtgcagactgccaggtcacctgctggaaaaccctaacttcaaaagaatctgcactggaaacgagtcactggaggaaaattacgtacaggatagcaagatggggttcgtcatcaacgctatatacgccatggctcacgggctgcaaaatatgcatcatgcactctgtccaggccatgtgggtttgtgcgacgcaatgaaacccatcgacggctctaagctcctggattttctcattaagtcttcttttataggggtgtcgggcgaggaggtctggtttgacgagaaaggcgacgctcccggtaggtacgatatcatgaacctgcaatacacagaggccaaccgttatgactacgtgcatgtgggaacctggcacgagggtgtgctgaatatcgatgattataagatccagatgaataaatcgggagtcgttcgttcagtctgtagtgaaccctgcttgaaaggacagattaaagtcattaggaagggagaagtctcatgctgttggatctgcaccgcctgcaaggagaacgagtatgtacaggacgagttcacatgcaaagcctgtgacctcggctggtggcccaacgctgatctgacaggctgtgaaccaattccggtaaggtacctggaatggagtaacatcgagtcaattatcgcgatcgcgttctcatgcttggggattctggtgactctgttcgtcactctgatcttcgtgctttaccgggacacaccggtagtaaaatcctccagccgggaactttgctatataattttggctggcatattccttggatacgtctgtcccttcacgctgatcgcgaaaccgacaacaaccagctgctatctgcagagactgctggtaggcctgagttccgccatgtgttactccgcactggtgacaaagactaaccggattgctcgtatcctggctgggtccaagaaaaaaatttgcaccagaaagcctcgcttcatgtccgcctgggcccaagtgatcatcgcaagtatcctgatcagtgtccagttgactctggtcgtgactctcattattatggaaccacccatgcccattctctcctatcccagcataaaggaggtgtacctcatctgtaacactagcaatctaggagtggtggctccactgggttataatggcctgctgattatgtcctgtacgtactatgccttcaaaactcgaaacgtcccggcaaacttcaacgaggccaaatatattgcctttaccatgtacaccacttgcattatttggttggcctttgtccctatctacttcggatctaactataagatcattacaacatgttttgctgtctcactatcagtgactgtggcactgggctgcatgttcacacccaaaatgtatatcataattgccaagcctgagagaaacgtaagatccgcttttactacttcagatgtcgttcgcatgcatgtaggcgatgggaaattgccctgccgctccaacacatttctgaacatcttccgacgtaagaaagctggagccggtaatgccaattcaaacgggaagagtgtcagctggagcgagcctggtggcggacaggtgcctaaagggcagcacatgtggcatcgtctgtccgtccacgtgaagacaaacgagacagcttgtaatcaaaccgctgtcatcaaacccctgactaagtcttatcaaggttcaggaaaatccctcactttttccgatacttctaccaagacactttataatgtcgaggaagaggaggacgcacagcctatcaggttctctccacccggatcccctagtatggttgtacaccgccgtgtcccctcggccgcaaccactccaccactgcccagccacctcaccgccgaggagacacccttgttcttagcagaacccgctcttccgaagggactgccaccccctcttcaacagcaacaacaacctccaccacagcagaagtcccttatggaccaactccagggagtcgtctctaacttttccacagcgatacctgatttccatgccgtccttgcgggacccggtgggcctggcaatggtctcaggagtctctatccgccacctcctcccccacagcacctacaaatgttaccgctccagctgagtacctttggggaagagctagtttctccccctgctgatgacgatgatgatagcgaacggtttaaactgttacaagaatacgtttacgagcacgagagagaggggaacaccgaagaggacgagctagaggaggaagaagaggacttacaagccgcaagcaagcttacgcctgacgattctcccgctctgacgccaccgtctccgtttcgtgacagcgtagcctcgggaagctccgtgccaagtagccctgtgagcgagtccgtcttgtgcacccccccaaatgtttcttatgccagcgtaattcttcgcgattacaagcagagttcctccaccctgtag

SEQ ID NO: 330312 - DNA, 3585 bp, Artificial Sequence
  derived and/or modified sequence
atggtcggcctcctcttgtttttcttcccggcaatcttcctggaagtgagtctgttgccaagatccccaggcaggaaagtcctcctcgctggcgcttcgtcccagcgctcagtggcacgcatggacggggacgttattatcggtgccctattcagcgttcatcatcagccccctgcggaaaaggtgccagagaggaaatgcggagaaatcagagaacagtacggaatccaacgagttgaagctatgttccataccctcgataaaattaatgctgatcccgttctcctccccaacatcacactgggcagtgagattagagactcatgttggcactcttcagtggcactcgagcagtccatagagtttatacgggacagccttatcagtatccgagatgagaaggacggcattaataggtgcctgcctgatggccagagcttgccccctggccgtacaaagaagcccatcgcaggcgtgatcggacctggaagttctagcgttgctatccaggtgcaaaatcttcttcagctgtttgacatcccccaaatcgcctactcagcaacaagtatagatctctcagacaagacactctacaagtacttccttcgtgtcgtgccctcggatacactgcaggcccgtgcgatgttggatattgtaaaaagatataactggacctacgtatccgccgtgcataccgaaggcaactacggagagtctggaatggacgcgtttaaggagttagcagcacaggagggtttgtgtatcgcccactccgacaagatttactccaatgcgggtgaaaaaagcttcgatcggctactgagaaaactgagagaacggctgccaaaggccagggtggttgtatgcttctgtgaaggcatgaccgtccgcggactgctgagtgctatgaggcggttaggagtcgttggtgagttttcattgataggttctgatggatgggccgaccgcgacgaagtgatcgagggatatgaagttgaggctaatggtggcattaccatcaaactccagtctcctgaggtgaggagtttcgacgattattttttgaagctccgattggacaccaacacaaggaacccatggtttcccgaattttggcagcaccgattccaatgccgcctgccgggtcacttgctggaaaaccccaactttaagagaatttgtaccggaaacgagtctttggaggagaattatgtgcaagatagtaagatgggattcgtcatcaatgccatttacgctatggcccacggacttcagaatatgcatcacgccttatgccccggtcatgtgggactgtgcgatgctatgaaacccatcgacggaagcaaactgcttgactttctcatcaagagttcattcattggagtctccggcgaagaagtttggttcgatgaaaaaggggacgccccaggaagatacgacatcatgaacctgcagtacaccgaagccaataggtacgactacgtgcacgtcggcacctggcacgagggtgtgctgaacatcgatgactataagattcagatgaataaatcgggggtggttcgttccgtgtgttccgagccctgcctgaaaggtcaaattaaggttatacggaagggcgaagtctcctgctgctggatctgcacagcttgtaaggaaaacgagtacgtccaggatgaatttacgtgcaaagcttgcgatctcggttggtggccgaacgccgacctcacaggctgtgaaccgatccccgtccgctatcttgagtggtccaacatcgaatccatcatagccattgctttctcctgtcttggtatattagtcaccttgttcgtgactctcatttttgtcctctatagggacacgcccgtcgtgaagtcctcctcgagggagctgtgttacataatactggccggtatctttctcgggtatgtttgcccattcacacttatcgcaaagccaactacaacaagttgctatctccagcgcctccttgtggggctgtcatcagcgatgtgctattcggccctcgtcactaagacaaatcggattgcacgcattctcgctgggtcgaagaaaaagatttgtacccgaaaaccaagatttatgtcagcctgggctcaggtcataatagcctctatccttatcagcgtccagctgacacttgtggtgacactgatcatcatggagccacctatgcccattttgagctatccctccattaaagaagtgtacctgatctgcaataccagcaatcttggtgtggtcgcccctctgggctacaacggtcttctaatcatgtcttgtacatattatgcgtttaaaacccgcaatgtgcccgctaactttaacgaagctaagtacatcgctttcacaatgtacaccacttgcatcatctggcttgctttcgtccctatttatttcgggagcaattacaaaattatcaccacatgcttcgctgtaagcttatcagtgacagtggctttaggatgcatgttcacccctaagatgtatattatcatcgccaagccagagcggaacgttaggtcagcgttcactacttcagacgtagttaggatgcacgtcggcgatggtaagctgccttgccggagcaataccttcctaaatatcttcagacgtaaaaaggctggggctgggaacgcaaactccaacggaaagtctgtctcttggtcagagccagggggtggacaggtgccaaagggccaacacatgtggcatcgcctctcagtacatgtgaagaccaacgaaaccgcttgcaatcagaccgccgtcatcaaacccttaaccaaatcttaccaggggagtggtaaatccctgactttttcagatacgtcaacaaagacactgtacaacgttgaggaagaggaggacgctcagccaatccgctttagtccacctggctcaccatcgatggttgtgcaccgtcgcgtcccaagtgctgccacaaccccgccactgccatcccacttaaccgctgaggagaccccgctcttccttgccgaacctgctttgccaaagggattgcccccaccactccaacaacagcagcaacctccaccccagcagaagagtctgatggatcagctgcagggcgtagtgtctaacttctccaccgctattcctgacttccacgcagtcctggctggcccaggagggccaggtaatggccttagatctttgtatccacccccacccccacctcagcatctgcagatgctacctctgcagctgtccacgttcggagaagagcttgtctcccctcctgctgacgacgacgacgattcagagcgcttcaagctgttgcaggaatatgtttacgaacacgagagagagggcaacactgaggaagacgagttagaggaggaggaggaagaccttcaggctgccagtaagttaacacctgatgactcaccggcactcactccgccatcacctttccgcgattcagtggcctcaggctcaagcgttccttcgtcccccgtctcggagtctgtgttgtgtacaccacccaatgtaagctacgccagcgtaattttgcgagactacaagcaatcaagctccacgctatag

SEQ ID NO: 330313 - DNA, 3585 bp, Artificial Sequence
  derived and/or modified sequence
atggtgggcctgctgctgttcttcttccccgccatcttcctggaggtgagcctgctgcccagaagccccggcagaaaggtgctgctggccggcgccagcagccagagaagcgtggccagaatggacggcgacgtgatcatcggcgccctgttcagcgtgcaccaccagccccccgccgagaaggtgcccgagagaaagtgcggcgagatcagagagcagtacggcatccagagagtggaggccatgttccacaccctggacaagatcaacgccgaccccgtgctgctgcccaacatcaccctgggcagcgagatcagagacagctgctggcacagcagcgtggccctggagcagagcatcgagttcatcagagacagcctgatcagcatcagagacgagaaggacggcatcaacagatgcctgcccgacggccagagcctgccccccggcagaaccaagaagcccatcgccggcgtgatcggccccggcagcagcagcgtggccatccaggtgcagaacctgctgcagctgttcgacatcccccagatcgcctacagcgccaccagcatcgacctgagcgacaagaccctgtacaagtacttcctgagagtggtgcccagcgacaccctgcaggccagagccatgctggacatcgtgaagagatacaactggacctacgtgagcgccgtgcacaccgagggcaactacggcgagagcggcatggacgccttcaaggagctggccgcccaggagggcctgtgcatcgcccacagcgacaagatctacagcaacgccggcgagaagagcttcgacagactgctgagaaagctgagagagagactgcccaaggccagagtggtggtgtgcttctgcgagggcatgaccgtgagaggcctgctgagcgccatgagaagactgggcgtggtgggcgagttcagcctgatcggcagcgacggctgggccgacagagacgaggtgatcgagggctacgaggtggaggccaacggcggcatcaccatcaagctgcagagccccgaggtgagaagcttcgacgactacttcctgaagctgagactggacaccaacaccagaaacccctggttccccgagttctggcagcacagattccagtgcagactgcccggccacctgctggagaaccccaacttcaagagaatctgcaccggcaacgagagcctggaggagaactacgtgcaggacagcaagatgggcttcgtgatcaacgccatctacgccatggcccacggcctgcagaacatgcaccacgccctgtgccccggccacgtgggcctgtgcgacgccatgaagcccatcgacggcagcaagctgctggacttcctgatcaagagcagcttcatcggcgtgagcggcgaggaggtgtggttcgacgagaagggcgacgcccccggcagatacgacatcatgaacctgcagtacaccgaggccaacagatacgactacgtgcacgtgggcacctggcacgagggcgtgctgaacatcgacgactacaagatccagatgaacaagagcggcgtggtgagaagcgtgtgcagcgagccctgcctgaagggccagatcaaggtgatcagaaagggcgaggtgagctgctgctggatctgcaccgcctgcaaggagaacgagtacgtgcaggacgagttcacctgcaaggcctgcgacctgggctggtggcccaacgccgacctgaccggctgcgagcccatccccgtgagatacctggagtggagcaacatcgagagcatcatcgccatcgccttcagctgcctgggcatcctggtgaccctgttcgtgaccctgatcttcgtgctgtacagagacacccccgtggtgaagagcagcagcagagagctgtgctacatcatcctggccggcatcttcctgggctacgtgtgccccttcaccctgatcgccaagcccaccaccaccagctgctacctgcagagactgctggtgggcctgagcagcgccatgtgctacagcgccctggtgaccaagaccaacagaatcgccagaatcctggccggcagcaagaagaagatctgcaccagaaagcccagattcatgagcgcctgggcccaggtgatcatcgccagcatcctgatcagcgtgcagctgaccctggtggtgaccctgatcatcatggagccccccatgcccatcctgagctaccccagcatcaaggaggtgtacctgatctgcaacaccagcaacctgggcgtggtggcccccctgggctacaacggcctgctgatcatgagctgcacctactacgccttcaagaccagaaacgtgcccgccaacttcaacgaggccaagtacatcgccttcaccatgtacaccacctgcatcatctggctggccttcgtgcccatctacttcggcagcaactacaagatcatcaccacctgcttcgccgtgagcctgagcgtgaccgtggccctgggctgcatgttcacccccaagatgtacatcatcatcgccaagcccgagagaaacgtgagaagcgccttcaccaccagcgacgtggtgagaatgcacgtgggcgacggcaagctgccctgcagaagcaacaccttcctgaacatcttcagaagaaagaaggccggcgccggcaacgccaacagcaacggcaagagcgtgagctggagcgagcccggcggcggccaggtgcccaagggccagcacatgtggcacagactgagcgtgcacgtgaagaccaacgagaccgcctgcaaccagaccgccgtgatcaagcccctgaccaagagctaccagggcagcggcaagagcctgaccttcagcgacaccagcaccaagaccctgtacaacgtggaggaggaggaggacgcccagcccatcagattcagcccccccggcagccccagcatggtggtgcacagaagagtgcccagcgccgccaccaccccccccctgcccagccacctgaccgccgaggagacccccctgttcctggccgagcccgccctgcccaagggcctgcccccccccctgcagcagcagcagcagccccccccccagcagaagagcctgatggaccagctgcagggcgtggtgagcaacttcagcaccgccatccccgacttccacgccgtgctggccggccccggcggccccggcaacggcctgagaagcctgtaccccccccccccccccccccagcacctgcagatgctgcccctgcagctgagcaccttcggcgaggagctggtgagcccccccgccgacgacgacgacgacagcgagagattcaagctgctgcaggagtacgtgtacgagcacgagagagagggcaacaccgaggaggacgagctggaggaggaggaggaggacctgcaggccgccagcaagctgacccccgacgacagccccgccctgaccccccccagccccttcagagacagcgtggccagcggcagcagcgtgcccagcagccccgtgagcgagagcgtgctgtgcaccccccccaacgtgagctacgccagcgtgatcctgagagactacaagcagagcagcagcaccctgtag

SEQ ID NO: 330314 - protein, 458 aa, Artificial Sequence
  derived and/or modified sequence
MKPHRIRMTHNLLLNYGLYRKMEIYRPHKATAEEMTKYHSDEYIKFLRSIRPDNMSEYSKQMQRFNVGEDCPVFDGLFEFCQLSTGGSVAGAVKLNRQQTDMAVNWAGGLHHAKKSEASGFCYVNDIVLAILELLKYHQRVLYIDIDIHHGDGVEEAFYTTDRVMTVSFHKYGEYFPGTGDLRDIGAGKGKYYAVNFPMRDGIDDESYGQIFKPIISKVMEMYQPSAVVLQCGADSLSGDRLGCFNLTVKGHAKCVEVVKTFNLPLLMLGGGGYTIRNVARCWTYETAVALDCEIPNELPYNDYFEYFGPDFKLHISPSNMTNQNTPEYMEKIKQRLFENLRMLPHAPGVQMQAIPEDAVHEDSGDEDGEDPDKRISIRASDKRIACDEEFSDSEDEGEGGRRNVADHKKGAKKARIEEDKKETEDKKTDVKEEDKSKDNSGEKTDTKGTKSEQLSNP

SEQ ID NO: 330315 - DNA, 1377 bp, Artificial Sequence
  derived and/or modified sequence
atgaagccccacagaatcagaatgacccacaacctgctgctgaactacggcctgtacagaaagatggagatctacagaccccacaaggccaccgccgaggagatgaccaagtaccacagcgacgagtacatcaagttcctgagaagcatcagacccgacaacatgagcgagtacagcaagcagatgcagagattcaacgtgggcgaggactgccccgtgttcgacggcctgttcgagttctgccagctgagcaccggcggcagcgtggccggcgccgtgaagctgaacagacagcagaccgacatggccgtgaactgggccggcggcctgcaccacgccaagaagagcgaggccagcggcttctgctacgtgaacgacatcgtgctggccatcctggagctgctgaagtaccaccagagagtgctgtacatcgacatcgacatccaccacggcgacggcgtggaggaggccttctacaccaccgacagagtgatgaccgtgagcttccacaagtacggcgagtacttccccggcaccggcgacctgagagacatcggcgccggcaagggcaagtactacgccgtgaacttccccatgagagacggcatcgacgacgagagctacggccagatcttcaagcccatcatcagcaaggtgatggagatgtaccagcccagcgccgtggtgctgcagtgcggcgccgacagcctgagcggcgacagactgggctgcttcaacctgaccgtgaagggccacgccaagtgcgtggaggtggtgaagaccttcaacctgcccctgctgatgctgggcggcggcggctacaccatcagaaacgtggccagatgctggacctacgagaccgccgtggccctggactgcgagatccccaacgagctgccctacaacgactacttcgagtacttcggccccgacttcaagctgcacatcagccccagcaacatgaccaaccagaacacccccgagtacatggagaagatcaagcagagactgttcgagaacctgagaatgctgccccacgcccccggcgtgcagatgcaggccatccccgaggacgccgtgcacgaggacagcggcgacgaggacggcgaggaccccgacaagagaatcagcatcagagccagcgacaagagaatcgcctgcgacgaggagttcagcgacagcgaggacgagggcgagggcggcagaagaaacgtggccgaccacaagaagggcgccaagaaggccagaatcgaggaggacaagaaggagaccgaggacaagaagaccgacgtgaaggaggaggacaagagcaaggacaacagcggcgagaagaccgacaccaagggcaccaagagcgagcagctgagcaacccctag

SEQ ID NO: 330316 - DNA, 1377 bp, Artificial Sequence
  derived and/or modified sequence
atgaagcctcaccggatacgaatgacccataatctcctgctaaattacggcttatatagaaagatggaaatttataggccacacaaggcaacagctgaagagatgactaagtaccactccgatgagtatatcaagtttcttaggtctatccgcccagacaacatgagtgagtattccaagcagatgcagagattcaacgtgggtgaggactgtcccgtattcgatggactgtttgagttctgccagctgagcaccggagggtctgtggccggtgccgtcaaacttaaccgtcaacagactgacatggccgtcaactgggccggagggctccaccacgcgaagaagagtgaagcatccggtttctgctatgtgaatgacatagtcctcgcaatactggagcttctgaaatatcatcaacgcgttctctacatagacatcgatatccaccatggtgacggagtggaggaggcgttctatacaactgaccgggtgatgacggtgtcctttcacaaatacggtgagtactttcctggaaccggcgatttgagggatatcggagcaggaaaaggaaagtactatgccgttaattttcccatgcgcgacggcatcgacgatgaatcctatggccagatcttcaaacctattattagcaaagtgatggagatgtatcagccaagtgccgtggtgctacagtgcggagcagacagcttgtccggggacagactgggctgcttcaacctgacggttaagggccacgctaaatgtgtggaggtggtcaagacgttcaacctcccactgctcatgttgggaggcggtggatacaccataagaaacgtggctcggtgctggacttatgagacagcagtcgctttggactgtgagattccaaatgagctgccttacaatgactactttgagtactttgggccagattttaagttacatatcagtccatccaatatgaccaaccaaaatactcccgagtacatggagaagatcaagcagaggctgttcgagaacctcaggatgttgccgcacgcgccaggtgtacaaatgcaggcaatacctgaggatgctgtgcacgaagactccggtgacgaagacggggaggatcctgacaagcgcatttccattcgggcttcagataagcgtatcgcgtgcgacgaagaattcagcgacagcgaagacgagggcgaaggcggacggaggaatgtggctgatcataaaaaaggcgccaagaaggctaggatcgaagaggacaaaaaggagaccgaagacaagaaaactgacgtcaaggaagaggacaagagcaaggataacagtggggagaagactgataccaagggcactaagtccgaacagctgagcaatccctag

SEQ ID NO: 330317 - DNA, 1377 bp, Artificial Sequence
  derived and/or modified sequence
atgaagccacaccggattcgcatgactcacaaccttctgctgaattacggactttaccgcaagatggaaatttatagaccccacaaggctaccgccgaagaaatgactaagtaccactcagacgaatacataaaattcttgcggtctattcggcctgataatatgtcagaatacagtaagcagatgcaacggtttaacgtaggggaagactgccccgtgttcgacgggctattcgaattttgtcaactctccacgggagggagcgtggctggcgcggttaaactcaatcggcagcaaaccgacatggcagtgaactgggcagggggtctacaccacgctaaaaagtcggaagccagcgggttctgctacgtgaatgatatagtacttgcaattctggaattgctgaagtatcaccagcgggttttgtatatagatatcgacatccaccatggggacggagtggaagaggcgttttacaccacggatcgtgtgatgacggttagctttcacaaatacggagaatactttccgggaaccggcgacttgagggatattggtgcaggcaaaggcaaatactacgcagtgaatttcccaatgcgcgacggaattgacgatgagagctatggccagatattcaaacctataatatccaaagttatggaaatgtatcagcctagcgcagttgttcttcaatgcggagccgactcactgagtggtgataggctgggatgcttcaatttgactgtcaagggccatgcgaaatgcgtggaagtcgtgaagactttcaatctgccgcttcttatgctgggcgggggaggctacaccatccgaaatgtcgccagatgttggacatatgagactgctgtggcgcttgattgcgaaatcccaaatgagctgccctacaacgattattttgagtattttgggcccgattttaagctccatatcagcccttcaaatatgactaatcaaaacacccctgagtacatggaaaagatcaaacagcggctgttcgagaatttgcggatgctcccgcatgcccccggcgtgcagatgcaggccatccctgaggacgccgtgcacgaggacagtggtgacgaagatggtgaggatcctgacaagcggatctcgattcgcgcatctgacaaacgcatagcctgcgatgaggagtttagcgactccgaagacgaaggggaaggtgggcgaagaaatgtggccgaccacaaaaagggcgccaaaaaagcgcgaatcgaggaagataagaaggaaactgaagacaaaaagactgacgtgaaagaagaagataaaagtaaagacaactccggggagaagactgacaccaaggggacaaagagcgagcagctctccaacccctag

SEQ ID NO: 330318 - DNA, 1377 bp, Artificial Sequence
  derived and/or modified sequence
atgaagccccaccgcatccgcatgacccacaacctgctgctgaactacggcctgtacaggaagatggagatctaccggccccacaaggccacagctgaggagatgaccaagtaccacagtgatgagtacatcaagttcctgcggagcatccggccagacaacatgtctgagtacagcaagcagatgcagcgcttcaacgtgggggaggactgccctgtgtttgatggcctgtttgagttctgccagctgagcactggaggctctgtggccggggctgtgaagctgaaccggcagcagacagacatggctgtgaactgggccggcggcctgcaccacgccaagaagtctgaggccagcggcttctgctacgtgaatgacatcgtgctggccatcctggagctgctgaagtaccaccagagggtgctgtacatcgacatcgacatccaccacggagatggagtggaggaggccttctacaccacagacagagtgatgacagtgtccttccacaagtacggggagtacttccctggcactggagacctgcgggacattggagctgggaagggcaagtactatgctgtgaacttccccatgagagatggcattgatgatgagagctatggccagatcttcaagcccatcatcagcaaggtgatggagatgtaccagcccagcgctgtggtgctgcagtgtggggctgacagcctgagcggggaccggctgggctgcttcaacctgactgtgaagggccacgccaagtgtgtggaggtggtgaagaccttcaacctgcccctgctgatgctgggcggcggcggctacaccatcagaaatgtggcccgctgctggacctatgaaacagctgtggccctggactgtgagatccccaatgagctgccctacaatgactactttgagtacttcggccctgacttcaagctgcacatcagccccagcaacatgaccaaccagaacaccccagagtacatggagaagatcaagcagaggctgtttgagaacctgaggatgctgccccacgcccctggggtgcagatgcaggccatcccagaagatgctgtgcatgaggacagcggagatgaagatggagaggaccctgacaagaggatcagcatccgggccagtgacaagagaattgcctgtgatgaggagttcagtgacagtgaagatgaaggagagggcggcagaagaaatgtggccgaccacaagaagggggccaagaaggccagaattgaggaggacaagaaggagacagaggacaagaagacagatgtgaaggaggaggacaagagcaaggacaacagcggggagaagacagacaccaagggcaccaagtctgagcagctgagcaacccctag

SEQ ID NO: 330319 - DNA, 1377 bp, Artificial Sequence
  derived and/or modified sequence
atgaagccccaccggatccggatgacccacaacctgctgctgaactacggactctataggaaaatggaaatctatagaccacacaaagccaccgctgaagaaatgacaaagtatcatagcgacgaatatataaagttcctgcggagtataagacccgataacatgtccgagtattctaagcaaatgcagaggttcaacgttggtgaagattgccctgtgttcgatggactgttcgagttttgccagttgagcacggggggaagtgtggctggtgctgtgaagcttaaccggcagcagacagatatggcagtgaattgggcaggcggtctgcatcatgcaaagaagagtgaggcaagtggcttttgttatgtgaacgacatagtcctcgctatcctcgagttacttaaataccatcagagagtcctgtatatcgatatcgatatacaccacggggatggagtggaggaagctttttacacaactgaccgcgtgatgacagtgagcttccataaatatggagagtactttccagggaccggcgatctaagggatattggtgcaggcaaggggaagtattatgctgtcaatttcccaatgcgcgatggcatcgatgatgaaagttacggccagatctttaaaccaattatctccaaagtaatggaaatgtaccagccaagcgcggtggtactacaatgtggcgctgatagcctatctggcgacaggctgggatgcttcaatcttacggtgaagggacatgccaagtgcgtggaggtggtcaagactttcaacctgccgctgctgatgctgggtgggggcggctacactatccgcaacgtggcacggtgttggacatacgaaaccgcagtggcattagactgtgagatcccgaatgagcttccatataacgactacttcgaatacttcggtccagattttaagctgcacattagcccatcaaatatgaccaaccaaaatacacctgaatacatggaaaagattaagcagcggttattcgagaatctccgcatgttgcctcacgctcccggggtgcagatgcaggcaattccagaagatgcagtgcacgaagattcaggcgacgaagatggagaggatcctgataaacgcatctcaatccgcgcatccgacaaacgtattgcctgcgatgaagaattcagtgactctgaggatgagggagaaggcggccgccgaaacgtggccgaccataaaaagggggccaaaaaagccaggattgaagaggataagaaggagacagaagataaaaagacagatgtgaaggaggaagataagtccaaagataatagcggcgagaagaccgacaccaagggcactaagtccgaacagttgagtaacccatag

SEQ ID NO: 330320 - DNA, 1377 bp, Artificial Sequence
  derived and/or modified sequence
atgaagccccaccggatccggatgacccacaacctgctgctgaactatgggctctaccgaaagatggagatttatcgtccccacaaggccacggcagaggagatgactaagtaccactcggatgagtacatcaagtttttgagaagcatccgaccagataacatgtcagagtattctaagcaaatgcagcgcttcaatgtaggagaggattgccctgtgtttgacggattgtttgagttctgtcagctctctactggggggtccgtagcaggagcagtcaaactgaacaggcagcagacagacatggcagtcaattgggccggcggcttgcaccatgccaaaaagtcagaggcttctggattctgctacgtgaatgatatcgtgctagccatcttggagctgctcaagtatcatcagcgcgtgctttacatagacatcgatatccatcacggagatggtgtggaagaagcattttacaccaccgatagagtgatgaccgtatcctttcacaagtatggcgagtactttccagggacaggagatttgcgagacattggagctgggaaaggtaagtattatgccgtgaatttccctatgcgggacggtattgatgacgagtcatatggtcagatctttaagccgatcatctccaaggttatggagatgtaccagccgagcgccgtggtgctgcagtgtggggcagatagcttgtctggagaccgcctcggctgtttcaatctgacggttaaagggcacgctaagtgtgtggaagtggtcaaaacgtttaatctgcccctacttatgctcggcgggggaggttacacgatccgaaatgtggccagatgctggacctatgaaacggccgttgctctggattgtgagataccgaacgaactgccctataacgactactttgaatatttcggacctgatttcaaactgcatattagcccaagcaatatgacaaaccagaatacacctgaatatatggagaagattaagcaaaggcttttcgagaacctgcgcatgttgccacacgcccctggggtacagatgcaagcgataccggaggacgccgtgcacgaggactcaggcgatgaggacggggaagacccggacaaaagaataagcatccgagcgtctgataaacgtatagcttgtgatgaggagttttctgacagcgaagatgaaggagaaggcggacgccggaatgtcgcagaccataagaagggggccaaaaaggccagaatcgaggaagacaagaaggaaacagaggataagaaaacagatgtcaaagaggaagataaatccaaggacaatagcggggaaaaaaccgacaccaaagggacaaaaagcgagcaattgtcaaacccctag

SEQ ID NO: 330321 - DNA, 1377 bp, Artificial Sequence
  derived and/or modified sequence
atgaaaccccacaggattagaatgacccacaatctgttactgaactatgggctgtataggaagatggagatctataggccacacaaagccactgctgaagagatgacgaaataccattcagatgagtacattaagtttctgagatccattaggccagataacatgtctgaatattctaagcagatgcagcgctttaatgtgggggaggactgcccagtgtttgacgggctctttgagttttgccaactcagcactggcggttccgtggccggtgcggtaaagctgaacagacaacaaaccgacatggcagtcaactgggctggagggctgcatcatgccaagaaaagcgaggcatccggattctgttatgtcaacgacattgtattggccatcctggagctgctgaaatatcaccagagggttctgtacattgatattgacattcatcacggtgacggcgtagaagaggctttctatacaacggaccgggtaatgaccgtctctttccacaagtacggagaatacttccccggaacgggcgacctccgcgacataggggcaggcaaggggaaatattacgcagtgaattttcccatgagagacgggatagatgacgaaagttatggacagattttcaaacctatcatctctaaggtgatggaaatgtatcagccctccgcagtcgtcctacagtgcggcgcagacagcctctccggcgaccgtctcggttgcttcaatctgacagtcaaaggacatgccaagtgcgtggaggtggtgaagaccttcaatctcccgctgctgatgctgggcggaggcggatacacgatacggaacgtagctcgttgctggacctacgaaactgcagtcgctcttgactgtgaaatccccaacgaactgccatataatgactattttgagtatttcggacctgacttcaaactccatatttccccatccaatatgactaaccagaacacacccgagtacatggagaaaataaagcaaagactctttgagaaccttaggatgctgccccatgccccaggcgtgcagatgcaggccatcccagaggacgctgtgcacgaagatagtggagatgaggatggggaggatcccgataaacgcatctccattcgggcttccgacaagcgcatcgcttgcgatgaggagtttagcgacagtgaggacgaaggtgagggtgggagacgaaacgtagccgaccacaagaaaggagccaagaaggctcggattgaagaagacaaaaaggagacagaggacaagaaaaccgacgtgaaggaagaggataagtcaaaggacaattcaggagagaaaaccgataccaagggcaccaaaagcgagcagttgtccaatccttag

SEQ ID NO: 330322 - DNA, 1377 bp, Artificial Sequence
  derived and/or modified sequence
atgaaacctcatagaatccgtatgactcacaacctcctcctcaactacggcttatatcgcaaaatggagatttatcgtccgcataaggccactgccgaagagatgaccaaataccactccgacgagtatatcaaatttctgagatcaatcagaccagacaacatgtccgagtatagtaaacaaatgcagagatttaacgttggagaagattgtccggtgttcgatggcctgttcgaattttgccagctgtcgactgggggtagtgtggctggagcggtgaaactgaaccggcagcaaaccgacatggccgtgaactgggccggtggtctgcaccatgccaaaaagagtgaggcctcgggcttctgctacgtgaacgacatagtgctggctatcctggagctgttgaaataccatcaaagggtgctgtacattgatatcgatattcaccacggcgacggggtcgaggaagctttttacacgacggatcgtgtaatgactgtgtcatttcataagtatggcgaatactttcctggaacaggagacttgcgcgacatcggggctgggaagggcaaatactacgccgtcaattttcctatgcgtgatggcatagacgacgaatcatacggtcaaattttcaaacccattatctccaaagtgatggagatgtatcagccaagtgccgttgtgctgcagtgtggcgcagattctctctctggagacagactaggctgttttaacctgaccgtgaaaggccatgctaaatgcgtcgaggtcgttaaaaccttcaacctgccattactcatgctcggagggggaggctataccatccggaacgtggcccgatgttggacgtatgagactgcagttgctttagactgcgagattcccaatgagttgccatacaatgactactttgagtactttggtccagactttaagttacatatttcgccctccaacatgacaaaccagaatacacctgaatacatggaaaagatcaagcagagattatttgaaaatctgagaatgctcccacacgcccctggggttcaaatgcaggctattccagaggacgccgttcacgaagatagcggagacgaagacggcgaagatcctgataagagaattagtattagggcatcggataaaaggattgcttgcgatgaggaattttccgacagcgaggatgaaggggaagggggtcgcagaaacgtggccgatcataagaaaggagctaagaaagccaggatagaagaggacaagaaggaaacagaagataaaaagactgatgtgaaagaggaagacaaatccaaagataactccggcgagaagacagacaccaagggaacgaaatcagaacagctgtctaacccctag

SEQ ID NO: 330323 - protein, 365 aa, Artificial Sequence
  derived and/or modified sequence
MNITNCTTEASMAIRPKTITEKMLICMTLVVITTLTTLLNLAVIMAIGTTKKLHQPANYLICSLAVTDLLVAVLVMPLSIIYIVMDRWKLGYFLCEVWLSVDMTCCTCSILHLCVIALDRYWAITNAIEYARKRTAKRAALMILTVWTISIFISMPPLFWRSHRRLSPPPSQCTIQHDHVIYTIYSTLGAFYIPLTLILILYYRIYHAAKSLYQKRGSSRHLSNRSTDSQNSFASCKLTQTFCVSDFSTSDPTTEFEKFHASIRIPPFDNDLDHPGERQQISSTRERKAARILGLILGAFILSWLPFFIKELIVGLSIYTVSSEVADFLTWLGYVNSLINPLLYTSFNEDFKLAFKKLIRCREHT

SEQ ID NO: 330324 - DNA, 1098 bp, Artificial Sequence
  derived and/or modified sequence
atgaacatcacaaactgtacaaccgaggcgtctatggcaatacgccctaagacaattacggaaaaaatgctgatatgtatgacactcgttgtcataacaactcttacgaccctgctaaatctcgccgtgattatggcaattggaactactaagaaactgcaccagcccgcaaattacctgatttgttctcttgcggtcaccgacttgctggttgctgttttagtcatgccgctgagcatcatctacattgttatggatcggtggaaactggggtacttcttatgcgaagtttggctgagcgtggacatgacctgttgtacctgttcgattctccatctttgtgtgatagccctggacagatactgggctattaccaacgccattgagtacgctcgcaagaggaccgctaaacgggccgccctcatgatcctgacagtttggaccattagcattttcatcagcatgccacccctgttttggaggagtcacagacggctgtcaccacctccttcacagtgcactatccagcatgaccacgtcatctatacaatttattctaccctcggagctttctacattccccttactcttatcctgatcctctactaccggatttaccatgcggccaagtcactgtaccagaagcgcgggtcctctcgtcatctgtccaacaggtccacagactcgcaaaatagcttcgcatcttgcaaacttactcagacattttgcgtcagcgatttctctacaagcgaccctaccaccgagtttgaaaagttccatgcgagcatccggatccccccttttgataatgacctcgaccaccctggcgagaggcagcagatatcgtcaactagggaacgtaaggctgctcgcattctcggtctaatcctaggtgcattcattttgtcctggctccctttttttatcaaagaactaattgtcggactttcaatctacaccgttagcagcgaggttgcagatttcctgacatggttgggatatgtcaacagcctcataaatcccttactatatactagcttcaacgaagatttcaagctcgccttcaagaagctcattaggtgtagagaacatacatag

SEQ ID NO: 330325 - DNA, 1098 bp, Artificial Sequence
  derived and/or modified sequence
atgaacattacgaattgtacaactgaagcctctatggctattagacccaaaacgatcactgaaaagatgctaatttgcatgactcttgtcgtgatcaccacattgacaacattgctgaatctggcagtaataatggccattgggactactaaaaaactgcaccagccggctaactatctgatatgcagcctcgctgtcaccgatttgcttgtcgctgtcctggtgatgccattgagcattatctatatagtaatggacagatggaaactcggctattttctgtgcgaggtgtggttatctgtggacatgacttgctgtacttgttccatcttacacctctgcgttatcgcgctcgaccgctactgggctatcacaaatgccattgagtacgctagaaagcgcactgccaagagggctgcacttatgatcttgacagtgtggacaatctcgatcttcattagcatgcctccactcttctggcggtcacataggcgactgtcaccccctccatcccaatgcaccattcagcatgatcacgtgatctacaccatttacagtacccttggcgcattttacataccactcacgttgatacttattctttattaccgtatctatcatgctgccaagagcctgtaccagaaacgcggaagcagtcggcacctgagcaaccggagcaccgactctcagaacagcttcgccagttgtaagctgactcagacgttctgtgtgtccgactttagcacatctgatcctaccaccgagtttgagaagtttcacgccagtatccgtattcctccttttgataatgatctcgatcacccaggagaacgacaacagatcagttcaactcgggagcggaaggccgcgcgaatcctcgggttgatacttggggcattcatcctctcatggctgccattttttattaaagaactcatcgtcgggctgtcaatttacaccgtgagctccgaagtagctgactttcttacctggctgggctacgtgaacagcctgatcaatcccttgctgtacacttcctttaacgaggacttcaaactggctttcaagaagctgataaggtgccgcgagcatacctag

SEQ ID NO: 330326 - DNA, 1098 bp, Artificial Sequence
  derived and/or modified sequence
atgaacatcaccaactgcaccacagaggcctccatggccatccggcccaagaccatcacagagaagatgctgatctgcatgaccctggtggtgatcaccaccctgaccaccctgctgaacctggccgtcatcatggccatcggcaccaccaagaagctgcaccagcctgccaactacctgatctgcagcctggccgtgacagacctgctggtggccgtgctggtgatgcccctgagcatcatctacatcgtgatggaccgctggaagctgggctacttcctgtgtgaggtgtggctgtctgtggacatgacctgctgcacctgcagcatcctgcacctgtgtgtgattgccctggaccgctactgggccatcaccaatgccatcgagtatgccaggaagaggacagccaagagagctgccctgatgatcctgactgtgtggaccatcagcatcttcatctccatgccacccctcttctggaggagccaccggcggctgagccccccacccagccagtgcaccatccagcacgaccacgtgatctacaccatctacagcaccctgggcgccttctacatccccctgaccctcatcctgatcctgtactaccgcatctaccacgccgccaagagcctgtaccagaagaggggcagcagccgccacctgagcaacagaagcacagacagccagaacagctttgccagctgcaagctgacccagaccttctgtgtgtctgacttcagcaccagtgaccccaccacagaatttgagaagttccacgccagcatccgcatccccccatttgacaatgacctggaccaccctggagagcggcagcagatcagcagcacccgggagaggaaggccgcccgcatcctgggcctcatcctgggcgccttcatcctgtcctggctgcccttcttcatcaaggagctgattgtgggcctgagcatctacacagtgtcctctgaggtggccgacttcctgacctggctgggctacgtgaacagcctcatcaaccccctgctgtacaccagcttcaatgaagacttcaagctggccttcaagaagctgatccgctgccgggagcacacctag

SEQ ID NO: 330327 - DNA, 1098 bp, Artificial Sequence
  derived and/or modified sequence
atgaacatcaccaactgcaccaccgaggccagcatggccatccggccaaagacaattaccgaaaaaatgcttatctgcatgaccctcgtcgtcatcaccactctaactacgctcctgaaccttgcagttattatggctatcggaacaacaaaaaagctacaccagcccgcgaattacctgatctgtagcctggcagttactgatcttttagtcgctgtcttagtgatgcctctgtcgataatttacatcgtcatggacagatggaagctgggttacttcctgtgtgaagtgtggcttagcgtggacatgacttgttgtacatgctctatactacacctctgtgtgattgcactcgaccgctactgggccattacaaatgccatagaatacgcccgcaaacggaccgccaagagagctgctctgatgatcttgaccgtgtggacaatatcaatctttatctccatgccccctctcttctggagatcccacagacgtttgagtcccccaccctcccagtgcaccatacagcacgatcacgtgatctataccatatacagtactttgggggccttctatatccccctgacccttattttaatactttactaccgtatctatcatgccgccaaatcattgtatcaaaagcgaggttctagtcgccacctgtcaaatcgatcaactgacagtcagaactctttcgcctcatgtaaattgactcaaacgttctgtgtttccgatttcagtacttcagacccgacaaccgagttcgaaaaatttcatgcttcaatcagaatcccgccctttgataatgaccttgaccaccccggggagcggcaacagatatctagcacccgcgagagaaaggcggcccgtatcctcggactcattctgggcgccttcatactgagttggctcccctttttcataaaggaacttattgtaggactgtccatctacaccgtgtcctcagaagttgctgacttcctgacctggttgggatacgtgaactctctgattaatccactactttatacatcgtttaacgaggactttaagttagcgtttaaaaagttgattcgctgcagggaacatacttag

SEQ ID NO: 330328 - DNA, 1098 bp, Artificial Sequence
  derived and/or modified sequence
atgaacatcaccaactgcaccaccgaggccagcatggccatccggcccaagaccatcaccgaaaagatgctgatctgtatgaccctagtagtcataacaactttgactaccctcctcaacctggctgtcatcatggcaattggcacaactaagaaactgcaccagcccgcaaattacttgatttgcagtctggcagtgactgatctgcttgtggcagtgctggtcatgcctctctcaatcatctatatcgtgatggataggtggaaattggggtacttcctttgtgaagtgtggttatccgtcgacatgacttgttgcacctgttcaatcttgcacctgtgcgtgatcgctcttgaccgttactgggctatcacaaacgctatcgagtacgcaagaaaacgtacagctaagcgagctgctttaatgatcttaacagtgtggactatcagtattttcataagcatgccccccctgttttggaggtctcaccgcagattgtcccccccccccagccagtgcactattcagcatgaccatgtgatttatacaatatactctaccctaggagccttctacataccactcacattgattttaattttatattaccggatttaccacgctgcgaagagcctctaccagaagcgaggctcctcccgccatctgtccaatagatctacggatagccagaattcgttcgcaagctgcaaactcactcagactttctgcgtgtctgacttctctaccagcgaccccacaacagagttcgaaaagtttcatgccagcatccgcatccctcctttcgacaatgatttagatcacccaggtgagaggcaacaaatttcaagtacacgagagagaaaggctgctcggatcctgggtctgatactcggggcattcattctctcttggcttcctttctttatcaaggagcttattgtgggattgtccatttacaccgtgtccagcgaagtcgcggattttctaacttggctcggttacgtgaatagtcttatcaaccctctgctctacacctcttttaacgaagactttaaacttgcttttaagaagttaatcaggtgtcgcgagcatacctag

SEQ ID NO: 330329 - DNA, 1098 bp, Artificial Sequence
  derived and/or modified sequence
atgaacattacaaactgcacgacagaggccagcatggctatccggccaaagactatcacagagaaaatgcttatctgtatgacactggtcgtcatcaccaccctgaccacactattgaatcttgccgtgatcatggccatcggcaccacgaaaaagctgcatcagcccgcaaactaccttatttgctccctagctgtgacagacctcttggtggccgtgcttgttatgccactgtcaatcatctatattgtcatggacaggtggaagctggggtactttttatgtgaggtctggctgagtgtcgacatgacatgctgcacgtgctccattctccacctctgcgtgattgcactcgaccgctactgggcaattactaatgcaatcgaatacgccaggaagcgcacagctaaaagagctgctctgatgatactgactgtctggactatttccatttttattagtatgcctccactattctggcgtagtcacaggagactctcaccaccacccagccagtgcaccatccagcatgatcacgtgatctacacaatttactctactctaggggcattttacatcccactgacattaattctcattctgtattaccgcatctatcacgccgctaagagcctgtaccagaaacggggatcctctcggcatctgtccaacaggtcaacagactcgcaaaattcgttcgcaagctgcaagctcacacaaactttttgcgtcagcgatttctctacctccgatcccaccaccgagtttgaaaagtttcacgcctctatccggattcctccattcgacaatgatctcgatcaccccggagaaaggcagcagatctcgagtacgcgtgaaagaaaagcggctaggatcctcggcctgatccttggggcattcattctgtcttggttgcctttttttattaaagaactgatcgttggcctcagtatttatacagtgagtagtgaagtcgccgacttcctgacttggttgggctatgtgaactcactgatcaacccactactgtatactagcttcaatgaggacttcaaactagccttcaaaaagcttatccgctgtagggagcatacttag

SEQ ID NO: 330330 - DNA, 1098 bp, Artificial Sequence
  derived and/or modified sequence
atgaatattaccaattgcactacagaggcctccatggctattcgccctaaaactatcaccgagaagatgttgatctgcatgacactagttgtgataacgacactgaccactctgctgaacttggcggtgattatggccatcgggaccaccaagaaacttcaccagcccgcaaattacctgatttgcagcctcgcggtgactgacttgctggtagccgtgcttgtgatgccactgagcatcatttatatcgtgatggatcgttggaaactggggtactttctctgcgaggtatggctttctgtggatatgacatgctgtacctgctcaattctgcacctgtgtgttattgccctggatcggtactgggctattactaatgctattgagtatgcacggaaacgaaccgcaaaaagagctgctctgatgatcttaactgtgtggactatttctatattcatttccatgcctccactgttctggaggtctcatcgtcgactctcgcctcccccttcccagtgcaccatacagcacgaccatgtgatttatacaatctactccactctgggggcattctacatacccctgacgcttatcctgatcctgtactatagaatctatcatgccgctaagagtttgtatcagaaaagagggagctctcggcatcttagcaatcgcagtactgactcgcagaacagctttgcctcatgtaagttgacccagaccttttgtgtctcggactttagcacctccgatcccacaactgagttcgaaaaatttcatgctagtattagaattccccctttcgataacgatctggaccaccctggcgaacgtcagcagatatctagcacccgcgagcgaaaggccgcacgcatcctcggattgatactgggagccttcattctgagctggctcccattctttatcaaggagctgattgtgggtctatccatttacacagtaagctcagaagtggctgacttcctgacgtggctgggttacgtgaacagcctgattaatcctctgttatatacctcgtttaatgaggactttaaacttgcgtttaagaagttgattcgctgtagggagcacacctag

SEQ ID NO: 330331 - DNA, 2039 bp, Artificial Sequence
  derived and/or modified sequence
aagacctggagtacctcggagctgcgacctccagttcacaataccacctgcctcacacccgggctcatcttttcatcccacacccaccacccccctctccgttcacggtgtcccgggaggctgcgacctgcgtagatgatttagcagactgcccctgcccatgctcctgctcctgctcctcctcctcctcttccccgctctctccctctcgcctcctcttccagtccaggcgcccagactcggcgaagcgcagcgcctgccaccagcggtgcctcgggctgcccggcgcgccgcgctcccaggttctgtctcgccgcaccccggcgggcactggcgcgggcaaggacgctggcggggagaacgccctgggctcaacgtactccagaatcgaatgttgagagaagcagtgctctgatccagctcaggagaaaaaggagcgggttccgagtgagacttctggagccagctggacgtgccggtttgcccagtgcggcgcggctgcacgcaccgtccacaaggaaccttcactcagaagaaatgctgtggcccttccctttaccaacagaaaatggaacacaagagaccacatagctgaacaaattatagcctccttacaagtgagaaaccttcgaggctacatagttttcagccaaaggaaaataaccaacagcttctccacagtgtagactgaaacaagggaaacatgaacatcacaaactgtaccacagaggccagcatggctataagacccaagaccatcactgagaagatgctcatttgcatgactctggtggtcatcaccaccctcaccacgttgctgaacttggctgtgatcatggctattggcaccaccaagaagctccaccagcctgccaactacctaatctgttctctggccgtgacggacctcctggtggcagtgctcgtcatgcccctgagcatcatctacattgtcatggatcgctggaagcttgggtacttcctctgtgaggtgtggctgagtgtggacatgacctgctgcacctgctccatcctccacctctgtgtcattgccctggacaggtactgggccatcaccaatgctattgaatacgccaggaagaggacggccaagagggccgcgctgatgatccttaccgtctggaccatctccattttcatctccatgccccctctgttctggagaagccaccgccgcctaagccctccccctagtcagtgcaccatccagcacgaccatgttatctacaccatttactccacgctgggtgcgttttatatccccttgactttgatactgattctctattaccggatttaccacgcggccaagagcctttaccagaaaaggggatcaagtcggcacttaagcaacagaagcacagatagccagaattcttttgcaagttgtaaacttacacagactttctgtgtgtctgacttctccacctcagaccctaccacagagtttgaaaagttccatgcctccatcaggatcccccccttcgacaatgatctagatcacccaggagaacgtcagcagatctctagcaccagggaacggaaggcagcacgcatcctggggctgattctgggtgcattcattttatcctggctgccatttttcatcaaagagttgattgtgggtctgagcatctacaccgtgtcctcggaagtggccgactttctgacgtggctcggttatgtgaattctctgatcaaccctctgctctatacgagttttaatgaagactttaagctggcttttaaaaagctcattagatgccgagagcatacttagactgtaaaaagctaaaaggcacgactttttccagagcctcatgagtggatgggggtaaggggtgcaacttattaattcttgaacatacttggttcaggagagtttgtaagtatgtgtggtcttgtttccttgtttgtttgtttgttttgttctgttttgtttgaggattgttatttggcgtgctgttttctacctctggtcttatctgtgatacataatttcaaataaacattatcat

SEQ ID NO: 330332 - DNA, 1919 bp, Artificial Sequence
  derived and/or modified sequence
atcgaatgttgagagaagcagtgctctgatccagctcaggagaaaaaggagcgggttccgagtgagacttctggagccagctggacgtgccggtttgcccagtgcggcgcggctgcacgcaccgtccacaagagagtctcagtcgcccaggctggagtgcagcagcacaatctcacctcattgcaacctccgcctcccaggttcaagcaattctcccacctcagcttcctagtagctgggattacaggcactcaccaccatgcccagctaattttttgaatttttagtagagacgggatttcaccatattggccatgctggtcttgaacccccgacctcaaatgattcgcccgcctcagcctcccaaagtgctgggattacaggcgaaccttcactcagaagaaatgctgtggcccttccctttaccaacagaaaatggaacacaagagaccacatagctgaacaaattatagcctccttacaagtgagaaaccttcgaggctacatagttttcagccaaaggaaaataaccaacagcttctccacagtgtagactgaaacaagggaaacatgaacatcacaaactgtaccacagaggccagcatggctataagacccaagaccatcactgagaagatgctcatttgcatgactctggtggtcatcaccaccctcaccacgttgctgaacttggctgtgatcatggctattggcaccaccaagaagctccaccagcctgccaactacctaatctgttctctggccgtgacggacctcctggtggcagtgctcgtcatgcccctgagcatcatctacattgtcatggatcgctggaagcttgggtacttcctctgtgaggtgtggctgagtgtggacatgacctgctgcacctgctccatcctccacctctgtgtcattgccctggacaggtactgggccatcaccaatgctattgaatacgccaggaagaggacggccaagagggccgcgctgatgatccttaccgtctggaccatctccattttcatctccatgccccctctgttctggagaagccaccgccgcctaagccctccccctagtcagtgcaccatccagcacgaccatgttatctacaccatttactccacgctgggtgcgttttatatccccttgactttgatactgattctctattaccggatttaccacgcggccaagagcctttaccagaaaaggggatcaagtcggcacttaagcaacagaagcacagatagccagaattcttttgcaagttgtaaacttacacagactttctgtgtgtctgacttctccacctcagaccctaccacagagtttgaaaagttccatgcctccatcaggatcccccccttcgacaatgatctagatcacccaggagaacgtcagcagatctctagcaccagggaacggaaggcagcacgcatcctggggctgattctgggtgcattcattttatcctggctgccatttttcatcaaagagttgattgtgggtctgagcatctacaccgtgtcctcggaagtggccgactttctgacgtggctcggttatgtgaattctctgatcaaccctctgctctatacgagttttaatgaagactttaagctggcttttaaaaagctcattagatgccgagagcatacttagactgtaaaaagctaaaaggcacgactttttccagagcctcatgagtggatgggggtaaggggtgcaacttattaattcttgaacatacttggttcaggagagtttgtaagtatgtgtggtcttgtttccttgtttgtttgtttgttttgttctgttttgtttgaggattgttatttggcgtgctgttttctacctctggtcttatctgtgatacataatttcaaataaacattatcatacaaaaacagaaa

SEQ ID NO: 330333 - DNA, 1098 bp, Artificial Sequence
  derived and/or modified sequence
atgaacatcaccaactgcaccaccgaggccagcatggccatcagacccaagaccatcaccgagaagatgctgatctgcatgaccctggtggtgatcaccaccctgaccaccctgctgaacctggccgtgatcatggccatcggcaccaccaagaagctgcaccagcccgccaactacctgatctgcagcctggccgtgaccgacctgctggtggccgtgctggtgatgcccctgagcatcatctacatcgtgatggacagatggaagctgggctacttcctgtgcgaggtgtggctgagcgtggacatgacctgctgcacctgcagcatcctgcacctgtgcgtgatcgccctggacagatactgggccatcaccaacgccatcgagtacgccagaaagagaaccgccaagagagccgccctgatgatcctgaccgtgtggaccatcagcatcttcatcagcatgccccccctgttctggagaagccacagaagactgagccccccccccagccagtgcaccatccagcacgaccacgtgatctacaccatctacagcaccctgggcgccttctacatccccctgaccctgatcctgatcctgtactacagaatctaccacgccgccaagagcctgtaccagaagagaggcagcagcagacacctgagcaacagaagcaccgacagccagaacagcttcgccagctgcaagctgacccagaccttctgcgtgagcgacttcagcaccagcgaccccaccaccgagttcgagaagttccacgccagcatcagaatcccccccttcgacaacgacctggaccaccccggcgagagacagcagatcagcagcaccagagagagaaaggccgccagaatcctgggcctgatcctgggcgccttcatcctgagctggctgcccttcttcatcaaggagctgatcgtgggcctgagcatctacaccgtgagcagcgaggtggccgacttcctgacctggctgggctacgtgaacagcctgatcaaccccctgctgtacaccagcttcaacgaggacttcaagctggccttcaagaagctgatcagatgcagagagcacacctag

SEQ ID NO: 330334 - protein, 186 aa, Artificial Sequence
  derived and/or modified sequence
MLLKSPENSLLQFQFKYGVPTPTNVTIESYNMNPIVYWEYQIMPQVPVFTVEVKNYGVKNSEWIDACINISHHYCNISDHVGDPSNSLWVRVKARVGQKESAYAKSEEFAVCRDGKIGPPKLDIRKEEKQIMIDIFHPSVFVNGDEQEVDYDPETTCYIRVYNVYVRMNGSEIKRSCAFSLFSFFI

SEQ ID NO: 330335 - protein, 161 aa, Artificial Sequence
  derived and/or modified sequence
MLLKSPENSLLQFQFKYGVPTPTNVTIESYNMNPIVYWEYQIMPQVPVFTVEVKNYGVKNSEWIDACINISHHYCNISDHVGDPSNSLWVRVKARVGQKESAYAKSEEFAVCRDGKIGPPKLDIRKEEKQIMIDIFHPSVFVNGDEQEVDYDPETTCYIRV

SEQ ID NO: 330336 - DNA, 561 bp, Artificial Sequence
  derived and/or modified sequence
atgctcctgaagtcacccgaaaacagtcttctgcagtttcagttcaaatatggcgtcccaactcctactaacgtgacaattgaatcctataatatgaatcctatcgtgtattgggagtaccagatcatgccacaggtccccgtatttacggtcgaagtcaagaattatggtgtgaagaactcagaatggatcgacgcgtgcataaacattagccatcactattgtaatattagtgaccacgtgggagatccttcaaacagcttgtgggtgagggtgaaggctagggtcgggcagaaagaatcagcatatgccaaatcggaggaattcgccgtgtgtagggatggcaagataggcccccccaaactggatatccgcaaagaagaaaagcagatcatgatcgacatcttccatccctctgtgttcgtgaacggtgacgagcaggaagttgattacgatccagaaacaacatgctacataagagtgtacaacgtgtatgtgcggatgaatggatcggagatcaagagatcttgcgcgttcagcctgtttagctttttcatctag

SEQ ID NO: 330337 - DNA, 486 bp, Artificial Sequence
  derived and/or modified sequence
atgctgctcaagtcccctgagaattctctccttcagttccagttcaagtacggtgtgccaactcccacaaacgtgaccatcgagtcctataatatgaatcctattgtgtactgggagtaccagataatgccccaggttccggtgtttacagtggaagtgaagaactatggggtgaagaatagtgaatggattgatgcttgcataaacatctcacaccactattgtaatatcagtgaccacgtgggagatccctctaactctttgtgggtgagagtgaaggcacgggtaggtcaaaaagagagcgcttatgccaagtcagaagaattcgcagtttgccgggatgggaaaatcggtccccctaagttagatatccgcaaggaagagaagcagatcatgatcgatattttccacccaagtgtgttcgtgaacggggacgagcaagaagtggattatgaccccgaaacgacatgctatatacgggtctag

SEQ ID NO: 330338 - DNA, 1386 bp, Artificial Sequence
  derived and/or modified sequence
atgcctacacctaccaatgtgactatcgaatcctataatatgaacccgatagtgtattgggaataccagattatgcctcaggtgcccgtttttacagttgaggtgaagaattacggcgtgaaaaactccgaatggattgacgcttgtataaacatttcccaccactactgcaatatcagcgatcatgtgggagacccgtcgaactccctttgggttcgagtgaaagcccgtgtcggccagaaggaatcagcatacgcaaagtccgaggagtttgcagtgtgccgcgacggcaagattggtccacctaaacttgacataagaaaggaggagaaacagattatgatcgacatttttcaccctagcgtgttcgtcaacggagacgagcaggaggtcgactacgaccctgagaccacgtgttacatccgcgtttacaatgtctacgtaaggatgaatggatccgaaatacagtataagatcctgacccagaaggaagatgattgtgatgagattcaatgccagctcgccattcctgtgtcctcgctgaattcacaatattgtgtctctgctgagggtgttctccatgtttggggagttaccactgaaaaatctaaagaagtttgtataaccatctttaatagctccattaaggggtccctgtggatacccgtggtggccgccctgctacttttcttggtgctgagtcttgtctttatttgcttttacatcaaaaaaattaatcccttgaaggagaagagtataattctacctaaatccctgatcagcgtggtgcgctccgccactctggaaacaaagcccgaatctaagtatgtttccctgattacatcctatcagcctttctctttagaaaaggaagtcgtctgtgaagaacctttatcccccgctacagtgccaggcatgcatacagaagataatccagggaaagtcgagcatactgaggagctttcctctatcacggaagtcgtcacgaccgaagagaatatccctgatgtagtgccgggttcccacctaacccccattgagcgcgagagctccagcccactcagcagcaaccaatcggaacctgggagcatagcccttaattcttaccatagccgcaattgttccgaatccgatcactctcgtaatgggttcgataccgactcttcgtgcctggaaagtcacagtagcttgtccgactctgagttcccacctaacaataagggagagatcaagactgagggtcaggaactaatcacggtgatcaaagcacccacaagctttggttatgataaaccacatgtactggtagatctccttgtggatgactcaggcaaagagagccttattggctaccgacccacggaagatagtaaggagttcagctag

SEQ ID NO: 330339 - DNA, 876 bp, Artificial Sequence
  derived and/or modified sequence
gctcggggttggagccagcgaccgtcggtagcagcatggctctcctctttctcctaccccttgtcatgcagggtgtgagcagggctgagatgggcaccgcggatctggggccgtcctcagtggccataatataattgtgataatgtaataaaatcaggaaacattacctgaagcagatgcttttgaagtcaccagaaaatagtcttctccaattccaatttaaatatggagtgcctacaccaactaatgttacaattgaatcctataacatgaaccctatcgtatattgggagtaccagatcatgccacaggtccctgtttttaccgtagaggtaaagaactatggtgttaagaattcagaatggattgatgcctgcatcaatatttctcatcattattgtaatatttctgatcatgttggtgatccatcaaattctctttgggtcagagttaaagccagggttggacaaaaagaatctgcctatgcaaagtcagaagaatttgctgtatgccgagatggaaaaattggaccacctaaactggatatcagaaaggaggagaagcaaatcatgattgacatatttcacccttcagtttttgtaaatggagacgagcaggaagtcgattatgatcccgaaactacctgttacattagggtgtacaatgtgtatgtgagaatgaacggaagtgagattaaaagaagctgtgcattttcactgttttcttttttcatctagatccagtataaaatactcacgcagaaggaagatgattgtgacgagattcagtgccagttagcgattccagtatcctcactgaattctcagtactgtgtttcagcagaaggagtcttacatgtgtggggtgttacaactg

SEQ ID NO: 330340 - DNA, 748 bp, Artificial Sequence
  derived and/or modified sequence
gcctcctgccgacgccggcacagaccccggtgacggaagtgacgtaaggccggggctggagggcagtgctgggctggtcccgcaggcgctcggggttggagccagcgaccgtcggtagcagcatggctctcctctttctcctaccccttgtcatgcagggtgtgagcagggctgagatgggcaccgcggatctggggccgtcctcagtggccataatataattgtgataatgtaataaaatcaggaaacattacctgaagcagatgcttttgaagtcaccagaaaatagtcttctccaattccaatttaaatatggagtgcctacaccaactaatgttacaattgaatcctataacatgaaccctatcgtatattgggagtaccagatcatgccacaggtccctgtttttaccgtagaggtaaagaactatggtgttaagaattcagaatggattgatgcctgcatcaatatttctcatcattattgtaatatttctgatcatgttggtgatccatcaaattctctttgggtcagagttaaagccagggttggacaaaaagaatctgcctatgcaaagtcagaagaatttgctgtatgccgagatggaaaaattggaccacctaaactggatatcagaaaggaggagaagcaaatcatgattgacatatttcacccttcagtttttgtaaatggagacgagcaggaagtcgattatgatcccgaaactacctgttacattagggtgta

SEQ ID NO: 330341 - DNA, 1648 bp, Artificial Sequence
  derived and/or modified sequence
gcagtccgtcttaggtctcagtctggaagtggtggattgccggcactcactagcagatttggcatgcctacaccaactaatgttacaattgaatcctataacatgaaccctatcgtatattgggagtaccagatcatgccacaggtccctgtttttaccgtagaggtaaagaactatggtgttaagaattcagaatggattgatgcctgcatcaatatttctcatcattattgtaatatttctgatcatgttggtgatccatcaaattctctttgggtcagagttaaagccagggttggacaaaaagaatctgcctatgcaaagtcagaagaatttgctgtatgccgagatggaaaaattggaccacctaaactggatatcagaaaggaggagaagcaaatcatgattgacatatttcacccttcagtttttgtaaatggagacgagcaggaagtcgattatgatcccgaaactacctgttacattagggtgtacaatgtgtatgtgagaatgaacggaagtgagatccagtataaaatactcacgcagaaggaagatgattgtgacgagattcagtgccagttagcgattccagtatcctcactgaattctcagtactgtgtttcagcagaaggagtcttacatgtgtggggtgttacaactgaaaagtcaaaagaagtttgtattaccattttcaatagcagtataaaaggttctctttggattccagttgttgctgctttactactctttctagtgcttagcctggtattcatctgtttttatattaagaaaattaatccattgaaggaaaaaagcataatattacccaagtccttgatctctgtggtaagaagtgctactttagagacaaaacctgaatcaaaatatgtatcactcatcacgtcataccagccattttccttagaaaaggaggtggtctgtgaagagccgttgtctccagcaacagttccaggcatgcataccgaagacaatccaggaaaagtggaacatacagaagaactttctagtataacagaagtggtgactactgaagaaaatattcctgacgtggtcccgggcagccatctgactccaatagagagagagagttcttcacctttaagtagtaaccagtctgaacctggcagcatcgctttaaactcgtatcactccagaaattgttctgagagtgatcactccagaaatggttttgatactgattccagctgtctggaatcacatagctccttatctgactcagaatttcccccaaataataaaggtgaaataaaaacagaaggacaagagctcataaccgtaataaaagcccccacctcctttggttatgataaaccacatgtgctagtggatctacttgtggatgatagcggtaaagagtccttgattggttatagaccaacagaagattccaaagaattttcatgagatcagctaagttgcaccaactttgaagtctgattttcctggacagttttctgctttaatttcatgaaaagattatgatctcagaaattgtatcttagttggtatcaaccaaatggagtgacttagtgtacatgaaagcgtaaagaggatgtgtggcattttcacttttggcttgtaaagtacagactttttttttttt

SEQ ID NO: 330342 - DNA, 561 bp, Artificial Sequence
  derived and/or modified sequence
atgctgctgaagagccctgagaacagcctgctgcagttccagttcaagtatggagtgcccacccccaccaacgtgaccatcgagagctacaacatgaaccccatcgtgtactgggagtaccagatcatgccccaggtgcctgtgttcaccgtggaggtgaagaactacggcgtgaagaacagcgagtggattgatgcctgcatcaacatcagccaccactactgcaacatcagtgaccacgtgggggaccccagcaacagcctgtgggtgcgggtgaaggcccgggtgggccagaaggagagcgcctatgccaagtctgaggagtttgctgtgtgcagagatggcaagattggcccccccaagctggacatcaggaaggaggagaagcagatcatgattgacatcttccaccccagcgtgtttgtgaatggagatgagcaggaggtggactatgaccctgagaccacctgctacatccgggtgtacaacgtgtatgtgaggatgaatggaagtgagatcaagaggagctgtgccttcagcctcttctccttcttcatctag

SEQ ID NO: 330343 - DNA, 486 bp, Artificial Sequence
  derived and/or modified sequence
atgctgctgaagagccctgagaacagcctgctgcagttccagttcaagtatggagtgcccacccccaccaacgtgaccatcgagagctacaacatgaaccccatcgtgtactgggagtaccagatcatgccccaggtgcctgtgttcaccgtggaggtgaagaactacggcgtgaagaacagcgagtggattgatgcctgcatcaacatcagccaccactactgcaacatcagtgaccacgtgggggaccccagcaacagcctgtgggtgcgggtgaaggcccgggtgggccagaaggagagcgcctatgccaagtctgaggagtttgctgtgtgcagagatggcaagattggcccccccaagctggacatcaggaaggaggagaagcagatcatgattgacatcttccaccccagcgtgtttgtgaatggagatgagcaggaggtggactatgaccctgagaccacctgctacatccgggtgtag

SEQ ID NO: 330344 - DNA, 1386 bp, Artificial Sequence
  derived and/or modified sequence
atgcccacccccaccaacgtgaccatcgagagctacaacatgaaccccatcgtgtactgggagtaccagatcatgccccaggtgcctgtgttcaccgtggaggtgaagaactacggcgtgaagaacagcgagtggattgatgcctgcatcaacatcagccaccactactgcaacatcagtgaccacgtgggggaccccagcaacagcctgtgggtgcgggtgaaggcccgggtgggccagaaggagagcgcctatgccaagtctgaggagtttgctgtgtgcagagatggcaagattggcccccccaagctggacatcaggaaggaggagaagcagatcatgattgacatcttccaccccagcgtgtttgtgaatggagatgagcaggaggtggactatgaccctgagaccacctgctacatccgggtgtacaacgtgtatgtgaggatgaatggaagtgagatccagtacaagatcctgacccagaaggaggatgactgtgatgagatccagtgccagctggccatccctgtgagcagcctgaacagccagtactgtgtgtctgctgagggcgtgctgcacgtgtggggcgtgaccacagagaagagcaaggaggtgtgcatcaccatcttcaacagcagcatcaagggcagcctgtggatccctgtggtggccgccctgctgctcttcctggtgctgagcctggtgttcatctgcttctacatcaagaagatcaaccccctgaaggagaagagcatcatcctgcccaagagcctcatctctgtggtgcgcagcgccaccctggagaccaagccagagagcaaatatgtgtccctcatcaccagctaccagcccttcagcctggagaaggaggtggtgtgtgaggagcccctgagccctgccaccgtgcccggcatgcacacagaggacaaccctgggaaggtggagcacacagaggagctgagcagcatcacagaggtggtgaccacagaggagaacatcccagatgtggtgcccggcagccacctgacccccatcgagcgggagagcagcagccccctgagcagcaaccagagcgagcccggcagcatcgccctgaacagctaccacagcaggaactgcagcgagagtgaccacagcagaaatggatttgacacagacagcagctgcctggagagccacagcagcctgagtgacagcgagttcccccccaacaacaagggggagatcaagacagagggccaggagctgatcaccgtcatcaaggcccccaccagctttggctatgacaagccccacgtgctggtggacctgctggtggatgattctgggaaggagagcctgattggctaccggcccacagaggacagcaaggagttctcctag

SEQ ID NO: 330345 - DNA, 561 bp, Artificial Sequence
  derived and/or modified sequence
atgctgctgaagagccccgagaacagcctgctgcagttccagttcaagtatggcgtacctactccaactaacgtgaccatcgagtcatataatatgaatccgatcgtctattgggagtaccagataatgccacaagtgccagtgtttacagtcgaggtaaaaaattacggtgttaaaaacagcgagtggatagacgcctgcattaacatttcacaccattactgcaatatcagtgaccacgtcggggatccttctaacagtttatgggtgcgcgtcaaagcaagagttggccagaaggaatctgcgtacgcgaagtctgaggagtttgctgtctgccgggatggcaagattggacctcctaaattggacatcaggaaagaagagaaacagattatgatcgacatattccatccatccgttttcgtcaatggtgatgaacaggaagttgactacgaccccgagactacctgctacattcgggtttataatgtctacgtgaggatgaacgggtctgaaatcaagaggtcctgcgccttttctcttttcagttttttcatctag

SEQ ID NO: 330346 - DNA, 486 bp, Artificial Sequence
  derived and/or modified sequence
atgctgctgaagagccccgagaacagcctgctgcagttccagttcaaatacggggtccccacaccgacgaatgtgactatcgagtcttataatatgaatcctatcgtgtactgggagtatcagatcatgcctcaggttccagtgtttaccgtcgaggtgaaaaattacggtgtgaaaaactccgagtggatcgatgcctgtataaatatttcccaccactactgtaacatttccgatcatgtgggggatccctcaaacagcctctgggtgagagtaaaggctcgggtgggtcagaaggagtctgcctacgcgaaatccgaggaatttgcggtgtgccgagacggaaaaatcgggcctcccaaactagacattcgaaaggaggaaaagcaaattatgattgatatatttcacccttccgtgttcgtcaacggtgatgagcaggaggtagactacgacccggagactacttgttatatccgggtatag

SEQ ID NO: 330347 - DNA, 1386 bp, Artificial Sequence
  derived and/or modified sequence
atgcccacccccaccaacgtgaccatcgagagctacaacatgaacccaattgtctattgggagtaccaaataatgccccaagtcccagtgtttaccgtggaagtcaagaactacggcgtcaagaactccgaatggatcgacgcctgcataaatatctctcaccattactgcaacatctctgatcacgtgggagatccctcaaactccttatgggtaagagtaaaggcaagggttggacagaaagagagcgcttacgctaaatctgaggaatttgctgtctgcagggacggaaaaattggacccccgaagctcgacattagaaaggaggagaagcagatcatgattgacatctttcacccatccgtgttcgttaatggagacgaacaggaggtcgattatgacccggagacgacctgttatattagggtgtacaatgtgtacgtcaggatgaatggatcggaaatccaatataagatactgacccagaaagaagatgattgtgacgaaatccaatgtcaactggcaattcccgtgagcagcctgaattcccaatattgtgttagcgccgagggcgtgctgcacgtttggggggtgactaccgagaagtccaaggaagtgtgtattacgatctttaattcctctatcaaaggctcactgtggattcctgtggtggcggctctgctgctgttcctggttctgagcctggtgttcatttgcttttatatcaaaaagattaatcctttgaaggagaaaagtataatcctaccaaaatctctgatttctgtggtgcggagtgccactctggagactaagccagaatccaaatatgtgagcctgatcactagctaccaaccttttagtctggagaaagaggtcgtgtgtgaggagcccctgagccccgccaccgtcccagggatgcacaccgaggataatcccggaaaagtggagcacaccgaggaactgtcgagcattaccgaagtcgtgacaaccgaagaaaacatcccggacgtcgtgccaggatcacatctgacacctattgagagagagagtagctcacctctaagttccaaccagagtgagccgggttcaattgctctcaattcataccatagccggaattgctctgaatcagaccactctcgaaacgggtttgatacagattcaagctgtctggagtcacactctagcctctcagacagcgagtttccccctaacaataaaggagagattaaaactgagggacaggagctcatcaccgttatcaaagcgcctacctctttcggatatgacaagcctcacgttctcgtggacctgctggtggacgactcaggcaaggaaagcctaatcggctaccgacccacagaggattcgaaagagttctcctag

SEQ ID NO: 330348 - DNA, 561 bp, Artificial Sequence
  derived and/or modified sequence
atgttactgaaatcaccggagaattctctgctgcagttccaattcaagtacggtgtgccgacccccactaatgtaactatcgaaagttacaacatgaacccaatcgtctattgggaatatcagattatgccccaagttcccgtgttcacagttgaggtcaaaaactatggtgtgaaaaactccgagtggatagatgcttgtattaatatctcacatcactattgcaacatcagtgaccacgttggcgacccgtccaatagtctgtgggtacgcgtcaaagcccgtgtgggccagaaggagagcgcgtacgcaaagtctgaggagtttgcggtttgccgagatgggaagattggaccacctaagctagacataagaaaagaagagaaacagatcatgattgacatcttccatccctcagtctttgtgaatggagatgaacaagaggttgactatgatcctgaaacaacatgttatattcgcgtgtataatgtgtatgtgagaatgaatggctcagaaatcaaacgcagttgcgcattttctctgtttagcttttttatctag

SEQ ID NO: 330349 - DNA, 486 bp, Artificial Sequence
  derived and/or modified sequence
atgttgctgaagtcaccagagaattcactcctgcagtttcagtttaagtatggtgtgcctacccctaccaatgtgaccattgaatcgtataacatgaacccaatagtttactgggagtatcaaattatgccccaggtgccagtcttcacggttgaagttaaaaactatggggtgaaaaatagcgagtggatcgatgcctgcatcaacatttcacatcactattgcaacatttctgaccatgtcggagatccatccaacagcctgtgggtccgtgtgaaggccagagtcggtcaaaaggaatcggcatatgctaagagtgaggagtttgcggtatgtagggacgggaaaatcgggcctcctaagttggacatacgtaaggaggagaagcaaataatgatagacatcttccacccaagcgtgtttgtgaatggggacgagcaggaggttgattatgaccctgagaccacatgttatattcgagtatag

SEQ ID NO: 330350 - DNA, 1386 bp, Artificial Sequence
  derived and/or modified sequence
atgccgacccctacaaatgtaaccattgaaagctataatatgaatccaatcgtgtactgggaatatcagatcatgccacaggtgcccgtgttcactgttgaagtcaagaactatggggtgaaaaactctgagtggattgacgcttgtataaatattagccaccactactgcaacatatccgaccacgtcggcgacccttctaactctctgtgggtgcgtgtaaaagctcgggtggggcagaaagagtctgcctacgcaaagtcagaggagtttgccgtgtgcagagatgggaaaatcggtcctccaaaactcgacattcggaaagaagagaagcaaattatgatcgacatttttcacccatctgtgtttgtgaacggcgatgagcaggaagtggactatgacccggagaccacttgttatattcgcgtgtacaacgtttacgtaaggatgaacggctcggagattcagtacaagatcctgacacagaaagaagacgactgtgacgagatacagtgccaattggcgattcccgtctcctccctcaactctcaatattgtgtctcagccgaaggtgtcttacatgtgtggggagtgaccacagagaaatcaaaggaagtgtgcatcactattttcaattcctcaattaagggctccctgtggattccggtggtggcagccttgctcctgtttctggttcttagcctcgtttttatatgtttttacattaagaaaattaaccccctcaaggagaagagcatcatcctccctaagtctctcatctccgtggtgcgcagcgctacgcttgagacaaagcccgaatcaaagtacgtgtcgttgataacatcatatcaacctttcagcttggaaaaagaggtggtctgtgaagaaccgctgtctcccgctactgtgcctgggatgcacactgaagacaacccaggcaaagtggagcacaccgaggagctttcttctataaccgaagttgtcaccactgaggagaacatcccagacgtcgtgccaggatcacatttgacacccatagagagagagtcttcctcacctcttagtagcaaccaatcagaaccaggttctatcgccctgaacagttaccatagtagaaactgtagtgaatctgaccacagccgtaacggctttgacaccgattcctcctgtctcgaatcacacagctccctttccgattctgagttcccccctaacaataagggggaaatcaagacagagggtcaggaattgatcaccgtgattaaagcccctacttcctttggctacgataaacctcatgtccttgtcgacttgctggtcgacgactctggaaaagagtcccttatcggatacagaccaaccgaggacagtaaggagttctcttag

SEQ ID NO: 330351 - DNA, 561 bp, Artificial Sequence
  derived and/or modified sequence
atgctgctgaagagccccgagaacagcctgctgcagttccagttcaagtacggcgtgcccacccccaccaacgtgaccatcgagagctacaacatgaaccccatcgtgtactgggagtaccagatcatgccccaggtgcccgtgttcaccgtggaggtgaagaactacggcgtgaagaacagcgagtggatcgacgcctgcatcaacatcagccaccactactgcaacatcagcgaccacgtgggcgaccccagcaacagcctgtgggtgagagtgaaggccagagtgggccagaaggagagcgcctacgccaagagcgaggagttcgccgtgtgcagagacggcaagatcggcccccccaagctggacatcagaaaggaggagaagcagatcatgatcgacatcttccaccccagcgtgttcgtgaacggcgacgagcaggaggtggactacgaccccgagaccacctgctacatcagagtgtacaacgtgtacgtgagaatgaacggcagcgagatcaagagaagctgcgccttcagcctgttcagcttcttcatctag

SEQ ID NO: 330352 - DNA, 486 bp, Artificial Sequence
  derived and/or modified sequence
atgctgctgaagagccccgagaacagcctgctgcagttccagttcaagtacggcgtgcccacccccaccaacgtgaccatcgagagctacaacatgaaccccatcgtgtactgggagtaccagatcatgccccaggtgcccgtgttcaccgtggaggtgaagaactacggcgtgaagaacagcgagtggatcgacgcctgcatcaacatcagccaccactactgcaacatcagcgaccacgtgggcgaccccagcaacagcctgtgggtgagagtgaaggccagagtgggccagaaggagagcgcctacgccaagagcgaggagttcgccgtgtgcagagacggcaagatcggcccccccaagctggacatcagaaaggaggagaagcagatcatgatcgacatcttccaccccagcgtgttcgtgaacggcgacgagcaggaggtggactacgaccccgagaccacctgctacatcagagtgtag

SEQ ID NO: 330353 - DNA, 1386 bp, Artificial Sequence
  derived and/or modified sequence
atgcccacccccaccaacgtgaccatcgagagctacaacatgaaccccatcgtgtactgggagtaccagatcatgccccaggtgcccgtgttcaccgtggaggtgaagaactacggcgtgaagaacagcgagtggatcgacgcctgcatcaacatcagccaccactactgcaacatcagcgaccacgtgggcgaccccagcaacagcctgtgggtgagagtgaaggccagagtgggccagaaggagagcgcctacgccaagagcgaggagttcgccgtgtgcagagacggcaagatcggcccccccaagctggacatcagaaaggaggagaagcagatcatgatcgacatcttccaccccagcgtgttcgtgaacggcgacgagcaggaggtggactacgaccccgagaccacctgctacatcagagtgtacaacgtgtacgtgagaatgaacggcagcgagatccagtacaagatcctgacccagaaggaggacgactgcgacgagatccagtgccagctggccatccccgtgagcagcctgaacagccagtactgcgtgagcgccgagggcgtgctgcacgtgtggggcgtgaccaccgagaagagcaaggaggtgtgcatcaccatcttcaacagcagcatcaagggcagcctgtggatccccgtggtggccgccctgctgctgttcctggtgctgagcctggtgttcatctgcttctacatcaagaagatcaaccccctgaaggagaagagcatcatcctgcccaagagcctgatcagcgtggtgagaagcgccaccctggagaccaagcccgagagcaagtacgtgagcctgatcaccagctaccagcccttcagcctggagaaggaggtggtgtgcgaggagcccctgagccccgccaccgtgcccggcatgcacaccgaggacaaccccggcaaggtggagcacaccgaggagctgagcagcatcaccgaggtggtgaccaccgaggagaacatccccgacgtggtgcccggcagccacctgacccccatcgagagagagagcagcagccccctgagcagcaaccagagcgagcccggcagcatcgccctgaacagctaccacagcagaaactgcagcgagagcgaccacagcagaaacggcttcgacaccgacagcagctgcctggagagccacagcagcctgagcgacagcgagttcccccccaacaacaagggcgagatcaagaccgagggccaggagctgatcaccgtgatcaaggcccccaccagcttcggctacgacaagccccacgtgctggtggacctgctggtggacgacagcggcaaggagagcctgatcggctacagacccaccgaggacagcaaggagttcagctag

SEQ ID NO: 330354 - protein, 248 aa, Artificial Sequence
  derived and/or modified sequence
MGGPLSLGTDCAHTGYRRELTLCSHRLRPKVPSNQGSAGRGGAERRVLCLLFAVPAAAAFGMEEIYAKFVSQKISKTRWRPLPPGSLQTAETFATGSWDNEENYISLWSIGDFGNLDSDGGFEGDHQLLCDIRHHGDVMDLQFFDQERIVAASSTGCVTVFLHHPNNQTLSVNQQWTTAHYHTGPGSPSYSSAPCTGVVCNNPEIVTVGEDGRINLFRADHKEAVRTIGLVTECHSTVLIDIPTNSML

SEQ ID NO: 330355 - protein, 123 aa, Artificial Sequence
  derived and/or modified sequence
MNFPVRKDIIRILPSLDVEVKDITDSYDANWFLQLLSTEDLFEMTSKEFPIVTEVIEAPEGNHLPQSILQPGKTIVIHKKYQASRILASEIRSNFPKRHFLIPTSYKGKFKRRPREFPTAYDL

SEQ ID NO: 330356 - protein, 1128 aa, Artificial Sequence
  derived and/or modified sequence
KKLANDVKENEDHLNGLKTRIENADARNGDLLRTLNDTLGKLSAIPNDTAAKLQAVKDKARQANDTAKDVLAQITELHQNLDGLKKNYNKLADSVAKTNAVVKDPSKNTVADADATVKNLEQEADRLIDKLKPIKELEDNLKKNISEIKELINQARKQANSIKVSVSSGGDCIRTYKPEIKKGSYNNIVVNVKTAVADNLLFYLGSAKFIDFLAIEMRKGKVSFLWDVGSGVGRVEYPDLTIDDSYWYRIVASRTGRNGTISVRALDGPKASIVPSTHHSTSPPGYTILDVDANAMLFVGGLTGKLKKADAVRVITFTGCMGETYFDNKPIGLWNFREKEGDCKGCTVSPQVEDSEGTIQFDGEGYALVSRPIRWYPNISTVMFKFRTFSSSALLMYLATRDLRDFMSVELTDGHIKVSYDLGSGMASVVSNQNHNDGKWKSFTLSRIQKQANISIVDIDTNQEENIATSSSGNNFGLDLKADDKIYFGGLPTLRNLSMKARPEVNLKKYSGCLKDIEISRTPYNILSSPDYVGVTKGCSLENVYTVSFPKPGFVELSPVPIDVGTEINLSFSTKNESGIILLGSGGTPAPPRRKRRQTGQAYYAILLNRGRLEVHLSTGARTMRKIVIRPEPNLFHDGREHSVHVERTRGIFTVQVDENRRYMQNLTVEQPIEVKKLFVGGAPPEFQPSPLRNIPPFEGCIWNLVINSVPMDFARPVSFKNADIGRCAHQKLREDEDGAAPAEIVIQPEPVPTPAFPTPTPVLTHGPCAAESEPALLIGSKQFGLSRNSHIAIAFDDTKVKNRLTIELEVRTEAESGLLFYMARINHADFATVQLRNGLPYFSYDLGSGDTHTMIPTKINDGQWHKIKIMRSKQEGILYVDGASNRTISPKKADILDVVGMLYVGGLPINYTTRRIGPVTYSIDGCVRNLHMAEAPADLEQPTSSFHVGTCFANAQRGTYFDGTGFAKAVGGFKVGLDLLVEFEFRTTTTTGVLLGISSQKMDGMGIEMIDEKLMFHVDNGAGRFTAVYDAGVPGHLCDGQWHKVTANKIKHRIELTVDGNQVEAQSPNPASTSADTNDPVFVGGFPDDLKQFGLTTSIPFRGCIRSLKLTKGTASHWRLILPRPWN

SEQ ID NO: 330357 - DNA, 3387 bp, Artificial Sequence
  derived and/or modified sequence
aagaagctcgcgaatgacgtgaaggaaaatgaggatcatcttaatggcctgaaaactagaatcgagaatgcagacgcacggaatggggatctcctgcgtaccctaaacgatacgttgggtaagctctcagccatacccaatgacactgccgccaaacttcaggcagtgaaagacaaggcccggcaggcgaacgacactgccaaggatgtgctcgctcagatcacggaactacaccagaacctcgatgggttaaaaaagaattataataaactggccgactctgttgctaagacgaatgcagtggtcaaggatccttcaaagaatacagtcgcagatgccgacgcaaccgtgaagaacctggaacaggaggccgatcgtctaattgacaaactgaaaccaattaaggagttggaggacaatctcaaaaaaaatatctctgagattaaagagcttatcaatcaggcaagaaaacaagccaatagcataaaagtttccgtatcctccggcggcgattgcatccggacctataagccagaaataaaaaagggtagttataataatatcgtggtcaacgtgaagacagcagtcgcagacaatctcctgttttacctgggcagtgccaagtttatcgatttcttggctatcgagatgaggaaggggaaagtatcgtttctgtgggacgtggggtctggagtcggccgggtggagtacccggacctcacaattgacgattcgtactggtacaggatcgtcgcatctcgcaccgggagaaatggtacgattagcgttcgagccctcgacggacccaaagcttctattgttcccagcacccatcactcaacctctcctcctggttacaccatcctcgacgttgacgcaaacgccatgttgttcgttggtggtctgacaggaaaattaaagaaggctgatgctgtgagggtaatcacattcacaggctgcatgggcgaaacctatttcgacaataaacctattggcctgtggaatttccgggaaaaggaaggtgactgcaaaggttgtaccgtcagcccccaggtggaagactccgaggggactatacagtttgatggtgaagggtacgcactggtgagtcgaccaattcggtggtaccccaatattagcacagtcatgtttaaattcaggacattttcttcctccgccctgcttatgtatctagccacacgggaccttagggacttcatgtccgtggaactcactgatggacacattaaggtttcctatgatctgggcagcgggatggctagcgttgtctcaaatcagaaccacaacgacggtaaatggaagtcgtttacgttgagccggatacaaaaacaagccaatatatccatagtcgacatcgacaccaaccaggaggaaaatatcgccacgtccagctccggaaacaacttcggactggacttaaaggctgacgataagatctacttcggcgggttaccaacgctccggaacctgagcatgaaggcgagacccgaggtcaatctcaagaaatactccgggtgcctgaaagacattgagatttctagaactccctacaacatcttaagcagcccagattatgttggagtgaccaaaggctgcagtttagagaacgtatatacagtgtccttccctaagcccggttttgttgagttgtctccggtccccatagacgtcgggacggaaattaacctgtcgttttcaaccaagaacgagtcaggcatcattctgctgggaagcggtggtactcctgcccccccgagaagaaaacggcgacagacggggcaggcatactacgccattctcctgaatcgcggccggctagaagtccatcttagcaccggggccaggacaatgcgcaagattgtcatcaggcctgaaccaaatctgtttcacgacggaagggagcactctgtgcatgtggaacgaacaagggggatatttacggtccaggtggatgagaaccggcgctacatgcagaatctgaccgtggaacagccaatcgaggtgaagaaacttttcgtgggaggggcccccccagaatttcagccatcccctctgaggaatatcccccctttcgagggatgcatctggaacctggtgatcaatagtgttcctatggacttcgcacgtcccgtgtctttcaaaaacgcagatatcggcagatgtgcccaccagaaactgcgcgaggacgaagatggtgctgcccctgccgaaattgtgattcagcctgagcctgtgcccacgccagctttccctaccccgacgccggtgctcacacacggcccctgtgccgcagaatcagagccggctctgcttatcggaagcaaacagtttggtctgtcccgcaattcccacattgccattgcctttgacgataccaaggtgaagaatcggctcactatcgagctggaggtgagaacagaggccgaatctggtctactcttctatatggcgcgtatcaatcacgccgattttgctactgtgcagctgcgcaacggactcccctatttctcatacgacctgggctccggagacacacatactatgattcccacaaaaatcaatgacgggcagtggcataagatcaagattatgcggtctaaacaggaggggatcctgtacgtagatggtgccagcaatcgaactatttcaccgaaaaaagcagacatcctggacgtcgtcggaatgttgtatgtgggtggtctcccaatcaactatacgacgagaaggatcggccccgtcacttatagcatcgacggctgcgtgcggaacctccatatggccgaggccccagcagatcttgaacaacccacgagtagctttcatgtcggtacctgctttgcgaatgctcagaggggcacatatttcgatgggacagggttcgccaaggccgtgggtggcttcaaggtcggactggatctgctcgtggagttcgaattccggactaccaccaccaccggggttcttctgggaattagcagtcagaagatggacggaatgggaatagaaatgattgacgagaaattaatgtttcatgtcgataacggggcaggccggttcactgcagtgtacgacgcaggcgtcccagggcatctttgcgatggtcagtggcacaaagtgaccgccaacaagataaagcatcgcatcgagctgaccgtggatggtaaccaggtggaggcacagagcccgaatccagcgagtacatcagctgacactaacgatccagtgtttgtgggtggtttccccgatgacctgaagcagtttgggcttacaacaagcatcccatttagggggtgcattcgcagcctaaagctgactaagggtacagcttctcactggagactgattttgcctaggccctggaattag

SEQ ID NO: 330358 - DNA, 3539 bp, Artificial Sequence
  derived and/or modified sequence
aagaagttagcaaatgatgtaaaagaaaatgaagaccatctaaatggcttaaaaaccaggatagaaaatgctgatgctagaaatggggatctcttgagaactttgaatgacactttgggaaagttatcagctattccaaatgatacagctgctaaactgcaagctgttaaggacaaagccagacaagccaacgacacagctaaagatgtactggcacagattacagagctccaccagaacctcgatggcctgaagaagaattacaataaactagcagacagcgtcgccaaaacgaatgctgtggttaaagatccttccaagaacacagttgccgatgcagatgccactgtcaaaaatttagaacaggaagctgaccggctaatagataaactcaaacccatcaaggaacttgaggataacctaaagaaaaacatctctgagataaaggaattgataaaccaagctcggaaacaagccaattctatcaaagtatctgtgtcttcaggaggtgactgcattcgaacatacaaaccagaaatcaagaaaggaagttacaataatattgttgtcaacgtaaagacagctgttgctgataacctcctcttttatcttggaagtgccaaatttattgactttctggctatagaaatgcgtaaaggcaaagtcagcttcctctgggatgttggatctggagttggacgtgtagagtacccagatttgactattgatgactcatattggtaccgtatcgtagcatcaagaactgggagaaatggaactatttctgtgagagccctggatggacccaaagccagcattgtgcccagcacacaccattcgacgtctcctccagggtacacgattctagatgtggatgcaaatgcaatgctgtttgttggtggcctgactgggaaattaaagaaggctgatgctgtacgtgtgattacattcactggctgcatgggagaaacatactttgacaacaaacctataggtttgtggaatttccgagaaaaagaaggtgactgcaaaggatgcactgtcagtcctcaggtggaagatagtgaggggactattcaatttgatggagaaggttatgcattggtcagccgtcccattcgctggtaccccaacatctccactgtcatgttcaagttcagaacattttcttcgagtgctcttctgatgtatcttgccacacgagacctgagagatttcatgagtgtggagctcactgatgggcacataaaagtcagttacgatctgggctcaggaatggcttccgttgtcagcaatcaaaaccataatgatgggaaatggaaatcattcactctgtcaagaattcaaaaacaagccaatatatcaattgtagatatagatactaatcaggaggagaatatagcaacttcgtcttctggaaacaactttggtcttgacttgaaagcagatgacaaaatatattttggtggcctgccaacgctgagaaacttgagtatgaaagcaaggccagaagtaaatctgaagaaatattccggctgcctcaaagatattgaaatttcaagaactccgtacaatatactcagtagtcccgattatgttggtgttaccaaaggatgttccctggagaatgtttacacagttagctttcctaagcctggttttgtggagctctcccctgtgccaattgatgtaggaacagaaatcaacctgtcattcagcaccaagaatgagtccggcatcattcttttgggaagtggagggacaccagcaccacctaggagaaaacgaaggcagactggacaggcctattatgcaatactcctcaacaggggccgtctggaagtgcatctctccacaggggcacgaacaatgaggaaaattgtgatcagaccagagccgaatctgtttcatgatggaagagaacattccgttcatgtagagcgaactagaggcatctttacagttcaagtggatgaaaacagaagatacatgcaaaacctgacagttgaacagcctatcgaagttaaaaagcttttcgttgggggtgctccacctgaatttcaaccttccccactcagaaatattcctccttttgaaggctgcatatggaatcttgttattaactctgtccccatggactttgcaaggcctgtgtccttcaaaaatgctgacattggtcgctgtgcccatcagaaactccgtgaagatgaagatggagcagctccagctgaaatagttatccagcctgagccagttcccaccccagcctttcctacgcccaccccagttctgacacatggtccttgtgctgcagaatcagaaccagctcttttgatagggagcaagcagttcgggctttcaagaaacagtcacattgcaattgcatttgatgacaccaaagttaaaaaccgtctcacaattgagttggaagtaagaaccgaagctgaatccggcttgcttttttacatggctcgcatcaatcatgctgattttgcaacagttcagctgagaaatggattgccctacttcagctatgacttggggagtggggacacccacaccatgatccccaccaaaatcaatgatggccagtggcacaagattaagataatgagaagtaagcaagaaggaattctttatgtagatggggcttccaacagaaccatcagtcccaaaaaagccgacatcctggatgtcgtgggaatgctgtatgttggtgggttacccatcaactacactacccgaagaattggtccagtgacctatagcattgatggctgcgtcaggaatctccacatggcagaggcccctgccgatctggaacaacccacctccagcttccatgttgggacatgttttgcaaatgctcagaggggaacatattttgacggaaccggttttgccaaagcagttggtggattcaaagtgggattggaccttcttgtagaatttgaattccgcacaactacaacgactggagttcttctggggatcagtagtcaaaaaatggatggaatgggtattgaaatgattgatgaaaagttgatgtttcatgtggacaatggtgcgggcagattcactgctgtctatgatgctggggttccagggcatttgtgtgatggacaatggcataaagtcactgccaacaagatcaaacaccgcattgagctcacagtcgatgggaaccaggtggaagcccaaagcccaaacccagcatctacatcagctgacacaaatgaccctgtgtttgttggaggcttcccagatgacctcaagcagtttggcctaacaaccagtattccgttccgaggttgcatcagatccctgaagctcaccaaaggcacagcaagccactggaggttaattttgccaaggccctggaactgaggggcgttcaacctgtatcatgcccagccaactaataaaaataagtgtaaccccaggaagagtctgtcaaaacaagtatatcaagtaaaacaaacaaatatattttacctatatatgttaattaaactaatttgtgcatgtacatagaattc

SEQ ID NO: 330359 - DNA, 3387 bp, Artificial Sequence
  derived and/or modified sequence
aagaagctggccaatgatgtgaaggaaaatgaagaccacctgaatggcctgaagaccagaattgaaaatgctgatgccagaaatggagacctgctgcggaccctgaatgacaccctgggcaagctgagcgccatccccaatgacacagctgccaagctgcaggccgtgaaggacaaggcccggcaggccaatgacacagccaaggatgtgctggcccagatcacagagctgcaccagaacctggatggcctgaagaagaactacaacaagctggccgacagcgtggccaagaccaatgctgtggtgaaggaccccagcaagaacacagtggctgatgctgatgccaccgtgaagaacctggagcaggaggccgaccggctgattgacaagctgaagcccatcaaggagctggaggacaacctgaagaagaacatcagcgagatcaaggagctgatcaaccaggccaggaagcaggccaacagcatcaaggtgtctgtgagcagcggcggggactgcatccgcacctacaagccagagatcaagaagggcagctacaacaacatcgtggtgaatgtgaagacagctgtggccgacaacctgctcttctacctgggcagcgccaagttcatcgacttcctggccatcgagatgaggaagggcaaggtgtccttcctgtgggatgtgggcagcggcgtgggccgggtggagtacccagacctgaccattgatgacagctactggtaccgcatcgtggccagcaggactggaagaaatggcaccatctctgtgcgggccctggatggccccaaggccagcatcgtgcccagcacccaccacagcaccagccccccaggctacaccatcctggatgtggatgccaatgccatgctgtttgtgggcggcctgaccgggaagctgaagaaggcagatgctgtgcgggtcatcaccttcaccggctgcatgggagagacctactttgacaacaagcccatcggcctgtggaacttccgggagaaggagggggactgcaagggctgcaccgtgagcccccaggtggaggacagcgagggcaccatccagtttgatggagagggctacgccctggtgtcccggcccatccgctggtaccccaacatcagcacagtgatgttcaagttccgcaccttcagcagcagcgccctgctgatgtacctggccacccgggacctgcgggacttcatgtctgtggagctgacagatggccacatcaaggtgtcctatgacctgggcagcggcatggcctctgtggtgagcaaccagaaccacaatgatggcaagtggaagagcttcaccctgagccgcatccagaagcaggccaacatcagcatcgtggacatcgacaccaaccaggaggagaacatcgccaccagcagcagcggcaacaactttggcctggacctgaaggcagatgacaagatctactttggaggcctgcccaccctgaggaacctgtccatgaaggcccggcctgaggtgaacctgaagaagtacagcggctgcctgaaggacatcgagatcagcaggaccccctacaacatcctgagcagcccagactatgtgggcgtgaccaagggctgcagcctggagaatgtgtacacagtgtccttccccaagccaggctttgtggagctgagccctgtgcccattgatgtgggcacagagatcaacctgtccttcagcaccaagaatgaaagtggcatcatcctgctgggcagcggcggcaccccagccccacccaggaggaagaggcggcagacaggccaggcctactatgccatcctgctgaacagaggccgcctggaggtgcacctgagcactggagcccggaccatgaggaagatcgtcatccggcctgagcccaacctcttccatgatggccgggagcacagcgtgcacgtggagaggacccggggcatcttcaccgtgcaggtggatgaaaatcgccgctacatgcagaacctgactgtggagcagcccatcgaggtgaagaagctgtttgtgggcggggcccctcctgagttccagcccagccccctgaggaacatccccccatttgagggctgcatctggaacctggtgatcaacagcgtgcccatggactttgcccggcctgtgtccttcaagaatgctgacatcggccgctgtgcccaccagaagctgagagaagatgaagatggagctgccccagctgagatcgtcatccagcctgagcctgtgcccaccccagccttccccacccccacccctgtgctgacccacggcccctgtgccgctgagagcgagcccgccctgctgattggcagcaagcagtttggcctgagcaggaacagccacatcgccatcgcctttgatgacaccaaggtgaagaaccggctgaccatcgagctggaggtgaggacagaagctgagagcggcctgctcttctacatggcccgcatcaaccacgccgactttgccaccgtgcagctgagaaatggcctgccctacttctcctatgacctgggcagcggggacacccacaccatgatccccaccaagatcaatgatggccagtggcacaagatcaagatcatgaggagcaagcaggagggcatcctgtatgtggatggagccagcaacagaaccatcagccccaagaaggctgacatcctggatgtggtgggcatgctgtatgtgggcggcctgcccatcaactacaccaccaggagaattggccctgtgacctacagcattgatggctgtgtgaggaacctgcacatggccgaggccccagctgacctggagcagcccaccagcagcttccacgtgggcacctgctttgccaatgcccagaggggcacctactttgatggcactggatttgccaaggctgtgggcggcttcaaggtgggcctggacctgctggtggagtttgagttccgcaccaccaccaccaccggggtgctgctgggcatcagcagccagaagatggatggcatgggcatcgagatgattgatgagaagctgatgttccacgtggacaatggagctggccgcttcaccgctgtgtatgatgctggggtgcccggccacctgtgtgatggccagtggcacaaggtgacagccaacaagatcaagcacagaattgagctgactgtggatggcaaccaggtggaggcccagagccccaacccagccagcaccagcgctgacaccaatgaccctgtgtttgtgggcggcttcccagatgacctgaagcagtttggcctgaccaccagcatccccttccggggctgcatccgcagcctgaagctgaccaagggcacagccagccactggaggctcatcctgccccggccctggaactag

SEQ ID NO: 330360 - DNA, 3387 bp, Artificial Sequence
  derived and/or modified sequence
aagaagctggccaacgacgtgaaggagaacgaggaccacctgaacggcctcaagactcgcatagagaacgccgacgcacggaacggtgacctgctgcgcaccctcaacgacacactgggtaagctatctgctatcccaaatgacaccgcagccaaacttcaggctgttaaggacaaggccaggcaggccaacgacaccgcaaaagacgtcctcgctcagatcaccgaactccaccagaacttggatggtctgaaaaagaattataacaaactggctgactctgtagccaaaaccaacgccgtggtgaaggatccctctaagaacactgtggcagacgcagatgccactgtgaagaatctggaacaggaagctgacagactgatcgacaaactcaagcctattaaggagctcgaggataatctgaagaaaaatatttccgagattaaggaactaataaaccaggcccggaagcaggccaactctattaaggtctctgtgagcagtggcggcgactgcatacgaacatataagccagagattaagaaaggaagctacaacaacatcgtggttaacgtgaagaccgccgtggccgataaccttttgttctatctgggctcggcgaagtttatcgattttcttgccatcgagatgaggaagggcaaagtatcattcttgtgggacgtggggtccggagtcgggagagtcgaatacccggacctaactatcgacgacagctactggtaccggattgtggctagccgaactggtcgaaacggcactattagcgtgcgcgcactggacggccctaaagctagtatcgtgcctagcacccatcacagcacgtctccaccaggctacacaatcctggatgtcgatgccaatgcgatgctgtttgtgggaggcctcacggggaagttgaaaaaagcagatgccgtccgggtgattacatttaccggatgcatgggtgaaacctacttcgataacaaacctatcggcctatggaactttagagagaaagagggagactgcaagggctgcacagtatcaccccaagtcgaagacagtgaaggcaccatccagttcgacggcgaaggctacgctctcgtatcccgacccattcgctggtatcctaacattagtaccgttatgtttaagttccgcactttctcctccagcgctctgctaatgtatctggccaccagggatctccgcgatttcatgagcgtggaactgaccgacggccacatcaaagtgtcttacgatctcggctccggtatggcctccgtggtatcaaatcagaatcacaacgacggtaagtggaagtccttcaccctgagccgaatccagaaacaggcaaacattagcatagttgacatagataccaatcaggaggagaacattgcaaccagttcctccggaaacaacttcggtctggacttaaaagccgatgacaaaatatacttcgggggattgcccaccctcaggaacctgtcaatgaaggctcgaccagaagtgaacctgaagaaatattctggctgcctgaaggatatcgaaatctctaggaccccctataacatcctctcaagtccagactatgtgggagtgacgaaggggtgttctttggagaatgtctataccgttagttttccgaagcctggatttgtcgaactgagtcctgtcccaatagatgtgggcacagagatcaacctgagttttagtacaaagaacgaaagcggcatcatcctccttgggagcggaggtactccagcccctccacgccggaaacgtcggcagaccggacaggcctattacgccatcctattgaatcgcggaagattagaagtgcaccttagtaccggtgcacggactatgagaaagatcgtcatacggccagaacctaacctctttcatgacgggagggagcatagcgtgcacgtggagagaacgcggggcatcttcacagtgcaggtggatgaaaatcgcaggtatatgcagaatctcaccgtagagcaacctattgaggtcaagaagctatttgtcggcggtgcgccccccgaattccagccaagtcccctgcggaacatcccgccttttgaagggtgtatttggaatctggttattaatagtgtacccatggactttgcacggcctgtcagctttaagaacgctgatatcggtagatgcgcgcaccaaaagctgcgcgaggacgaggatggagccgcccccgccgagatcgtgatccagcccgaacctgttccaacccccgcctttccaacacccacccctgtccttactcacgggccctgcgcagctgaatctgagccagctcttctaatcggcagcaaacagtttggactgagtcgaaacagccatattgctatagctttcgatgataccaaagttaagaaccgcttgaccatcgagttagaagttagaacagaagcggagtccggcctgttattttacatggctcgcattaatcacgccgattttgcaaccgtgcagctgaggaacggtctgccttatttcagctacgatcttggatctggcgacacacatacaatgattcccactaagattaatgacgggcagtggcacaagatcaaaattatgcgaagtaagcaggaaggcattctctacgtggatggagcctctaatcggacaattagccctaagaaggccgacattctcgacgtggtcggcatgttatatgtgggcgggctacctattaactataccacaagacgaatcggtccagtgacctacagcattgacggctgtgtacgcaacttgcatatggccgaggcccctgcagacctggaacagccgacttcgtctttccacgtggggacctgtttcgccaatgcccagcgggggacttatttcgatggtaccgggtttgcaaaagccgttggaggttttaaagtgggtctcgatctgctagtggagtttgaattccggacgaccactacgaccggtgtgctgctgggaatctccagccagaagatggacgggatgggaatcgaaatgattgatgagaaacttatgtttcacgtagacaatggcgccggaaggtttacagctgtctatgatgccggcgtacccgggcacttatgcgatggccagtggcataaagtgactgccaataagataaagcatcggatagagcttaccgtagatggaaaccaagtagaggctcagagtcctaatcccgcctccacctccgcagataccaatgacccggtgtttgtgggaggcttccccgatgatctaaagcagtttggtctaaccacttctatcccattccgcgggtgtatccgcagcctgaagcttaccaagggaacagcttcacactggaggctgatattacctagaccctggaactag

SEQ ID NO: 330361 - DNA, 3387 bp, Artificial Sequence
  derived and/or modified sequence
aaaaaactggctaatgacgtaaaagaaaacgaagaccacctgaacgggttaaaaacgcgcattgagaacgccgatgctcgcaatggtgaccttcttcgtaccctgaacgacacattgggcaagttatctgcaattcctaacgacaccgcggctaagctgcaagccgtgaaggacaaagcacggcaagccaacgatacagcaaaggatgttctagcacagatcaccgaactccaccagaacctggatggcttgaaaaaaaattacaataagctggcggacagcgtggcaaaaaccaacgctgtggtcaaggacccatccaaaaataccgttgctgacgctgacgctaccgtcaaaaatctggaacaggaagcagacagactcattgacaaacttaagcccatcaaggagttagaggataatctgaaaaaaaatatttctgagatcaaagagctaattaatcaggcacgcaaacaggcaaacagtatcaaagtgtctgttagttctgggggtgactgcatcaggacgtacaagccagagataaagaagggatcatataataatattgtcgtaaatgttaagacagccgtcgctgacaatttgctgttctacctgggttccgccaagtttattgatttcctggccatcgagatgagaaaagggaaggtgagttttctgtgggatgtggggagcggtgttgggagagtggaatatccagacctgacgatagacgactcctactggtaccgtattgttgcatccagaactggacgtaatgggacaatttccgtacgggctttggacggtcccaaggcgagcattgtccccagcacccatcatagcacctcacccccagggtatacgattctggacgttgatgctaacgcaatgttatttgtgggcggtctgaccggtaagctcaaaaaagcagacgccgttagggtgatcacttttacagggtgcatgggcgagacctatttcgacaacaaaccaatcggcctttggaactttcgagagaaagagggcgattgcaaggggtgtacagtgagccctcaagtggaggacagcgagggaaccatacagttcgacggtgaagggtatgcacttgtgagccgtcctatcagatggtatcccaatattagcactgtgatgtttaagttccgaaccttcagttccagtgctttgctgatgtacctggcaaccagggacctccgggacttcatgtctgtagagctgacggatgggcacataaaggtttcatacgatctgggaagcgggatggcgtctgtcgtgtctaaccaaaatcacaacgatggtaagtggaagtcatttacccttagcagaatacagaagcaggccaatatttccatcgtagacattgacacgaatcaagaagagaacattgccacctccagctcgggcaataactttggcttggatctcaaggcagatgataagatttactttgggggtctgcctacccttaggaatctcagcatgaaggccaggcccgaagtgaatcttaagaagtattctggttgtctgaaggatatcgaaatctccagaactccctataatatcctctccagccccgactatgtaggtgtgaccaaagggtgttcccttgagaatgtctacactgtgagcttccccaagcccggttttgtagagctgtccccggtcccaatagatgttgggacagagatcaacctgtccttcagcaccaagaacgagtccggaattatcctcctgggctccggcggaacacccgctccacctagacggaaacgacggcagaccggacaggcatactacgccattctacttaatcggggacgcctggaagtccacctgtcaaccggcgctcggacgatgagaaagattgtgattcggcctgaacctaacttattccatgatggaagagagcatagtgtccatgtcgagcggactcgaggaatctttacagtccaggttgatgagaatcggagatatatgcaaaatttaaccgtcgagcaacccatcgaagtgaagaagctattcgttggtggcgcacccccagagttccaacccagtccactgcggaacatacccccattcgaaggatgcatctggaacctggtcatcaacagtgtgcccatggactttgctcgcccagtatcttttaaaaacgcagacatcggacggtgtgcccaccagaagctgagggaagacgaggatggcgctgctcccgctgagatagtgatccaacctgagccagtgccaacccctgccttcccaacgcccactcctgtgttgacccacggcccttgcgcagccgagagtgagcccgcactcttaattggttccaagcagtttgggctgtcgcgcaattctcacattgccatagctttcgacgacacaaaagtaaagaacagattgaccatcgagcttgaagttcgcactgaagctgagtccggcctgctattctacatggcccgtattaaccacgccgacttcgcaacggtacagttgcgaaacgggttgccttactttagctatgatttgggtagcggagacactcatacaatgataccaaccaaaattaacgatggtcaatggcataaaatcaaaataatgcgctctaagcaggagggaatattgtacgttgatggagcgagcaataggaccatttcacccaagaaagctgatattcttgatgtagtcggaatgttgtatgtcggcggactgcccatcaactacacaacccggagaatagggccagtcacgtactccattgacggatgcgtgcgtaatttacatatggccgaagcgcctgccgatctggaacagcctacaagtagctttcatgtgggcacctgcttcgccaatgcacagcggggaacgtatttcgatggtacaggtttcgctaaggccgttggaggattcaaggttggactggatttactggttgagttcgagttcaggaccactactactaccggagtgcttctggggatctctagccagaagatggatggtatgggcattgagatgatagatgagaaactgatgtttcacgtggataacggcgctgggaggtttacagcagtgtacgatgccggagttccaggccacttatgcgacggtcagtggcacaaagtgactgccaataagatcaaacatcgtatcgaactgactgtggatggaaatcaggttgaggctcaaagccccaaccccgcttcgactagtgccgacacaaatgatccagtttttgtgggcggtttccccgacgaccttaagcagtttggcttgacaacatctatcccatttcggggttgtatacgttcgctgaaactcactaaaggcacagcctcacattggcgactgattctgcctcgtccctggaactag

SEQ ID NO: 330362 - DNA, 3387 bp, Artificial Sequence
  derived and/or modified sequence
aagaagctggccaacgacgtgaaggagaacgaggaccacctgaacggcctgaagaccagaatcgagaacgccgacgccagaaacggcgacctgctgagaaccctgaacgacaccctgggcaagctgagcgccatccccaacgacaccgccgccaagctgcaggccgtgaaggacaaggccagacaggccaacgacaccgccaaggacgtgctggcccagatcaccgagctgcaccagaacctggacggcctgaagaagaactacaacaagctggccgacagcgtggccaagaccaacgccgtggtgaaggaccccagcaagaacaccgtggccgacgccgacgccaccgtgaagaacctggagcaggaggccgacagactgatcgacaagctgaagcccatcaaggagctggaggacaacctgaagaagaacatcagcgagatcaaggagctgatcaaccaggccagaaagcaggccaacagcatcaaggtgagcgtgagcagcggcggcgactgcatcagaacctacaagcccgagatcaagaagggcagctacaacaacatcgtggtgaacgtgaagaccgccgtggccgacaacctgctgttctacctgggcagcgccaagttcatcgacttcctggccatcgagatgagaaagggcaaggtgagcttcctgtgggacgtgggcagcggcgtgggcagagtggagtaccccgacctgaccatcgacgacagctactggtacagaatcgtggccagcagaaccggcagaaacggcaccatcagcgtgagagccctggacggccccaaggccagcatcgtgcccagcacccaccacagcaccagcccccccggctacaccatcctggacgtggacgccaacgccatgctgttcgtgggcggcctgaccggcaagctgaagaaggccgacgccgtgagagtgatcaccttcaccggctgcatgggcgagacctacttcgacaacaagcccatcggcctgtggaacttcagagagaaggagggcgactgcaagggctgcaccgtgagcccccaggtggaggacagcgagggcaccatccagttcgacggcgagggctacgccctggtgagcagacccatcagatggtaccccaacatcagcaccgtgatgttcaagttcagaaccttcagcagcagcgccctgctgatgtacctggccaccagagacctgagagacttcatgagcgtggagctgaccgacggccacatcaaggtgagctacgacctgggcagcggcatggccagcgtggtgagcaaccagaaccacaacgacggcaagtggaagagcttcaccctgagcagaatccagaagcaggccaacatcagcatcgtggacatcgacaccaaccaggaggagaacatcgccaccagcagcagcggcaacaacttcggcctggacctgaaggccgacgacaagatctacttcggcggcctgcccaccctgagaaacctgagcatgaaggccagacccgaggtgaacctgaagaagtacagcggctgcctgaaggacatcgagatcagcagaaccccctacaacatcctgagcagccccgactacgtgggcgtgaccaagggctgcagcctggagaacgtgtacaccgtgagcttccccaagcccggcttcgtggagctgagccccgtgcccatcgacgtgggcaccgagatcaacctgagcttcagcaccaagaacgagagcggcatcatcctgctgggcagcggcggcacccccgccccccccagaagaaagagaagacagaccggccaggcctactacgccatcctgctgaacagaggcagactggaggtgcacctgagcaccggcgccagaaccatgagaaagatcgtgatcagacccgagcccaacctgttccacgacggcagagagcacagcgtgcacgtggagagaaccagaggcatcttcaccgtgcaggtggacgagaacagaagatacatgcagaacctgaccgtggagcagcccatcgaggtgaagaagctgttcgtgggcggcgccccccccgagttccagcccagccccctgagaaacatcccccccttcgagggctgcatctggaacctggtgatcaacagcgtgcccatggacttcgccagacccgtgagcttcaagaacgccgacatcggcagatgcgcccaccagaagctgagagaggacgaggacggcgccgcccccgccgagatcgtgatccagcccgagcccgtgcccacccccgccttccccacccccacccccgtgctgacccacggcccctgcgccgccgagagcgagcccgccctgctgatcggcagcaagcagttcggcctgagcagaaacagccacatcgccatcgccttcgacgacaccaaggtgaagaacagactgaccatcgagctggaggtgagaaccgaggccgagagcggcctgctgttctacatggccagaatcaaccacgccgacttcgccaccgtgcagctgagaaacggcctgccctacttcagctacgacctgggcagcggcgacacccacaccatgatccccaccaagatcaacgacggccagtggcacaagatcaagatcatgagaagcaagcaggagggcatcctgtacgtggacggcgccagcaacagaaccatcagccccaagaaggccgacatcctggacgtggtgggcatgctgtacgtgggcggcctgcccatcaactacaccaccagaagaatcggccccgtgacctacagcatcgacggctgcgtgagaaacctgcacatggccgaggcccccgccgacctggagcagcccaccagcagcttccacgtgggcacctgcttcgccaacgcccagagaggcacctacttcgacggcaccggcttcgccaaggccgtgggcggcttcaaggtgggcctggacctgctggtggagttcgagttcagaaccaccaccaccaccggcgtgctgctgggcatcagcagccagaagatggacggcatgggcatcgagatgatcgacgagaagctgatgttccacgtggacaacggcgccggcagattcaccgccgtgtacgacgccggcgtgcccggccacctgtgcgacggccagtggcacaaggtgaccgccaacaagatcaagcacagaatcgagctgaccgtggacggcaaccaggtggaggcccagagccccaaccccgccagcaccagcgccgacaccaacgaccccgtgttcgtgggcggcttccccgacgacctgaagcagttcggcctgaccaccagcatccccttcagaggctgcatcagaagcctgaagctgaccaagggcaccgccagccactggagactgatcctgcccagaccctggaactag

SEQ ID NO: 330363 - protein, 182 aa, Artificial Sequence
  derived and/or modified sequence
MALSSAWRSVLPLWLLWSAACSRAASGDDNAFPFDIEGSSAVGRQDPPETSEPRVALGRLPPAAEKCNAGFFHTLSGECVPCDCNGNSNECLDGSGYCVHCQRNTTGEHCEKCLDGYIGDSIRGAPQFCQPCPCPLPHLANFAESCYRKNGAVRCICNENYAGPNCERPSPQSTRGFPLNDS

SEQ ID NO: 330364 - protein, 374 aa, Artificial Sequence
  derived and/or modified sequence
MALSSAWRSVLPLWLLWSAACSRAASGDDNAFPFDIEGSSAVGRQDPPETSEPRVALGRLPPAAEKCNAGFFHTLSGECVPCDCNGNSNECLDGSGYCVHCQRNTTGEHCEKCLDGYIGDSIRGAPQFCQPCPCPLPHLANFAESCYRKNGAVRCICNENYAGPNCERCAPGYYGNPLLIGSTCKKCDCSGNSDPNLIFEDCDEVTGQCRNCLRNTTGFKCERCAPGYYGDARIAKNCAVCNCGGGPCDSVTGECLEEGFEPPTGMDCPTISCDKCVWDLTDALRLAALSIEEGKSGVLSVSSGAAAHRHVNEINATIYLLKTKLSERENQYALRKIQINNAENTMKSLLSDVEELVEKHWNKPRRRLELQEGV

SEQ ID NO: 330365 - protein, 107 aa, Artificial Sequence
  derived and/or modified sequence
MALSSAWRSVLPLWLLWSAACSRAASGDDNAFPFDIEGSSAVGRQDPPETSEPRVALGRLPPAAEKCNAGFFHTLSGECVPCDCNGNSNECLDGSGYCVHCQRNTTG

SEQ ID NO: 330366 - protein, 331 aa, Artificial Sequence
  derived and/or modified sequence
MALSSAWRSVLPLWLLWSAACSRAASGDDNAFPFDIEGSSAVGRQDPPETSEPRVALGRLPPAAEKCNAGFFHTLSGECVPCDCNGNSNECLDGSGYCVHCQRNTTGEHCEKCLDGYIGDSIRGAPQFCQPCPCPLPHLANFAESCYRKNGAVRCICNENYAGPNCERCAPGYYGNPLLIGSTCKKCDCSGNSDPNLIFEDCDEVTGQCRNCLRNTTGFKCERCAPGYYGDARIAKNCAVCNCGGGPCDSVTGECLEEGFEPPTGMDCPTISCDKCVWDLTDALRLAALSIEEGKSGVLSVSSGAAAHRHVNEINATIYLLKTKLSERENQ

SEQ ID NO: 330367 - DNA, 549 bp, Artificial Sequence
  derived and/or modified sequence
atggccctgtcctcagcctggaggtccgtgctacccctgtggttgttatggagcgccgcgtgctcgcgggcggcaagcggcgacgacaatgccttccccttcgatattgaaggatcgtctgcagtaggacgccaggaccccccggagacctccgagcctagagttgccctcggcagattaccacccgccgcggagaagtgcaatgctggattcttccacacactgtcaggtgaatgtgtgccgtgtgattgtaacgggaactccaacgagtgcctagatgggtcagggtattgcgtgcattgtcagcgcaacacaaccggagagcactgcgagaaatgtttagacgggtacattggtgacagcattaggggagccccccagttttgtcaaccctgtccatgtccattgccccacctagcaaactttgccgagtcctgctaccgcaaaaacggtgcagtgcgctgcatttgcaatgaaaattacgctgggccgaattgcgagaggccttctccacagagcaccagggggttccctctgaacgactcctag

SEQ ID NO: 330368 - DNA, 537 bp, Artificial Sequence
  derived and/or modified sequence
taaatttttgaggattgcgacgaggtcaccggacagtgtcggaactgcttgaggaacactacgggattcaaatgtgagagatgtgccccaggttactatggtgacgcacgcattgccaagaattgtgccgtttgcaactgtggtggaggcccatgcgactctgtgacaggcgagtgccttgaagaggggtttgaacctcctacaggtatggactgtcccaccatttcttgtgacaagtgtgtttgggatctgactgatgccctgcgtctggctgctttgagtattgaagaaggaaaaagtggcgtgctcagcgtgtcaagcggcgcagccgctcaccggcatgtgaatgagatcaatgcaaccatctacctgctaaagaccaagctttccgaacgtgagaatcagtacgctctcaggaagatacaaatcaataacgccgaaaacaccatgaagtccctcctgagcgatgtagaagagttagtggagaagcactggaacaagccaaggaggcggctggagctgcaggaaggggtgtag

SEQ ID NO: 330369 - DNA, 1125 bp, Artificial Sequence
  derived and/or modified sequence
atggctcttagcagtgcatggcgatccgtcctgccactatggttgctttggtcagccgcctgctcacgggcagccagcggggatgacaacgcgttccctttcgatattgaggggtcctccgctgtggggaggcaggatccaccagaaacatccgaaccaagagtggctctcggccggctacccccggccgcagagaagtgcaatgccgggttcttccatactctctctggcgagtgcgttccttgcgattgtaacggcaattctaatgagtgcctggacggctccgggtattgtgtgcattgtcagcgtaataccacaggagagcactgtgaaaaatgtcttgatgggtacattggtgattcaatacgcggcgcgccacaattttgtcagccttgtccatgccccctccctcatttggctaattttgccgaaagctgctaccgcaaaaatggggcggtgcggtgcatatgcaacgagaattacgcgggccccaattgcgaaaggtgcgcccccggctactacgggaatcctctccttatcggaagtacctgtaagaaatgtgattgtagcggcaatagcgaccctaatctcatcttcgaggactgcgatgaggtaaccggtcaatgcaggaactgtctgcgcaacaccactggctttaaatgcgagcgctgtgctccaggttactacggcgatgcccgcatcgctaaaaactgtgcagtttgtaattgtggaggaggaccctgtgactccgtgacaggcgagtgcctagaagaagggttcgagcccccaacaggaatggattgcccaaccatttcatgtgataaatgcgtgtgggatctgactgatgctttgaggctcgccgccttgtccatcgaggaggggaagagtggcgtgctaagtgtgagctcaggcgcagcagctcatagacacgtgaacgagatcaacgccaccatttatctgctgaaaaccaaactgtccgaaagggagaatcaatacgccctgcgaaagatccagatcaataatgccgagaacactatgaagtcgctgctttcagacgtcgaggaactggttgagaaacactggaataagccaagacgccggctcgaactgcaagaaggtgtatag

SEQ ID NO: 330370 - DNA, 996 bp, Artificial Sequence
  derived and/or modified sequence
atggccttatcaagcgcttggagatcggtgctccccctgtggctcctgtggagcgcagcttgttcgcgggccgcttcaggagatgataacgccttccccttcgacattgaaggctcctcggccgtgggacggcaggatccccctgaaacaagtgaaccaagggtggctttgggccggctgcctcctgccgccgaaaagtgcaatgccggattttttcacactctgagcggggagtgtgtgccttgcgattgtaacggcaacagcaacgagtgccttgatggatctggctattgcgtgcattgtcagcggaacaccacgggtgaacactgcgaaaagtgtctggatggatacattggggactccatcaggggggcgccacagttctgtcagccatgcccttgccccctgccccatctggccaactttgccgaaagctgctatagaaaaaacggagctgttaggtgcatttgcaatgagaactatgccggcccgaactgcgaaaggtgcgcgcctggctactacggcaaccctctcttgatcggatctacatgcaagaaatgcgactgctcaggcaacagcgatccaaacctcatcttcgaggattgcgatgaagtcactggccaatgcagaaactgtctgcggaatacgacaggcttcaagtgcgagagatgcgcacccggctactacggggacgcccgcattgcgaaaaactgcgcagtctgtaattgtggcggaggaccctgcgactcagtgaccggggagtgcctggaagagggcttcgaacctcccaccggcatggattgcccgacaatctcttgtgacaagtgtgtgtgggacctgacagacgcacttaggctagctgctctgtccatcgaggagggaaaaagcggggtcctgtcagtgagttctggggcagccgctcatcgacatgtgaacgagattaacgccaccatatacctgctgaaaaccaaactaagcgaacgtgaaaatcagtag

SEQ ID NO: 330371 - DNA, 975 bp, Artificial Sequence
  derived and/or modified sequence
atggctctaagcagcgcctggaggagtgtcttgcccctttggctgttgtggagtgcagcttgctcacgcgccgcatcgggcgatgataatgcattcccttttgatatcgagggctcgtccgcagtagggcggcaggacccgcccgagacatcggagcctagagtggccctcggaagactgccacctgcggcagagaagtgtaacgccggtttttttcacacactgagcggagaatgcgtgccgtgtgattgcaatggaaacagcaatgaatgtttagatggctcaggatattgcgttcattgccagcgaaacactactggagagcactgtgagaaatgtctggatggctatatcggtgatagcatcaggggcgctccccaattctgccagccctgtccatgtccactcccccatctcgccaattttgctgagtcttgctaccggaagaacggcgctgtaaggtgtatatgtaatgaaaattacgctgggccaaactgcgagcgatgtgcaccaggatattatgggaaccccctgctgattggcagcacttgcaagaagtgtgactgctccggcaactctgacccgaatctgatcttcgaggactgtgatgaggtcactggccaatgtcggaattgtttgcggaataccaccgggttcaagtgcgaaaggtgcgccccaggctactatggcgatgctaggatcgctaaaaattgtgctgtttgcaattgtggtggcgggccgtgtgactcagtaaccggtgagtgccttgaagaagggttcgagccccctacgggctgcgacaaatgcgtttgggacctgacagacgccctgcgcctggcggcgttgagtatcgaagaaggcaaatcgggggtcctttccgtctcatctggcgctgcagcacacagacacgtcaacgaaatcaacgcaactatctatctgctcaagaagactaagcagaaaaataataagaaatag

SEQ ID NO: 330372 - DNA, 541 bp, Artificial Sequence
  derived and/or modified sequence
agtcccgaacggccagggagaggaggtggcctagcgctggcggggctcaccccaatccgtctgccttttgatgccgtactgtaagctccgtccatctgtaggttcttgagccagaacctctgcgggaaggagaaaaactgctggttgcgcagccacctcgggatactgcacacggagaggagggaaaataagcgaggcaccgccgcaccacgcgggagacctacggagacccacagcgcccgagccctggaagagcactactggatgtcagcggagaaatggctttgagctcagcctggcgctcggttctgcctctgtggctcctctggagcgctgcctgctcccgcgccgcgtccggggacgacaacgcttttccttttgacattgaagggagctcagcggttggcaggcaagacccgcctgagacgagcgaaccccgcgtggctctgggacgcctgccgcctgcggccgagaaatgcaatgctggattctttcacaccctgtcgggagaatgtgtgccctgcgactgtaatggcaattc

SEQ ID NO: 330373 - DNA, 776 bp, Artificial Sequence
  derived and/or modified sequence
gcagtccccagtcccgaacggccagggagaggaggtggcctagcgctggcggggctcaccccaatccgtctgccttttgatgccgtactctgctggttgcgcagccacctcgggatactgcacacggagaggagggaaaataagcgaggcaccgccgcaccacgcgggagacctacggagacccacagcgcccgagccctggaagagcactactggatgtcagcggagaaatggctttgagctcagcctggcgctcggttctgcctctgtggctcctctggagcgctgcctgctcccgcgccgcgtccggggacgacaacgcttttccttttgacattgaagggagctcagcggttggcaggcaagacccgcctgagacgagcgaaccccgcgtggctctgggacgcctgccgcctgcggccgagaaatgcaatgctggattctttcacaccctgtcgggagaatgtgtgccctgcgactgtaatggcaattccaacgagtgtttggacggctcaggatactgtgtgcactgccagcggaacacaacaggagagcactgtgaaaagtgtctggatggttatatcggagattccatcaggggagcaccccaattctgccagccgtgcccctgtcccctgccccacttggccaattttgcagaatcctgctataggaaaaatggagctgttcggtgcatttgtaacgaaaattatgctggacctaactgtgaaaggccttctccacagagcacgagaggctttccactgaatgactcg

SEQ ID NO: 330374 - DNA, 672 bp, Artificial Sequence
  derived and/or modified sequence
tgatctttgaagattgtgatgaagtcactggccagtgtaggaattgcttacgcaacaccaccggattcaagtgtgaacgttgcgctcctggctactatggggacgccaggatagccaagaactgtgcagtgtgcaactgcgggggaggcccatgtgacagtgtaaccggagaatgcttggaagaaggttttgaaccccctacaggcatggactgcccaaccataagctgtgataagtgcgtctgggacctgactgatgcactgcggttagcagcgctctccatcgaggaaggcaaatccggggtgctgagcgtatcctctggggccgccgctcataggcacgtgaatgaaatcaacgccaccatctacctcctcaaaacaaaattgtcagaaagagaaaaccaatacgccctaagaaagatacaaatcaacaatgctgagaacacgatgaaaagccttctgtctgacgtagaggaattagttgaaaagcactggaacaagccaagaagaagactggaattgcaggaaggagtataatgactcagaagacagtgtccattcagagagcccacagtttatgaagggactgatgaccacattgccgctgcacagtgggctctgtgactacaggagccttgctctgtagggaggggattacccttctccaataaaa

SEQ ID NO: 330375 - DNA, 1080 bp, Artificial Sequence
  derived and/or modified sequence
aatgtgagaaggaagccaggacagcgcagtccccagtcccgaacggccagggagaggaggtggcctagcgctggcggggctcaccccaatccgtctgccttttgatgccgtactctgctggttgcgcagccacctcgggatactgcacacggagaggagggaaaataagcgaggcaccgccgcaccacgcgggagacctacggagacccacagcgcccgagccctggaagagcactactggatgtcagcggagaaatggctttgagctcagcctggcgctcggttctgcctctgtggctcctctggagcgctgcctgctcccgcgccgcgtccggggacgacaacgcttttccttttgacattgaagggagctcagcggttggcaggcaagacccgcctgagacgagcgaaccccgcgtggctctgggacgcctgccgcctgcggccgagaaatgcaatgctggattctttcacaccctgtcgggagaatgtgtgccctgcgactgtaatggcaattccaacgagtgtttggacggctcaggatactgtgtgactactgacggagaagacccaggtttttcagcttctgccctatcgttcattctcagctctcagggagccagagaagccagggctccaacatgaacacttcttgtagctcactgtcatgaccagtgtttcagtcagttcttgcaggttgcctgacttacctcatttctctcatttcctgtaagcaaccaaaaataaaaggctttcttttatttcattttgtcttattttgcttttatcttgaaggcatataagacctctgtatctgccttgttcaccttcaactgcttctaattcttcctcaattccagtgtccaatgtcaatttgaaattaaaatttacagactgattttaactaagctgttggtaaagctgacctaagccattcagccacaaaatatagagtatacaaaattatgctaccattttacacatatcaagcaagcaaagagatttttttttactggtggaacactaatctttcaaatatagaatagtggctaaatgaaaataaaacagcttagaaatcta

SEQ ID NO: 330376 - DNA, 1346 bp, Artificial Sequence
  derived and/or modified sequence
agtcccgaacggccagggagaggaggtggcctagcgctggcggggctcaccccaatccgtctgccttttgatgccgtactctgctggttgcgcagccacctcgggatactgcacacggagaggagggaaaataagcgaggcaccgccgcaccacgcgggagacctacggagacccacagcgcccgagccctggaagagcactactggatgtcagcggagaaatggctttgagctcagcctggcgctcggttctgcctctgtggctcctctggagcgctgcctgctcccgcgccgcgtccggggacgacaacgcttttccttttgacattgaagggagctcagcggttggcaggcaagacccgcctgagacgagcgaaccccgcgtggctctgggacgcctgccgcctgcggccgagaaatgcaatgctggattctttcacaccctgtcgggagaatgtgtgccctgcgactgtaatggcaattccaacgagtgtttggacggctcaggatactgtgtgcactgccagcggaacacaacaggagagcactgtgaaaagtgtctggatggttatatcggagattccatcaggggagcaccccaattctgccagccgtgcccctgtcccctgccccacttggccaattttgcagaatcctgctataggaaaaatggagctgttcggtgcatttgtaacgaaaattatgctggacctaactgtgaaagatgtgctcccggttactatggaaaccccttactcattggaagcacctgtaagaaatgtgactgcagtggaaattcagatcccaacctgatctttgaagattgtgatgaagtcactggccagtgtaggaattgcttacgcaacaccaccggattcaagtgtgaacgttgcgctcctggctactatggggacgccaggatagccaagaactgtgcagtgtgcaactgcgggggaggcccatgtgacagtgtaaccggagaatgcttggaagaaggttttgaaccccctacaggcatggactgcccaaccataagctgtgataagtgcgtctgggacctgactgatgcactgcggttagcagcgctctccatcgaggaaggcaaatccggggtgctgagcgtatcctctggggccgccgctcataggcacgtgaatgaaatcaacgccaccatctacctcctcaaaacaaaattgtcagaaagagaaaaccaatacgccctaagaaagatacaaatcaacaatgctgagaacacgatgaaaagccttctgtctgacgtagaggaattagttgaaaagcactggaacaagccaagaagaagactggaattgcaggaaggagtataa

SEQ ID NO: 330377 - DNA, 1330 bp, Artificial Sequence
  derived and/or modified sequence
aatccgtctgccttttgatgccgtactgtaagctccgtccatctgtaggttcttgagccagaacctctgcgggaaggagaaaaagtgaaagagggagagggagagggagagagagggggagaaggggagagagagagagggagagagaggctggaactctcccttactctcgcactttccctttatttcctaagctgctggttgcgcagccacctcgggatactgcacacggagaggagggaaaataagcgaggcaccgccgcaccacgcgggagacctacggagacccacagcgcccgagccctggaagagcactactggatgtcagcggagaaatggctttgagctcagcctggcgctcggttctgcctctgtggctcctctggagcgctgcctgctcccgcgccgcgtccggggacgacaacgcttttccttttgacattgaagggagctcagcggttggcaggcaagacccgcctgagacgagcgaaccccgcgtggctctgggacgcctgccgcctgcggccgagaaatgcaatgctggattctttcacaccctgtcgggagaatgtgtgccctgcgactgtaatggcaattccaacgagtgtttggacggctcaggatactgtgtgcactgccagcggaacacaacaggagagcactgtgaaaagtgtctggatggttatatcggagattccatcaggggagcaccccaattctgccagccgtgcccctgtcccctgccccacttggccaattttgcagaatcctgctataggaaaaatggagctgttcggtgcatttgtaacgaaaattatgctggacctaactgtgaaagatgtgctcccggttactatggaaaccccttactcattggaagcacctgtaagaaatgtgactgcagtggaaattcagatcccaacctgatctttgaagattgtgatgaagtcactggccagtgtaggaattgcttacgcaacaccaccggattcaagtgtgaacgttgcgctcctggctactatggggacgccaggatagccaagaactgtgcagtgtgcaactgcgggggaggcccatgtgacagtgtaaccggagaatgcttggaagaaggttttgaaccccctacaggcatggactgcccaaccataagctgtgataagtgcgtctgggacctgactgatgcactgcggttagcagcgctctccatcgaggaaggcaaatccggggtgctgagcgtatcctctggggccgccgctcataggcacgtgaatgaaatcaacgccaccatctacctcctcaaaacaaaattgtcagaaagagaaaaccaata

SEQ ID NO: 330378 - DNA, 539 bp, Artificial Sequence
  derived and/or modified sequence
gtctatcccccagaaaaaacccgagaaaccttgctcaagaaagtgggcaccctgaccctctgccttcagagatcatctacctttggttcctgccctggaatcccttttccacccactttcctgcaaactagcgggggccacataaaatatctatctgctggttgcgcagccacctcgggatactgcacacggagaggagggaaaataagcgaggcaccgccgcaccacgcgggagacctacggagacccacagcgcccgagccctggaagagcactactggatgtcagcggagaaatggctttgagctcagcctggcgctcggttctgcctctgtggctcctctggagcgctgcctgctcccgcgccgcgtccggggacgacaacgcttttccttttgacattgaagggagctcagcggttggcaggcaagacccgcctgagacgagcgaaccccgcgtggctctgggacgcctgccgcctgcggccgagaaatgcaatgctggattctttcacaccctgtcgggagaatgtgtgccct

SEQ ID NO: 330379 - DNA, 1284 bp, Artificial Sequence
  derived and/or modified sequence
agcttagagtgggagggcctgggagtagaaggtaaaaagggagtggtgagaatgaatgtgagaaggaagccaggacagcgcagtccccagtcccgaacggccagggagaggaggtggcctagcgctggcggggctcaccccaatccgtctgccttttgatgccgtactctgctggttgcgcagccacctcgggatactgcacacggagaggagggaaaataagcgaggcaccgccgcaccacgcgggagacctacggagacccacagcgcccgagccctggaagagcactactggatgtcagcggagaaatggctttgagctcagcctggcgctcggttctgcctctgtggctcctctggagcgctgcctgctcccgcgccgcgtccggggacgacaacgcttttccttttgacattgaagggagctcagcggttggcaggcaagacccgcctgagacgagcgaaccccgcgtggctctgggacgcctgccgcctgcggccgagaaatgcaatgctggattctttcacaccctgtcgggagaatgtgtgccctgcgactgtaatggcaattccaacgagtgtttggacggctcaggatactgtgtgcactgccagcggaacacaacaggagagcactgtgaaaagtgtctggatggttatatcggagattccatcaggggagcaccccaattctgccagccgtgcccctgtcccctgccccacttggccaattttgcagaatcctgctataggaaaaatggagctgttcggtgcatttgtaacgaaaattatgctggacctaactgtgaaagatgtgctcccggttactatggaaaccccttactcattggaagcacctgtaagaaatgtgactgcagtggaaattcagatcccaacctgatctttgaagattgtgatgaagtcactggccagtgtaggaattgcttacgcaacaccaccggattcaagtgtgaacgttgcgctcctggctactatggggacgccaggatagccaagaactgtgcagtgtgcaactgcgggggaggcccatgtgacagtgtaaccggagaatgcttggaagaaggttttgaaccccctacaggctgtgataagtgcgtctgggacctgactgatgcactgcggttagcagcgctctccatcgaggaaggcaaatccggggtgctgagcgtatcctctggggccgccgctcataggcacgtgaatgaaatcaacgccaccatctacctcctcaaaaaaactaaacaaaaaaacaataaaaaataa

SEQ ID NO: 330380 - DNA, 549 bp, Artificial Sequence
  derived and/or modified sequence
atggccctgagcagcgcctggaggtctgtgctgcccctgtggctgctgtggagcgctgcctgcagccgggccgccagcggagatgacaatgccttcccctttgacatcgagggcagcagcgctgtgggccggcaggaccccccagagaccagcgagccccgggtggccctgggccgcctgcccccagctgctgagaagtgcaatgccggcttcttccacaccctgagcggggagtgtgtgccctgtgactgcaatggaaacagcaatgaatgtctggatggcagcggctactgtgtgcactgccagaggaacaccaccggggagcactgtgagaagtgcctggatggctacatcggggacagcatccggggggccccccagttctgccagccctgcccctgccccctgccccacctggccaactttgctgagagctgctacaggaagaatggagctgtgcgctgcatctgcaatgaaaattatgccggccccaactgtgagcggcccagcccccagagcacccggggcttccccctgaatgacagctag

SEQ ID NO: 330381 - DNA, 537 bp, Artificial Sequence
  derived and/or modified sequence
tgaatttttgaggactgtgatgaggtgacaggccagtgcaggaactgcctgaggaacaccaccggcttcaagtgtgagcgctgtgcccctggctactatggagatgcccgcatcgccaagaactgtgctgtgtgcaactgtggcggcggcccctgtgacagcgtgactggagagtgcctggaggagggctttgagccccccaccggcatggactgccccaccatcagctgtgacaagtgtgtgtgggacctgacagatgccctgcggctggccgccctgagcattgaggagggcaagagcggcgtgctgtctgtgtcctctggagctgctgcccaccgccacgtgaatgagatcaatgccaccatctacctgctgaagaccaagctgtctgaaagagagaaccagtatgccctgaggaagatccagatcaacaatgctgagaacaccatgaagagcctgctgagtgatgtggaggagctggtggagaagcactggaacaagccccggcggcggctggagctgcaggagggcgtgtag

SEQ ID NO: 330382 - DNA, 1125 bp, Artificial Sequence
  derived and/or modified sequence
atggccctgagcagcgcctggaggtctgtgctgcccctgtggctgctgtggagcgctgcctgcagccgggccgccagcggagatgacaatgccttcccctttgacatcgagggcagcagcgctgtgggccggcaggaccccccagagaccagcgagccccgggtggccctgggccgcctgcccccagctgctgagaagtgcaatgccggcttcttccacaccctgagcggggagtgtgtgccctgtgactgcaatggaaacagcaatgaatgtctggatggcagcggctactgtgtgcactgccagaggaacaccaccggggagcactgtgagaagtgcctggatggctacatcggggacagcatccggggggccccccagttctgccagccctgcccctgccccctgccccacctggccaactttgctgagagctgctacaggaagaatggagctgtgcgctgcatctgcaatgaaaattatgccggccccaactgtgagcgctgtgcccctggctactacggcaaccccctgctgattggcagcacctgcaagaagtgtgactgcagcggcaacagcgaccccaacctgatctttgaggactgtgatgaggtgacaggccagtgcaggaactgcctgaggaacaccaccggcttcaagtgtgagcgctgtgcccctggctactatggagatgcccgcatcgccaagaactgtgctgtgtgcaactgtggcggcggcccctgtgacagcgtgactggagagtgcctggaggagggctttgagccccccaccggcatggactgccccaccatcagctgtgacaagtgtgtgtgggacctgacagatgccctgcggctggccgccctgagcattgaggagggcaagagcggcgtgctgtctgtgtcctctggagctgctgcccaccgccacgtgaatgagatcaatgccaccatctacctgctgaagaccaagctgtctgaaagagagaaccagtatgccctgaggaagatccagatcaacaatgctgagaacaccatgaagagcctgctgagtgatgtggaggagctggtggagaagcactggaacaagccccggcggcggctggagctgcaggagggcgtgtag

SEQ ID NO: 330383 - DNA, 996 bp, Artificial Sequence
  derived and/or modified sequence
atggccctgagcagcgcctggaggtctgtgctgcccctgtggctgctgtggagcgctgcctgcagccgggccgccagcggagatgacaatgccttcccctttgacatcgagggcagcagcgctgtgggccggcaggaccccccagagaccagcgagccccgggtggccctgggccgcctgcccccagctgctgagaagtgcaatgccggcttcttccacaccctgagcggggagtgtgtgccctgtgactgcaatggaaacagcaatgaatgtctggatggcagcggctactgtgtgcactgccagaggaacaccaccggggagcactgtgagaagtgcctggatggctacatcggggacagcatccggggggccccccagttctgccagccctgcccctgccccctgccccacctggccaactttgctgagagctgctacaggaagaatggagctgtgcgctgcatctgcaatgaaaattatgccggccccaactgtgagcgctgtgcccctggctactacggcaaccccctgctgattggcagcacctgcaagaagtgtgactgcagcggcaacagcgaccccaacctgatctttgaggactgtgatgaggtgacaggccagtgcaggaactgcctgaggaacaccaccggcttcaagtgtgagcgctgtgcccctggctactatggagatgcccgcatcgccaagaactgtgctgtgtgcaactgtggcggcggcccctgtgacagcgtgactggagagtgcctggaggagggctttgagccccccaccggcatggactgccccaccatcagctgtgacaagtgtgtgtgggacctgacagatgccctgcggctggccgccctgagcattgaggagggcaagagcggcgtgctgtctgtgtcctctggagctgctgcccaccgccacgtgaatgagatcaatgccaccatctacctgctgaagaccaagctgtctgaaagagagaaccagtag

SEQ ID NO: 330384 - DNA, 975 bp, Artificial Sequence
  derived and/or modified sequence
atggccctgagcagcgcctggaggtctgtgctgcccctgtggctgctgtggagcgctgcctgcagccgggccgccagcggagatgacaatgccttcccctttgacatcgagggcagcagcgctgtgggccggcaggaccccccagagaccagcgagccccgggtggccctgggccgcctgcccccagctgctgagaagtgcaatgccggcttcttccacaccctgagcggggagtgtgtgccctgtgactgcaatggaaacagcaatgaatgtctggatggcagcggctactgtgtgcactgccagaggaacaccaccggggagcactgtgagaagtgcctggatggctacatcggggacagcatccggggggccccccagttctgccagccctgcccctgccccctgccccacctggccaactttgctgagagctgctacaggaagaatggagctgtgcgctgcatctgcaatgaaaattatgccggccccaactgtgagcgctgtgcccctggctactacggcaaccccctgctgattggcagcacctgcaagaagtgtgactgcagcggcaacagcgaccccaacctgatctttgaggactgtgatgaggtgacaggccagtgcaggaactgcctgaggaacaccaccggcttcaagtgtgagcgctgtgcccctggctactatggagatgcccgcatcgccaagaactgtgctgtgtgcaactgtggcggcggcccctgtgacagcgtgactggagagtgcctggaggagggctttgagccccccaccggctgtgacaagtgtgtgtgggacctgacagatgccctgcggctggccgccctgagcattgaggagggcaagtctggagtgctgtctgtgagcagcggggctgctgcccacagacatgtgaatgagatcaatgccaccatctacctgctgaagaagaccaagcagaagaacaacaagaagtag

SEQ ID NO: 330385 - DNA, 549 bp, Artificial Sequence
  derived and/or modified sequence
atggccctgagcagcgcctggcggagcgtgctgcccctgtggctgctctggtccgccgcttgcagtcgcgccgccagcggagatgacaacgcgttcccatttgatatagagggctcgtccgccgtaggacgacaggaccccccggagacctctgagccacgggtcgcactcggaaggctcccccctgcagcagagaagtgtaacgcggggttttttcacacactttctggagagtgcgtgccttgtgactgcaacgggaatagcaacgagtgcctggatggtagtgggtactgtgttcattgtcaacgcaacacgaccggggagcactgcgagaagtgtctagatggttacattggagacagcatcagaggggctcctcaattttgccagccctgcccttgtcctttgcctcatctggccaattttgcggaaagctgctacaggaagaacggtgccgtaagatgcatatgcaacgaaaactacgccggtcccaattgcgagagaccatctccccaatcaacaaggggctttcccctgaacgacagctag

SEQ ID NO: 330386 - DNA, 537 bp, Artificial Sequence
  derived and/or modified sequence
tgaatcttcgaggactgcgacgaggtgaccggccagtgccggaactgcctgcggaatacgaccggcttcaagtgtgaaaggtgtgctccaggttattacggcgatgccagaatagctaaaaattgcgccgtctgtaactgtggaggagggccttgcgatagcgtgactggcgagtgcctcgaggaaggattcgaaccccctacgggtatggattgtcccaccatcagttgcgataaatgcgtctgggacttgacagacgccctcagacttgcagccctgtccatcgaggaagggaagagcggcgtgctcagtgtaagctctggtgccgccgcccacaggcacgtaaacgagatcaatgccactatctatctcctaaaaacgaagttgagtgagagagagaaccaatatgctctccgaaagattcagattaataatgccgagaataccatgaaatcgctactgtcagacgttgaagagttggtggagaaacattggaataaaccacgccgtcgcctggaactccaggagggggtctag

SEQ ID NO: 330387 - DNA, 1125 bp, Artificial Sequence
  derived and/or modified sequence
atggccctgagcagcgcctggcggagcgtgctgcccctgtggctgctgtggtccgccgcctgtagtagagccgctagcggcgatgataatgccttcccgttcgacatcgaaggttcctccgccgtagggcgacaagacccacctgagacaagcgagcccagagtggcgctggggcgcttacccccagccgccgaaaaatgtaacgccgggttcttccataccttatccggggagtgcgtgccttgcgactgcaatggaaattcaaacgagtgcctggatgggtccggttactgtgtacactgtcagcggaatacaacaggggaacattgcgaaaagtgcctggatggatacattggtgactctataaggggcgcccctcagttctgtcagccatgtccatgtcccttgccacacctggccaacttcgctgaatcatgctataggaaaaatggcgcggtccgatgcatctgcaacgagaattacgccggccccaattgtgagcggtgcgccccaggatactacgggaatcctctgctcataggctcaacttgcaagaagtgcgactgttccggcaactctgatccaaatctgatctttgaggattgcgacgaggtgaccggccaatgtcgcaattgcctcagaaacaccacaggcttcaaatgcgagaggtgtgccccgggttattacggagacgcacggatcgccaaaaattgcgctgtgtgcaattgtgggggaggcccttgcgacagtgtgactggcgagtgcctggaggagggctttgagccccccacaggcatggactgtccgacgatatcctgcgataagtgcgtttgggacctcaccgatgcactccgcttagccgccttatcgatagaagaagggaagagcggagtgctatcagtaagctccggcgcagccgctcatcgccatgtcaatgagattaatgccaccatctacctgcttaaaactaaactgagtgaacgggagaatcaatacgcactccggaagatacagataaacaacgctgagaatacaatgaaaagtctattgtccgatgtagaggaactcgttgagaagcattggaacaaaccgcgcagaaggctggagttgcaggagggggtttag

SEQ ID NO: 330388 - DNA, 996 bp, Artificial Sequence
  derived and/or modified sequence
atggccctgagcagcgcctggcggagcgtgctgcccctgtggctgttgtggagcgcggcctgcagcagggctgctagcggcgacgacaatgcctttccatttgatatagaggggtccagcgctgtcggaaggcaagatcctcctgagacaagcgaaccccgggtggctctggggagactgccccccgccgcagagaaatgtaacgcaggtttcttccatactctgtcaggggaatgcgttccgtgcgactgcaatggcaattccaacgaatgtcttgatggatctgggtattgtgttcactgccaacggaacacgactggcgagcactgtgaaaagtgcctggacggctatattggtgatagcattcgtggcgcaccccagttttgccagccatgtccctgccctctgccgcatctggccaactttgctgagagttgttaccgcaagaacggagccgtgaggtgcatttgtaatgagaactatgccggccccaactgtgagcgctgcgctccaggttactatggaaaccccttactgatcgggtctacatgcaagaagtgcgactgctccggtaatagtgatcctaatttgatctttgaagactgcgatgaagtcacaggccagtgtagaaactgtttgcggaacactacagggtttaaatgtgagagatgcgcacccggctactacggagacgcccgtattgcaaagaactgtgccgtttgcaactgtgggggaggcccatgcgactcggtcactggagaatgcctggaggaagggttcgagccacctaccggaatggactgccctacaataagctgtgacaagtgtgtgtgggacctcaccgatgccctacggctcgcggcgctatcaattgaggaaggcaagtccggcgtcctcagcgtgtcatccggggccgccgcgcacagacacgtgaatgaaatcaacgccacaatctatctcttaaagacaaaactgagcgagagggagaatcagtag

SEQ ID NO: 330389 - DNA, 975 bp, Artificial Sequence
  derived and/or modified sequence
atggccctgagcagcgcctggcggagcgtgctgcccctgtggctgctctggtcggcggcctgcagtagggccgcctcaggcgacgataatgcctttccattcgatatagaggggagcagtgcagtcggtaggcaggatccaccagagacttctgagccacgggtggccctgggacgtctcccaccggccgccgaaaagtgcaacgccggttttttccacaccctgtcaggtgaatgtgtgccatgcgattgtaatggtaattcgaacgaatgcttggacgggagtggatattgcgttcactgccagcggaacaccaccggggagcactgtgagaagtgtctcgacggatatatcggggatagcattcgcggggctcctcaattttgccagccttgtccctgtccgctacctcaccttgctaacttcgctgagtcctgctataggaagaatggcgccgttcgatgtatctgtaatgaaaattacgcagggccaaactgcgagaggtgcgctcccggatactatgggaaccccctgctgattgggtccacttgcaagaaatgtgattgttcgggcaacagcgacccaaacctgattttcgaggactgcgacgaggttactgggcaatgtaggaactgtctgcggaataccacaggcttcaagtgtgaacggtgcgcccctggatactacggggacgccagaatcgctaagaattgtgctgtctgcaactgcgggggcggcccatgcgacagcgttaccggtgaatgtctggaagaggggttcgagccaccaactggatgcgataagtgtgtgtgggatttaactgacgccctgcgtctagcagctttgtctatcgaggaaggaaagtctggagtgctttccgtatcctccggcgccgctgcccacaggcatgtcaatgagatcaacgcgaccatttacttgctgaaaaaaaccaaacagaaaaataacaaaaagtag

SEQ ID NO: 330390 - DNA, 549 bp, Artificial Sequence
  derived and/or modified sequence
atggcgctatccagtgcgtggcggagcgttctgcctctctggctcctgtggtctgccgcttgtagtcgggctgcttctggtgacgacaatgcttttccttttgacatcgagggctcctccgccgtaggacgtcaggacccacccgaaaccagtgaaccccgagtcgcactcggacggctaccaccagccgctgagaaatgtaacgcaggttttttccataccctgagtggggaatgcgttccctgtgactgcaacggtaatagtaacgaatgcctggacggatctggttactgtgtacattgtcagaggaacacgacaggtgagcactgtgagaagtgcctcgacggctacataggtgatagcatccgcggagcgcctcagttctgccagccctgcccctgtccgctcccgcacctagcgaatttcgccgagagttgctatagaaaaaatggggcagtcaggtgtatatgtaatgagaattacgccggtcccaattgcgaacggccttccccacagagtaccagaggatttccactgaacgattcttag

SEQ ID NO: 330391 - DNA, 537 bp, Artificial Sequence
  derived and/or modified sequence
tagattttcgaagactgtgatgaagtcactggccagtgtcgtaactgcctacggaataccactgggtttaagtgtgaacgctgcgcccctggctactacggagacgcacgaatcgcgaaaaactgtgcggtatgtaactgcggtggagggccatgtgacagcgtgacaggagaatgtctcgaggaaggcttcgaaccaccaacaggaatggactgccctaccattagctgtgataaatgcgtgtgggacttaaccgacgccctgcggttggcggcactgtcaattgaagagggcaaatctggcgtgctcagcgtgagctctggagctgctgcccaccgtcacgtgaacgagattaatgctactatttacctcctgaagaccaagctctcagagagagagaatcaatatgctttacgcaaaatccagattaacaacgcggagaacaccatgaagagcctgctctctgacgttgaggagttagtggaaaagcattggaataaaccacggaggcgactggagctgcaggagggggtctag

SEQ ID NO: 330392 - DNA, 1125 bp, Artificial Sequence
  derived and/or modified sequence
atggctttgtcctccgcctggcgtagcgttctccctctttggcttctctggagtgcggcatgctctcgggcagccagtggcgatgacaatgccttccctttcgatatagaggggtctagcgccgtcggaagacaggatccgcctgagactagcgagcctcgagtggcgctcggcagattaccccctgcagcagaaaagtgtaacgccggtttcttccacaccctgagtggcgagtgcgtgccgtgtgactgtaatggaaactcgaatgagtgcctcgacggcagtggctattgcgtacactgccagcgcaacaccacaggcgaacactgcgaaaagtgtttagatggctatataggagactcgatccggggagctccgcaattttgtcagccttgcccatgcccactgccccacttggcaaacttcgcagaatcttgctatcggaagaatggagcggtgcgctgtatttgcaatgagaactacgctggaccaaactgcgagagatgcgcgcctggatactacgggaatccattactgattgggtctacatgtaagaagtgtgattgctcgggaaacagtgacccaaacctgatttttgaggattgcgatgaggtaaccgggcagtgtcgcaactgcttaagaaacactacgggattcaagtgcgagcgatgtgcccctggctactatggcgacgctaggatcgccaaaaattgcgctgtgtgtaactgcggcggaggtccttgtgacagcgtcaccggggagtgcttggaagagggatttgaaccaccgactgggatggactgcccgaccatcagctgcgacaagtgtgtttgggaccttaccgatgcactcaggctagccgcactgagcatcgaagaggggaagagcggcgtgctaagtgtttccagcggggcagctgcccaccgtcacgtgaatgagatcaatgccaccatttatctgcttaaaactaagttatctgaaagggagaatcagtatgcactccgcaaaatacagatcaataacgccgaaaacactatgaaatctcttttgagcgacgtagaagagctggtcgaaaagcattggaataagcccaggcgcagactcgaattgcaggagggggtttag

SEQ ID NO: 330393 - DNA, 996 bp, Artificial Sequence
  derived and/or modified sequence
atggccctgagcagcgcctggcgatccgtactgccattgtggcttctctggtctgcggcatgcagccgcgcagcttccggtgacgacaatgcatttcccttcgacatcgaaggctcaagcgcagtaggcagacaggacccccctgaaacttccgaacctcgtgtggccctggggaggctcccacctgccgcagagaaatgcaacgccggtttcttccacaccttgagtggcgagtgtgttccctgtgattgtaacgggaactcaaacgaatgtctagatgggtccggctactgcgtgcattgccagcggaacacgaccggagagcactgtgaaaagtgcctcgatgggtacattggcgatagtattaggggcgcaccccagttctgtcagccatgtccttgccccctcccccatctcgcaaattttgccgaatcatgctaccgtaagaacggcgcagtaaggtgcatctgcaacgagaactatgcaggccctaactgtgaaaggtgcgccccaggttattacggcaatccgctactcattggctcgacctgtaagaaatgcgactgcagcgggaattccgatccaaatctcatcttcgaagactgcgacgaggttactggacagtgcaggaattgcttgaggaataccaccggttttaagtgtgaacgatgtgcgcctgggtactacggagacgccagaattgccaaaaattgcgctgtgtgtaactgcggcggaggcccatgtgactccgtgaccggcgagtgcctcgaggagggctttgagcctcccaccggcatggactgtccaaccatctcatgcgacaaatgcgtgtgggatcttaccgatgctctgagactggcagctctatccattgaagaggggaagagcggtgttttgtccgtctcttccggcgcagcagcacatcgacatgttaatgaaataaacgcaactatatatcttctaaagactaaattgtccgagcgagagaatcagtag

SEQ ID NO: 330394 - DNA, 975 bp, Artificial Sequence
  derived and/or modified sequence
atggcactttctagcgcttggcggtcagtgttgcctctgtggctattatggagcgccgcatgctcccgggcagcctccggcgatgacaacgctttccctttcgacatcgaagggtcctccgctgtgggcaggcaggaccctcctgaaacttcggagccaagagtggcattggggaggcttccacctgcggcagagaaatgtaacgcaggattctttcacacgttgtctggggagtgtgtgccttgcgactgtaacggcaactcaaacgagtgtctagatggttcaggttactgtgtgcactgccaacgcaacacaactggggagcactgtgagaaatgtttagatggatacatcggcgactccattcgcggagcgccacagttttgccaaccgtgcccatgcccactcccccacctcgccaattttgctgaatcctgctatcgcaagaacggcgcagtacgctgcatctgcaatgagaactatgctggtccgaattgtgaacgctgcgctcctgggtactatggaaatcccctcttgataggctccacttgcaaaaagtgcgattgtagtggcaatagcgacccaaatctaatttttgaggactgcgacgaagtgaccggccagtgccgtaactgcctgagaaacaccactggcttcaagtgcgagagatgcgctcccggatattacggcgacgccaggattgctaagaattgtgcagtgtgcaattgcggcggtggtccttgcgactcagtcacgggggagtgcctggaagaaggattcgaacctccgacagggtgcgataaatgcgtatgggatctcacggatgcactccggctcgccgctctgagtattgaggaaggcaagtcaggcgtgttgtcggtttcttccggagccgctgcccatcggcatgtcaatgaaattaatgccacaatctatttgctgaaaaagacaaagcaaaagaataacaaaaaatag

SEQ ID NO: 330395 - DNA, 549 bp, Artificial Sequence
  derived and/or modified sequence
atggccttgtcctccgcctggagatccgtgctccctctctggctcctttggagtgctgcttgcagccgcgctgcgtctggagacgataacgcttttcccttcgacatagagggatcttctgctgtcgggcgacaagatcctcccgaaacatccgagcctcgcgtcgcactgggtcgtcttcctcctgccgccgagaaatgtaacgccggcttctttcacaccttgtccggggagtgtgtgccatgtgactgcaacgggaatagcaatgaatgcctagatggctcagggtattgtgttcattgccagcgaaataccaccggggaacattgcgagaagtgtcttgatgggtacatcggcgactcaattaggggcgctcctcagttctgtcaaccctgcccatgtccactccctcatctggcaaatttcgccgaatcttgctacaggaagaatggcgctgtcaggtgcatttgtaatgaaaattatgctggaccgaattgcgaaaggccctctccacagagcacgaggggctttcccttaaacgactcttag

SEQ ID NO: 330396 - DNA, 537 bp, Artificial Sequence
  derived and/or modified sequence
tgaattttcgaggattgtgacgaggtgacgggccagtgtagaaattgccttagaaatactacagggttcaagtgtgaacgatgcgcccccggctactacggagacgcgcgcatcgccaagaactgtgctgtgtgtaactgtggaggaggcccttgcgattcagtaaccggggagtgcctggaggaaggattcgaaccacctaccggcatggattgccctaccatttcttgcgataaatgtgtgtgggatttgacggatgcattacggttggccgccttaagcatagaggaggggaaatctggggtgctgagcgtttcctctggagctgccgcacaccggcacgtaaacgagatcaacgccacaatctatctactgaaaacaaaactgtccgagagggaaaatcagtacgccttgaggaagatccagatcaacaatgccgagaatactatgaagagcctactgagcgatgttgaagagttagtcgagaaacactggaacaaacctaggaggaggttggaactgcaggagggcgtgtag

SEQ ID NO: 330397 - DNA, 1125 bp, Artificial Sequence
  derived and/or modified sequence
atggcgctgtcaagtgcatggcggtcagtgctacccctgtggctgctatggtcagctgcctgtagcagagctgcttctggcgacgataatgccttcccctttgacatcgagggatcctccgccgtggggaggcaggacccaccagagacttctgaacctcgggtcgctctaggacggctgcccccagctgcagaaaaatgcaatgctggctttttccacacactttccggggagtgcgtgccctgtgattgtaacgggaattccaacgaatgccttgacggttctgggtactgtgttcattgtcagcggaatacaaccggtgagcactgcgaaaaatgtctggacggctacataggtgactctatcagaggtgcccctcagttttgtcaaccctgtccttgtccacttccccacctggccaactttgctgaaagctgttatagaaaaaatggggccgtaaggtgcatttgcaacgagaactacgcaggccccaactgcgaaaggtgtgcccccgggtattacggaaatccgctacttattggctcaacctgtaaaaagtgcgattgttctggcaactcagaccctaacctaatcttcgaggactgtgacgaggtgacagggcaatgtcggaattgtctccggaatactactggatttaagtgtgagaggtgcgcacctggttactatggggatgctagaatcgcaaagaactgtgccgtttgcaactgcggcggaggcccatgtgacagcgtgactggagaatgcctggaggaggggttcgagccaccgactggtatggattgtcctacaatttcttgtgataaatgtgtctgggatttgactgatgcattgaggctagccgccctgagcattgaagagggaaagtctggcgtcctgagtgttagttcaggggcggcagctcacagacatgtgaacgaaatcaacgcaaccatctacctgctgaagactaagctctccgagagagaaaaccagtacgcactcagaaagattcagataaacaatgcagagaacactatgaaaagtctcctgtctgacgttgaggaactcgttgagaaacattggaataagccgagacgccgcctggaacttcaggaaggcgtttag

SEQ ID NO: 330398 - DNA, 996 bp, Artificial Sequence
  derived and/or modified sequence
atggcccttagtagtgcttggcggtcagtactgcccctgtggctgttgtggtccgccgcatgctcacgtgctgcgagcggcgacgataatgcctttccctttgacattgaaggtagtagtgccgtcggaaggcaagatccacccgagacatctgagccaagagtagcactagggcgcctcccaccagcagctgaaaagtgtaacgcaggcttttttcacacattaagcggagaatgcgttccttgtgattgtaacggtaattcaaacgagtgtttagatggctcggggtactgcgttcactgtcaaaggaacactaccggcgaacattgcgaaaagtgtctggatggttatatcggcgattccattagaggggccccacagttttgccagccttgcccgtgtcctttaccccacctggctaattttgcagaaagttgctatagaaagaatggcgctgtgcgctgcatttgcaacgaaaactacgccggtcccaattgcgagaggtgcgctccgggctattatggcaatcccctcctgattggatctacttgtaaaaagtgcgactgcagtggcaattcagacccaaatctgatcttcgaggattgtgacgaggtgactggacagtgccgcaactgtctcagaaacacaacaggtttcaaatgtgaacggtgcgctccaggctattacggagacgcgagaatcgccaaaaattgtgctgtgtgcaattgtggaggcggcccatgtgattctgttaccggggaatgcctggaggaaggatttgaacctcccaccggcatggactgtcctacaatcagctgtgataaatgcgtatgggatctaactgacgctctgcggttagccgccctttctattgaagagggcaaatcaggagtgctgagtgtgtcttccggggctgccgcccaccgccatgttaatgaaatcaatgccaccatctacctcttgaaaaccaaattgagcgagcgcgaaaatcagtag

SEQ ID NO: 330399 - DNA, 975 bp, Artificial Sequence
  derived and/or modified sequence
atggccctatcgagtgcttggagatctgtgctgcccttatggctgctgtggtcagccgcctgcagtagggcagcatctggtgacgacaatgctttcccttttgacattgaaggatctagcgctgttggaagacaggacccaccggagacatctgaaccgagagtggcgctagggagactgccacccgccgccgaaaaatgcaatgccggattctttcataccctgtcaggagaatgtgtcccttgtgactgtaacgggaactctaacgagtgtttggacggttccggctactgtgtccactgccaacggaatactaccggagaacattgcgagaaatgtttggatggatatatcggcgatagtattcgcggcgccccacagttctgccagccgtgcccctgccctctgccgcatttggctaacttcgccgagtcatgttacaggaaaaacggagccgtacgctgcatatgcaatgaaaattacgctggccccaattgcgaacgttgcgctccaggctattatggcaatcctctcttgatcggctctacgtgtaagaagtgcgactgttcaggtaactccgatcctaacttgatctttgaagactgtgatgaagtgactggacagtgccgaaattgtctgagaaacacaaccgggttcaagtgtgagaggtgtgccccaggttactacggagacgctaggattgctaagaactgcgccgtttgtaactgcggcggggggccatgcgattccgttactggagaatgcctggaagagggctttgagcccccgaccggttgcgacaaatgcgtttgggacttaacagatgccctccgcctcgccgccctgtctatagaagaaggaaaatctggggtgttgagtgtctcaagcggcgcagcagctcatcgacatgttaacgagataaatgctactatatatctactcaaaaaaacgaaacagaagaataacaagaagtag

SEQ ID NO: 330400 - DNA, 549 bp, Artificial Sequence
  derived and/or modified sequence
atggccttgtcctccgcctggagatccgtgctccctctctggctcctttggagtgctgcttgcagccgcgctgcgtctggagacgataacgcttttcccttcgacatagagggatcttctgctgtcgggcgacaagatcctcccgaaacatccgagcctcgcgtcgcactgggtcgtcttcctcctgccgccgagaaatgtaacgccggcttctttcacaccttgtccggggagtgtgtgccatgtgactgcaacgggaatagcaatgaatgcctagatggctcagggtattgtgttcattgtcagcgtaataccaccggggagcattgcgaaaagtgcttggatggctatatcggagactctattagaggagctccccagttctgtcaaccttgtccatgccctcttccacatctggccaatttcgcggaatcgtgctaccgaaagaatggagctgtgaggtgtatctgtaatgagaactatgctggacctaactgcgagagacccagtccacagtctacacgaggattcccactgaatgattcatag

SEQ ID NO: 330401 - DNA, 537 bp, Artificial Sequence
  derived and/or modified sequence
tgaattttcgaggactgtgacgaagtaacgggccaatgccgtaactgcctacggaacactactggatttaaatgcgaaaggtgtgctcctggttattatggcgatgcgaggatcgctaagaactgcgcggtctgcaattgtggtggagggccttgcgatagcgttactggcgagtgtttggaagaaggcttcgaacctccgaccggcatggattgccctaccatttcctgcgacaaatgtgtgtgggaccttaccgatgcactgagactggcggcactatctattgaagaggggaaatcaggagttctctcggtgtcctccggggccgcggcgcacaggcatgtgaacgagatcaacgccactatctatctccttaagaccaaactcagcgaaagagagaaccagtacgcacttagaaaaattcagattaacaatgccgaaaacacaatgaaatccctgctgagtgacgtagaagaactcgttgaaaaacattggaacaagcctagacgcagattagaactgcaagaaggtgtttag

SEQ ID NO: 330402 - DNA, 1125 bp, Artificial Sequence
  derived and/or modified sequence
atggctctgagctctgcctggcgatctgtacttcccctgtggcttctctggtctgctgcctgttcacgcgctgcaagcggcgatgataacgcctttccctttgatattgaaggaagttctgccgttggtagacaggacccgcccgaaaccagtgaacctcgcgtggcgctgggccgactcccacctgcagctgagaaatgtaatgctggatttttccacacccttagcggtgaatgtgtcccgtgcgactgtaatggtaacagcaatgagtgtttagacggttctggctattgcgtgcattgccaaaggaatacgactggcgaacattgcgaaaaatgtctggacggatatataggagatagcattcgcggcgccccccagttctgccagccttgcccatgccctttaccccaccttgctaactttgctgagtcctgctaccggaaaaatggagctgtgagatgcatttgtaatgagaattacgcgggccccaactgcgagcggtgcgcaccaggttattatggtaatcccttactcattgggtctacatgcaagaaatgcgactgctcggggaactctgaccccaacttaatcttcgaggactgcgatgaagttaccggtcagtgtcgaaattgcctccgaaacactacaggcttcaaatgtgagcgatgcgcccctggatactatggagatgcacgaattgcgaagaactgcgccgtatgcaactgtggcggcgggccctgcgatagtgtcacaggcgagtgtcttgaagaggggtttgaacctcctaccggaatggattgtcccacaatctcttgcgacaaatgcgtctgggacctgaccgacgccttgcgactggccgctttatcaattgaagagggaaagagcggtgtactgagcgtgtcatccggagctgctgctcaccgccacgttaacgaaataaatgccactatctaccttcttaagactaaactatcagaacgagagaaccaatacgctctgagaaagatccagataaacaatgccgagaacaccatgaaaagtttgctgagtgatgtcgaggaacttgtcgagaaacactggaacaaacctagacggagactggagctccaggagggtgtctag

SEQ ID NO: 330403 - DNA, 996 bp, Artificial Sequence
  derived and/or modified sequence
atggcactgtcctccgcgtggcgctccgtcctcccattatggctactgtggtccgcagcgtgtagcagagcagcaagtggtgatgacaatgcttttccattcgatatcgaggggtcatctgcagtgggtcgacaggatcctccagaaacctctgaacctcgggtagcccttggccgcctgccccccgctgctgagaagtgtaacgccggcttcttccacaccctgagcggtgagtgcgttccttgtgattgtaatggtaactccaacgaatgcttggatgggagcgggtactgcgtgcactgtcaacgaaacacgacaggcgaacactgcgaaaagtgccttgatggatacattggagactcaatccggggcgcgccacagttctgtcagccctgtccctgtccgctgcctcatctggctaacttcgctgagtcatgctatcggaaaaatggcgccgtacgatgcatttgcaacgaaaactacgctggacctaattgtgagagatgtgcgcctggctactatggaaatcccttgctcattggctcaacctgtaagaaatgtgattgctctggtaactctgaccccaacctcatctttgaggactgtgacgaagtgacaggacaatgtagaaactgcctccgcaacacaactgggttcaaatgtgagcggtgtgctcctggctattacggcgacgcaagaatcgcaaaaaactgtgcagtatgtaattgtggaggagggccctgcgatagcgtgaccggcgaatgtttggaagaggggtttgaacctcctaccggtatggactgccctaccatatcatgtgataagtgcgtgtgggaccttaccgatgccctgagactggcagcactatccatcgaggaaggtaaaagcggcgtgctctcagtatcctccggtgccgcggcccacagacacgtcaacgaaattaacgcaaccatctatctcttgaagaccaaactcagcgagcgtgagaatcaatag

SEQ ID NO: 330404 - DNA, 975 bp, Artificial Sequence
  derived and/or modified sequence
atggcgctgagttcagcttggcgatccgtgctgccgttatggctactgtggtcagcagcatgcagtcgtgcagcgagtggggacgacaacgcatttccattcgacatagagggatcaagtgcagtaggcagacaggatccccccgagacctccgaaccacgggttgctcttggacgccttccccctgctgctgagaagtgcaatgccggtttttttcatacactgagcggagagtgtgtaccttgcgactgtaatggaaacagcaatgaatgccttgatggaagtggctattgtgtacactgccaacggaatactaccggagaacattgcgagaaatgtttggatggatatatcggcgatagtattcgcggcgccccacagttctgccagccgtgcccctgccctctgccgcatttggctaacttcgccgagtcatgttacaggaaaaacggagccgtacgctgcatatgcaatgaaaattacgctggccccaattgcgaacgttgcgctccaggctattatggcaatcctctcttgatcggctctacgtgtaagaagtgcgactgttcaggtaactccgatcctaacttgatctttgaagattgtgatgaggtgacaggccaatgccgtaactgtctaagaaacaccacaggctttaagtgcgaaagatgcgccccgggctattatggagatgctcgtattgctaagaactgtgccgtctgcaactgtggagggggaccatgtgattccgtgacaggcgagtgtcttgaggaagggtttgagccacctactggatgcgacaagtgcgtgtgggacctgaccgatgctctccggctggccgctctctcaattgaagaaggcaaatcaggggttctatcagtgagctccggcgcggctgcccaccgacacgtcaatgaaattaacgccacaatttatcttctcaaaaaaactaaacagaaaaacaacaagaagtag

SEQ ID NO: 330405 - DNA, 549 bp, Artificial Sequence
  derived and/or modified sequence
atggccctgagcagcgcctggagaagcgtgctgcccctgtggctgctgtggagcgccgcctgcagcagagccgccagcggcgacgacaacgccttccccttcgacatcgagggcagcagcgccgtgggcagacaggacccccccgagaccagcgagcccagagtggccctgggcagactgccccccgccgccgagaagtgcaacgccggcttcttccacaccctgagcggcgagtgcgtgccctgcgactgcaacggcaacagcaacgagtgcctggacggcagcggctactgcgtgcactgccagagaaacaccaccggcgagcactgcgagaagtgcctggacggctacatcggcgacagcatcagaggcgccccccagttctgccagccctgcccctgccccctgccccacctggccaacttcgccgagagctgctacagaaagaacggcgccgtgagatgcatctgcaacgagaactacgccggccccaactgcgagagacccagcccccagagcaccagaggcttccccctgaacgacagctag

SEQ ID NO: 330406 - DNA, 537 bp, Artificial Sequence
  derived and/or modified sequence
tgaatcttcgaggactgcgacgaggtgaccggccagtgcagaaactgcctgagaaacaccaccggcttcaagtgcgagagatgcgcccccggctactacggcgacgccagaatcgccaagaactgcgccgtgtgcaactgcggcggcggcccctgcgacagcgtgaccggcgagtgcctggaggagggcttcgagccccccaccggcatggactgccccaccatcagctgcgacaagtgcgtgtgggacctgaccgacgccctgagactggccgccctgagcatcgaggagggcaagagcggcgtgctgagcgtgagcagcggcgccgccgcccacagacacgtgaacgagatcaacgccaccatctacctgctgaagaccaagctgagcgagagagagaaccagtacgccctgagaaagatccagatcaacaacgccgagaacaccatgaagagcctgctgagcgacgtggaggagctggtggagaagcactggaacaagcccagaagaagactggagctgcaggagggcgtgtag

SEQ ID NO: 330407 - DNA, 1125 bp, Artificial Sequence
  derived and/or modified sequence
atggccctgagcagcgcctggagaagcgtgctgcccctgtggctgctgtggagcgccgcctgcagcagagccgccagcggcgacgacaacgccttccccttcgacatcgagggcagcagcgccgtgggcagacaggacccccccgagaccagcgagcccagagtggccctgggcagactgccccccgccgccgagaagtgcaacgccggcttcttccacaccctgagcggcgagtgcgtgccctgcgactgcaacggcaacagcaacgagtgcctggacggcagcggctactgcgtgcactgccagagaaacaccaccggcgagcactgcgagaagtgcctggacggctacatcggcgacagcatcagaggcgccccccagttctgccagccctgcccctgccccctgccccacctggccaacttcgccgagagctgctacagaaagaacggcgccgtgagatgcatctgcaacgagaactacgccggccccaactgcgagagatgcgcccccggctactacggcaaccccctgctgatcggcagcacctgcaagaagtgcgactgcagcggcaacagcgaccccaacctgatcttcgaggactgcgacgaggtgaccggccagtgcagaaactgcctgagaaacaccaccggcttcaagtgcgagagatgcgcccccggctactacggcgacgccagaatcgccaagaactgcgccgtgtgcaactgcggcggcggcccctgcgacagcgtgaccggcgagtgcctggaggagggcttcgagccccccaccggcatggactgccccaccatcagctgcgacaagtgcgtgtgggacctgaccgacgccctgagactggccgccctgagcatcgaggagggcaagagcggcgtgctgagcgtgagcagcggcgccgccgcccacagacacgtgaacgagatcaacgccaccatctacctgctgaagaccaagctgagcgagagagagaaccagtacgccctgagaaagatccagatcaacaacgccgagaacaccatgaagagcctgctgagcgacgtggaggagctggtggagaagcactggaacaagcccagaagaagactggagctgcaggagggcgtgtag

SEQ ID NO: 330408 - DNA, 996 bp, Artificial Sequence
  derived and/or modified sequence
atggccctgagcagcgcctggagaagcgtgctgcccctgtggctgctgtggagcgccgcctgcagcagagccgccagcggcgacgacaacgccttccccttcgacatcgagggcagcagcgccgtgggcagacaggacccccccgagaccagcgagcccagagtggccctgggcagactgccccccgccgccgagaagtgcaacgccggcttcttccacaccctgagcggcgagtgcgtgccctgcgactgcaacggcaacagcaacgagtgcctggacggcagcggctactgcgtgcactgccagagaaacaccaccggcgagcactgcgagaagtgcctggacggctacatcggcgacagcatcagaggcgccccccagttctgccagccctgcccctgccccctgccccacctggccaacttcgccgagagctgctacagaaagaacggcgccgtgagatgcatctgcaacgagaactacgccggccccaactgcgagagatgcgcccccggctactacggcaaccccctgctgatcggcagcacctgcaagaagtgcgactgcagcggcaacagcgaccccaacctgatcttcgaggactgcgacgaggtgaccggccagtgcagaaactgcctgagaaacaccaccggcttcaagtgcgagagatgcgcccccggctactacggcgacgccagaatcgccaagaactgcgccgtgtgcaactgcggcggcggcccctgcgacagcgtgaccggcgagtgcctggaggagggcttcgagccccccaccggcatggactgccccaccatcagctgcgacaagtgcgtgtgggacctgaccgacgccctgagactggccgccctgagcatcgaggagggcaagagcggcgtgctgagcgtgagcagcggcgccgccgcccacagacacgtgaacgagatcaacgccaccatctacctgctgaagaccaagctgagcgagagagagaaccagtag

SEQ ID NO: 330409 - DNA, 975 bp, Artificial Sequence
  derived and/or modified sequence
atggccctgagcagcgcctggagaagcgtgctgcccctgtggctgctgtggagcgccgcctgcagcagagccgccagcggcgacgacaacgccttccccttcgacatcgagggcagcagcgccgtgggcagacaggacccccccgagaccagcgagcccagagtggccctgggcagactgccccccgccgccgagaagtgcaacgccggcttcttccacaccctgagcggcgagtgcgtgccctgcgactgcaacggcaacagcaacgagtgcctggacggcagcggctactgcgtgcactgccagagaaacaccaccggcgagcactgcgagaagtgcctggacggctacatcggcgacagcatcagaggcgccccccagttctgccagccctgcccctgccccctgccccacctggccaacttcgccgagagctgctacagaaagaacggcgccgtgagatgcatctgcaacgagaactacgccggccccaactgcgagagatgcgcccccggctactacggcaaccccctgctgatcggcagcacctgcaagaagtgcgactgcagcggcaacagcgaccccaacctgatcttcgaggactgcgacgaggtgaccggccagtgcagaaactgcctgagaaacaccaccggcttcaagtgcgagagatgcgcccccggctactacggcgacgccagaatcgccaagaactgcgccgtgtgcaactgcggcggcggcccctgcgacagcgtgaccggcgagtgcctggaggagggcttcgagccccccaccggctgcgacaagtgcgtgtgggacctgaccgacgccctgagactggccgccctgagcatcgaggagggcaagagcggcgtgctgagcgtgagcagcggcgccgccgcccacagacacgtgaacgagatcaacgccaccatctacctgctgaagaagaccaagcagaagaacaacaagaagtag

SEQ ID NO: 330410 - protein, 367 aa, Artificial Sequence
  derived and/or modified sequence
MPVGGLLPLFSSPAGGVLGGGLGGGGGRKGSGPAALRLTEKFVLLLVFSAFITLCFGAIFFLPDSSKLLSGVLFHSSPALQPAADHKPGPGARAEDAAEGRARRREEGAPGDPEAALEDNLARIRENHERALREAKETLQKLPEEIQRDILLEKKKVAQDQLRDKAPFRGLPPVDFVPPIGVESREPADAAIREKRAKIKEEIEARKGQANCPGSSSSCEVEIQMMKHAWNNYKGYAWGLNELKPISKGGHSSSLFGNIKGATIVDALDTLFIMEMKHEFEEAKSWVEENLDFNVNAEISVFEVNIRFVGGLLSAYYLSGEEIFRKKAVELGVKLLPAFHTPSGIPWALLNMKRWMCNIPRAMEATI

SEQ ID NO: 330411 - DNA, 1104 bp, Artificial Sequence
  derived and/or modified sequence
atgcctgtgggaggtctgctgcctctgtttagttctcccgcgggtggagtattgggcggtgggctgggagggggcgggggaaggaaaggtagtggcccagcggcattgcgcctgactgaaaagttcgtgctcttgctggtgttctccgcgtttattacactctgttttggcgcaatcttctttttgcccgacagcagtaaattactgtcaggcgtgctgttccacagtagtcctgcactccagccggctgccgaccacaagcccggccctggggcccgcgcggaggacgctgcggaggggcgggctaggagaagggaagagggagcccccggtgaccccgaagccgccttggaggacaacttagcccgcattagggagaaccacgagcgcgcacttagagaggcgaaggagactctccagaaacttcccgaggaaattcagcgggacatcctgttggagaaaaagaaggtggcccaggatcaactccgtgataaagctccattcagagggctcccacccgtagatttcgttccccccatcggcgtcgaatcgcgcgagcccgccgacgccgcgatccgggaaaaacgagccaaaatcaaagaagaaattgaggctagaaagggacaggccaactgtcctggatccagctcatcttgcgaggttgaaatccagatgatgaagcacgcatggaacaactataaagggtatgcctggggcctgaatgaattaaagccaatctctaaaggcggacatagcagtagcctgttcgggaacatcaaaggagctacaatcgtcgacgcactggatacactgttcatcatggagatgaagcacgagttcgaggaggcaaagtcatgggtggaagaaaaccttgattttaatgttaacgcggagatatctgtatttgaggttaacatacggtttgtgggaggtctgctcagcgcctattaccttagcggggaagagatctttaggaagaaagcggtcgaattgggggtgaaactcctgcccgcattccatacgccaagcggcatcccttgggcccttctgaacatgaagcgttggatgtgcaacattccccgggccatggaagccaccatctag

SEQ ID NO: 330412 - DNA, 1104 bp, Artificial Sequence
  derived and/or modified sequence
atgcctgtgggcggcctgctgcccctcttcagcagccctgctgggggcgtgctgggcggcggcctgggcggcggcggcggcaggaaaggaagtggccctgctgccctgcggctgacagagaagtttgtgctgctgctggtgttttctgccttcatcaccctgtgcttcggggccatcttcttcctgcctgacagcagcaagctgctgagcggcgtgctcttccacagcagccctgccctgcagcctgctgctgaccacaagccaggccctggggcccgggcagaagatgctgctgagggccgggcccggcggcgggaggagggcgcccctggggaccctgaggccgccctggaggacaacctggcccgcatccgggagaaccacgagcgggccctgcgggaggccaaggagaccctgcagaagctgcctgaggagatccagagggacatcctgctggagaagaagaaggtggcccaggaccagctgcgggacaaggcccccttccggggcctgccccctgtggactttgtgccccccatcggcgtggagagccgggagccagcagatgctgccatccgggagaagagggccaagatcaaggaggagattgaggccaggaagggccaggccaactgccccggcagcagcagcagctgtgaggtggagatccagatgatgaagcacgcctggaacaactacaagggctacgcctggggcctgaatgagctgaagcccatcagcaagggcggccacagcagcagcctgtttggaaacatcaagggggccaccatcgtggatgccctggacaccctcttcatcatggagatgaagcatgaatttgaggaggccaagtcctgggtggaggagaacctggacttcaacgtgaatgctgagatctctgtgtttgaggtgaacatccgctttgtgggcggcctgctgagcgcctactacctgtctggagaggagatcttcaggaagaaggctgtggagctgggcgtgaagctgctgcctgccttccacaccccatctggcatcccctgggccctgctgaacatgaagcgctggatgtgcaacatcccccgggccatggaggccaccatctag

SEQ ID NO: 330413 - DNA, 1909 bp, Artificial Sequence
  derived and/or modified sequence
gtaccgtgctgctctactcgctgccattcgcccgcaggtcggcgcgctcgcccacctgagccgcgccggggctgcgggaccgtgggacagcgcgctcagcccagcctaggaaagaggcagcagtctcagcgcggagatggggagcgggcgaagttgacgagtctcccgcccacgctgcgcccctcctgcccagaggggctgcagccagcggtctgtcgcgcgtgcctgtgtgcccgaggagccgccccggggagaagacccggcgcggagttgttcccccagggaggatccgcagcccagccgagggggtcgggcggcctggctacgcaggacccagccccgcagccgcggactcccagcggcggcgaagtttggctgctgagcggcgcggcgccggaccactggacagcgggagcgatgcccgtggggggcctgttgccgctcttcagcagccccgcgggcggcgtcctgggcggggggctcggcggcggcggtggcaggaaggggtcgggccccgccgccctccgcctgacggagaagttcgtgctgctgctggtattcagcgccttcatcacgctctgcttcggggcgatcttcttcctgccagactcctccaagctgctcagcggggtcctgttccactccagccccgccttgcagccggccgccgaccacaagcccgggcccggggcgcgcgccgaggacgcggccgaggggcgagcccggcgccgcgaggagggggcacccggggacccggaggccgccctggaggacaacttggccaggatccgcgaaaaccacgagcgggctctcagggaagccaaggagaccctgcagaagctgcccgaggagatccaaagagacatcctactggagaagaagaaggtggcccaggaccagctgcgtgacaaggcgccgttcagaggcctgcccccggtggacttcgtgcccccaatcggggtggagagccgggagcccgccgacgccgccatccgcgagaaaagggcaaagatcaaagaggaaattgaagccaggaaggggcaagcaaattgcccagggtcgagcagctcctgcgaggttgaaatccagatgatgaaacatgcttggaataattataaaggttatgcctggggattaaatgaactcaaacctatatcaaaaggaggccattcaagcagtttgtttggtaacatcaaaggagcaactatagtagatgccctggatacactttttattatggaaatgaaacatgaatttgaagaagcaaaatcatgggttgaagaaaatttagattttaatgtgaatgctgaaatttctgtctttgaagtaaatatacgctttgttggtggactactctcagcctactatctgtctggagaagagatttttcgaaagaaagcagtggaacttggggtaaaattgctacctgcatttcatactccctctggaataccttgggcattgctgaatatgaaaaggtggatgtgcaatatcccaagggctatggaggctaccatatgaggtgggatatcattggcccacactggaaagagaaatagctctgataaagtcatcatctcctcttaccctgatattgccttatgtcgcagctttgtttttaatatttctccagaccacagaaatttgtagttttgctaaataggcttattgacgttagtcagtgatggagtgattggaataaaacagtgatatgtcatgacaactagttaatgaccaattaccatgtgcatttgccatatgttagtaaactttgaaagtagctattcatcctatttggatgattggaaattcttttttataagccaactatgaaaataaaacctgactcacattcccagagcctaataaatttagggcattttgtaaaataaatgaatatatcattttc

SEQ ID NO: 330414 - DNA, 1104 bp, Artificial Sequence
  derived and/or modified sequence
atgcccgtgggcggcctgctgcccctgttcagcagccccgccggcggcgtcttgggcggaggcttaggcggcggaggtggtagaaaaggtagtggccctgcggcgttacgcctgaccgagaaattcgtgctcctgcttgtgttttcagctttcattactctttgttttggggctatctttttcctccccgactcttccaagctgttgtccggggtgctctttcactcaagtcctgcgctgcagcctgcggcagaccacaagcccggccccggcgcacgagccgaagatgccgcggaggggcgcgctaggaggagggaggagggtgcacccggtgaccccgaggcagctttggaggataacctggctagaattagagagaatcacgagcgagccctgagggaggccaaggagactctgcagaagctgcccgaggagattcaaagagacatcttgctggaaaagaagaaagtagcccaagatcagttacgcgacaaagctccttttcgggggctgccccctgtcgactttgttccgcccataggggtcgagagccgtgagccagccgacgctgccattcgtgagaaaagagccaaaataaaggaggagatagaggcaagaaaggggcaggccaactgtcccggcagctccagctcttgtgaggtcgagattcagatgatgaaacacgcctggaacaattataaaggctacgcatggggcctgaacgagttgaagccgatttcaaaaggggggcattcttcttccctattcggaaatatcaaaggggctacgattgtcgatgccctcgatacccttttcataatggagatgaagcatgaatttgaggaggctaaatcgtgggtggaagagaatctagacttcaatgttaatgcagagatttccgtgtttgaggttaatatacgttttgtcggaggcctattgtcggcctattacctatccggagaagaaatcttcagaaaaaaggctgtggaactgggcgtgaagttgctccctgcgtttcacactccaagcggtattccttgggctctgctcaacatgaagcgctggatgtgcaacattccacgagccatggaagccacaatttag

SEQ ID NO: 330415 - DNA, 1104 bp, Artificial Sequence
  derived and/or modified sequence
atgcccgtcggaggcctactgccccttttcagcagccctgccggaggcgtgcttgggggagggctgggtgggggtggcggtagaaagggctcagggcctgcagctctgaggctgacagagaaatttgtgctcttgctcgtctttagcgctttcattactttgtgcttcggggctatcttcttcctgcctgatagttctaaactcctgagcggggtacttttccactcatctcccgcactgcagccggctgccgatcacaaacccggtcccggagctagggccgaagacgcagcagaaggtcgtgcccgtcggagagaggagggggcacccggagatccggaagccgctttggaggataatcttgctcgcatccgagagaaccatgagagggctttaagggaggctaaagagacgctgcaaaagttgcccgaggaaattcaacgtgatattctcctggaaaagaagaaggttgcccaggaccagctgagagataaggctccgttcagaggcttgcctccagtcgactttgtgccccctatcggtgttgaaagcagagagccagctgacgctgccatccgggaaaaacgcgcaaaaattaaggaggagatcgaagccagaaaaggacaggcaaattgccccggtagttctagttcctgtgaggtcgagatacagatgatgaagcatgcttggaataattacaaggggtatgcgtggggcctgaatgaactcaaaccaatttctaagggcggacactcttcaagtcttttcggaaatataaaaggggctaccatcgtggacgcactcgataccctctttatcatggagatgaagcacgaatttgaggaagcaaaatcctgggtcgaggagaatctcgattttaacgtcaatgccgaaatcagcgtttttgaggtgaacataagattcgttgggggactgctttcagcttactacttgtctggagaggagattttcaggaagaaggccgtggagctcggtgtcaagctactgcctgcctttcataccccttctgggatcccctgggctttgctcaacatgaaacggtggatgtgcaacatccctcgagctatggaggccacaatttag

SEQ ID NO: 330416 - DNA, 1104 bp, Artificial Sequence
  derived and/or modified sequence
atgcccgtgggcggcctgctgcccctgttcagcagccccgccggcggcgtgctgggcggcggcctgggcggcggcggcggcagaaagggcagcggccccgccgccctgagactgaccgagaagttcgtgctgctgctggtgttcagcgccttcatcaccctgtgcttcggcgccatcttcttcctgcccgacagcagcaagctgctgagcggcgtgctgttccacagcagccccgccctgcagcccgccgccgaccacaagcccggccccggcgccagagccgaggacgccgccgagggcagagccagaagaagagaggagggcgcccccggcgaccccgaggccgccctggaggacaacctggccagaatcagagagaaccacgagagagccctgagagaggccaaggagaccctgcagaagctgcccgaggagatccagagagacatcctgctggagaagaagaaggtggcccaggaccagctgagagacaaggcccccttcagaggcctgccccccgtggacttcgtgccccccatcggcgtggagagcagagagcccgccgacgccgccatcagagagaagagagccaagatcaaggaggagatcgaggccagaaagggccaggccaactgccccggcagcagcagcagctgcgaggtggagatccagatgatgaagcacgcctggaacaactacaagggctacgcctggggcctgaacgagctgaagcccatcagcaagggcggccacagcagcagcctgttcggcaacatcaagggcgccaccatcgtggacgccctggacaccctgttcatcatggagatgaagcacgagttcgaggaggccaagagctgggtggaggagaacctggacttcaacgtgaacgccgagatcagcgtgttcgaggtgaacatcagattcgtgggcggcctgctgagcgcctactacctgagcggcgaggagatcttcagaaagaaggccgtggagctgggcgtgaagctgctgcccgccttccacacccccagcggcatcccctgggccctgctgaacatgaagagatggatgtgcaacatccccagagccatggaggccaccatctag

SEQ ID NO: 330417 - protein, 232 aa, Artificial Sequence
  derived and/or modified sequence
VKGRASLTQEKEKFAHEHEEMKNLEAIVQEIKPTALIGVAAIGGAFSEQILKDMAAFNERPIIFALSNPTSKAECSAEQCYKITKGRAIFASGSPFDPVTLPNGQTLYPGQGNNSYVFPGVALGVVACGLRQITDNIFLTTAEVIAQQVSDKHLEEGRLYPPLNTIRDVSLKIAEKIVKDAYQEKTATVYPEPQNKEAFVRSQMYSTDYDQILPDCYSWPEEVQKIQTKVDQ

SEQ ID NO: 330418 - protein, 497 aa, Artificial Sequence
  derived and/or modified sequence
MDLQDRNEKLFYRVLTSDIEKFMPIVYTPTVGLACQQYSLVFRKPRGLFITIHDRGHIASVLNAWPEDVIKAIVVTDGERILGLGDLGCNGMGIPVGKLALYTACGGMNPQECLPVILDVGTENEELLKDPLYIGLRQRRVRGSEYDDFLDEFMEAVSSKYGMNCLIQFEDFANVNAFRLLNKYRNQYCTFNDDIQGTASVAVAGLLAALRITKNKLSDQTILFQGAGEAALGIAHLIVMALEKEGLPKEKAIKKIWLVDSKGLIVKGRASLTQEKEKFAHEHEEMKNLEAIVQEIKPTALIGVAAIGGAFSEQILKDMAAFNERPIIFALSNPTSKAECSAEQCYKITKGRAIFASGSPFDPVTLPNGQTLYPGQGNNSYVFPGVALGVVACGLRQITDNIFLTTAEVIAQQVSDKHLEEGRLYPPLNTIRDVSLKIAEKIVKDAYQEKTATVYPEPQNKEAFVRSQMYSTDYDQILPDCYSWPEEVQKIQTKVDQ

SEQ ID NO: 330419 - DNA, 699 bp, Artificial Sequence
  derived and/or modified sequence
gtcaaggggagagcgagcctgacacaagaaaaagagaagttcgcccatgagcacgaggagatgaagaacctggaggctattgtccaggagattaagcctaccgcactgattggggtagcagccatcggtggggctttttcagagcaaattctgaaggacatggccgcctttaacgagcgacctatcatttttgctctgtctaatcccactagcaaagctgagtgctccgctgaacagtgttacaaaatcaccaaaggccgcgccatctttgccagcggatctccgtttgatccagtgaccctgcccaatgggcagaccttgtaccccggacaagggaacaactcctacgtgtttccaggggttgcactcggcgtggtggcttgcggccttagacagattaccgacaatatttttctgactactgcggaggtaattgctcagcaggtgagcgataaacacctggaagaaggccgactctaccctcctttgaatacaatccgggatgtgtcactaaagattgccgagaaaattgtcaaggacgcttaccaggagaagacagctaccgtgtaccccgaacctcagaataaagaggccttcgtccgctctcaaatgtatagcaccgattacgatcaaatcctgcccgactgttactcttggcctgaagaggtacagaagatccagaccaaggtggaccagtag

SEQ ID NO: 330420 - DNA, 1221 bp, Artificial Sequence
  derived and/or modified sequence
atgggcataccagtgggtaagttagcactctacacagcatgtggtggaatgaatccacaggagtgcttacccgtcattctggacgtgggaacggagaacgaggagctcctgaaagatcccctgtacataggtctcagacagagacgcgttagaggctctgagtacgacgacttcctggacgagttcatggaggctgtgtcctccaagtacgggatgaactgtctgatacagtttgaggactttgcaaacgtcaatgcattccggctgctgaataagtaccgcaaccagtattgtacattcaacgacgacatacaggggaccgccagtgtcgcagtggctggtcttctggccgccttaaggattactaagaacaaactttctgaccagacgattttatttcagggtgcaggcgaggccgcgctgggcatcgcacacttaatcgtaatggccttagagaaagagggtttaccaaaagaaaaggctatcaaaaaaatctggctggtcgattcaaaaggactgatagtcaaggggcgcgccagcctgacccaggaaaaagagaaattcgctcacgaacacgaggaaatgaaaaatctggaggcaatagtgcaggagataaagcctactgccttaatcggggtcgccgccattggaggcgctttctctgagcagatcctgaaagatatggcggccttcaacgagcggccaatcatcttcgcgctgtccaatcccacttccaaagcagaatgctctgcagagcagtgttacaaaatcactaagggacgggcgatttttgccagcgggagcccctttgatccagtgactcttccaaacggtcaaacgctgtacccaggtcaggggaacaattcatatgtgttcccaggcgtcgctttgggggttgttgcttgcggtcttagacagatcacggataatatcttcctgacgaccgctgaggtcatcgcgcaacaggtgtcagacaaacacctagaggagggccgactgtatcctcccttgaataccatcagggatgtaagcctcaagatcgcggagaaaattgtgaaagatgcctaccaggagaaaacggctacagtataccccgaaccacagaataaggaagcatttgtgcgcagtcagatgtacagcactgactatgaccagattttgcctgattgctacagttggccagaggaagtgcaaaagatccagactaaggtggatcaatag

SEQ ID NO: 330421 - DNA, 1494 bp, Artificial Sequence
  derived and/or modified sequence
atggatctccaggatcggaacgaaaagctgttctaccgagtcttaaccagtgatatcgaaaaatttatgcctatcgtgtatacaccgaccgtgggcctggcatgccaacaatacagtttagtcttcaggaagccgagagggctcttcatcaccatccatgataggggccacatcgcttccgttctgaacgcatggccagaggatgttatcaaggccatcgtggttacagacggtgaaagaatcttggggttaggcgatcttggatgcaatggtatggggatacccgtgggcaaactggcactgtatacagcatgcggtggcatgaaccctcaggagtgcctcccggtgatattagacgttgggactgagaatgaggagctgttaaaggatccgctctacattggcctgcgtcagcgtagggtcagagggtcggagtatgacgacttcctggatgaattcatggaggccgtttccagcaagtacggtatgaattgtttgatccagtttgaagacttcgcaaatgtgaacgctttccgactgcttaataagtatagaaaccagtactgcaccttcaacgatgacatccaaggcactgcctccgtcgcagttgcagggctgcttgccgctctccgcatcaccaaaaataagctgtctgaccagactattttgtttcagggcgcgggggaggcagccttagggatcgcacacttgatcgtgatggctttagaaaaggaaggcttgccgaaggaaaaagccataaaaaagatttggttggtggactctaaggggctgattgtcaaggggagggccagtctcacccaggaaaaggagaagtttgcgcatgagcacgaagagatgaagaacctagaggctatcgttcaggagataaaacccactgcactcatcggtgtggccgccatcggcggagctttttctgaacagatcctgaaggatatggccgcattcaatgagaggcctatcatctttgcactgtccaaccctactagcaaagccgagtgctccgcagagcagtgctacaagattaccaaaggacgggctatcttcgcatctggtagcccatttgaccccgtgactctgcccaatggacaaacactgtacccaggccaagggaacaacagctatgtgtttccaggggttgctctgggtgtagtcgcatgcggcttacgtcaaatcaccgataacatttttctgaccacagcggaggtcatcgctcaacaggtttcagataagcatctagaggagggccgtctgtaccctcccctaaacaccattagagacgtgtccctaaaaattgccgaaaaaatcgtcaaggacgcttaccaggagaaaacagccacagtatacccagaacctcagaacaaagaagccttcgtaaggtcgcagatgtactccactgactacgatcagattctgcccgactgctacagctggcctgaagaagtgcagaagatccagaccaaggttgaccagtag

SEQ ID NO: 330422 - DNA, 699 bp, Artificial Sequence
  derived and/or modified sequence
gtgaagggccgggccagcctgacccaggagaaggagaagtttgcccacgagcacgaggagatgaagaacctggaggccatcgtgcaggagatcaagcccacagccctgattggagtggccgccatcggcggggccttcagcgagcagatcctgaaggacatggccgccttcaatgaaagacccatcatctttgccctgagcaaccccaccagcaaggccgagtgcagcgctgagcagtgctacaagatcaccaagggccgggccatctttgccagcggcagcccctttgatcctgtgaccctgcccaacggccagaccctgtacccaggccagggcaacaacagctatgtgtttcctggggtggccctgggcgtggtggcctgtggcctgcggcagatcacagacaacatcttcctgaccacagctgaggtgattgcccagcaggtgtctgacaagcacctggaggagggccgcctgtacccacccctgaacaccatcagagatgtgtccctgaagattgctgagaagatcgtgaaggatgcctaccaggagaagacagccaccgtgtacccagagccccagaacaaggaggcctttgtgcgcagccagatgtacagcacagattatgaccagatcctgcctgactgctacagctggccagaggaggtgcagaagatccagaccaaggtggaccagtag

SEQ ID NO: 330423 - DNA, 1221 bp, Artificial Sequence
  derived and/or modified sequence
atgggcatccctgtgggcaagctggccctgtacacagcctgtggcggcatgaacccccaggagtgcctgcccgtcatcctggatgtgggcacagaaaatgaggagctgctgaaggaccccctgtacatcggcctgcggcagaggagagtgcggggctctgaatatgatgacttcctggatgagttcatggaggccgtgagcagcaaatatggcatgaactgcctgatccagtttgaagattttgccaacgtgaatgccttccggctgctgaacaagtacagaaaccagtactgcaccttcaatgatgacatccagggcacagcctctgtggccgtggccggcctgctggccgccctgcgcatcaccaagaacaagctgagtgaccagaccatcctcttccagggcgctggggaggccgccctgggcatcgcccacctgattgtgatggccctggagaaggagggcctgcccaaggagaaggccatcaagaagatctggctggtggacagcaagggcctcatcgtgaagggccgggccagcctgacccaggagaaggagaagtttgcccacgagcacgaggagatgaagaacctggaggccatcgtgcaggagatcaagcccacagccctgattggagtggccgccatcggcggggccttcagcgagcagatcctgaaggacatggccgccttcaatgaaagacccatcatctttgccctgagcaaccccaccagcaaggccgagtgcagcgctgagcagtgctacaagatcaccaagggccgggccatctttgccagcggcagcccctttgatcctgtgaccctgcccaacggccagaccctgtacccaggccagggcaacaacagctatgtgtttcctggggtggccctgggcgtggtggcctgtggcctgcggcagatcacagacaacatcttcctgaccacagctgaggtgattgcccagcaggtgtctgacaagcacctggaggagggccgcctgtacccacccctgaacaccatcagagatgtgtccctgaagattgctgagaagatcgtgaaggatgcctaccaggagaagacagccaccgtgtacccagagccccagaacaaggaggcctttgtgcgcagccagatgtacagcacagattatgaccagatcctgcctgactgctacagctggccagaggaggtgcagaagatccagaccaaggtggaccagtag

SEQ ID NO: 330424 - DNA, 1494 bp, Artificial Sequence
  derived and/or modified sequence
atggacctgcaggacagaaatgagaagctgttctacagagtgctgaccagtgacatcgagaagttcatgcccatcgtgtacacccccaccgtgggcctggcctgccagcagtacagcctggtgttcaggaagccccggggcctcttcatcaccatccatgaccggggccacatcgcctctgtgctgaatgcctggccagaagatgtgatcaaggccatcgtggtgacagatggagagcgcatcctgggcctgggggacctgggctgcaatggcatgggcatccctgtgggcaagctggccctgtacacagcctgtggcggcatgaacccccaggagtgcctgcctgtgatcctggatgtgggcacagaaaatgaggagctgctgaaggaccccctgtacatcggcctgcggcagaggagagtgcggggctctgaatatgatgacttcctggatgagttcatggaggccgtgagcagcaaatatggcatgaactgcctgatccagtttgaggactttgccaacgtgaatgccttccggctgctgaacaagtacagaaaccagtactgcaccttcaatgatgacatccagggcacagcctctgtggccgtggccggcctgctggccgccctgcgcatcaccaagaacaagctgagtgaccagaccatcctcttccagggcgctggggaggccgccctgggcatcgcccacctgattgtgatggccctggagaaggagggcctgcccaaggagaaggccatcaagaagatctggctggtggacagcaagggcctgattgtgaagggccgggccagcctgacccaggagaaggagaagtttgcccatgaacatgaggagatgaagaacctggaggccatcgtgcaggagatcaagcccacagccctgattggagtggccgccatcggcggggccttcagcgagcagatcctgaaggacatggccgccttcaatgaaagacccatcatctttgccctgagcaaccccaccagcaaggcagaatgttctgctgagcagtgctacaagatcaccaagggccgggccatctttgccagcggcagcccctttgatcctgtgaccctgcccaacggccagaccctgtacccaggccagggcaacaacagctatgtgtttcctggggtggccctgggcgtggtggcctgtggcctgcggcagatcacagacaacatcttcctgaccacagctgaggtgattgcccagcaggtgtctgacaagcacctggaggagggccgcctgtacccacccctgaacaccatcagagatgtgtccctgaagattgctgagaagatcgtgaaggatgcctaccaggagaagacagccaccgtgtacccagagccccagaacaaggaggcctttgtgcgcagccagatgtacagcacagattatgaccagatcctgcctgactgctacagctggccagaggaggtgcagaagatccagaccaaggtggaccagtag

SEQ ID NO: 330425 - DNA, 2234 bp, Artificial Sequence
  derived and/or modified sequence
gtaaaaggacgtgcttccttaacacaagagaaagagaagtttgcccatgaacatgaagaaatgaagaacctagaagccattgttcaagaaataaaaccaactgccctcataggagttgctgcaattggtggtgcattctcagaacaaattctcaaagatatggctgccttcaatgaacggcctattatttttgctttgagtaatccaactagcaaagcagaatgttctgcagagcagtgctacaaaataaccaagggacgtgcaatttttgccagtggcagtccttttgatccagtcactcttccaaatggacagaccctatatcctggccaaggcaacaattcctatgtgttccctggagttgctcttggtgttgtggcgtgtggattgaggcagatcacagataatattttcctcactactgctgaggttatagctcagcaagtgtcagataaacacttggaagagggtcggctttatcctcctttgaataccattagagatgtttctctgaaaattgcagaaaagattgtgaaagatgcataccaagaaaagacagccacagtttatcctgaaccgcaaaacaaagaagcatttgtccgctcccagatgtatagtactgattatgaccagattctacctgattgttattcttggcctgaagaggtgcagaaaatacagaccaaagttgaccagtaggataatagcaaacatttctaactctattaatgaggtctttaaacctttcataatttttaaaggttggaatcttttataatgattcataagacacttagattaagattttactttaacagtctaaaaattgatagaagaatatcgatataaattgggataaacatcacatgagacaattttgcttcactttgccttctggttatttatggtttctgtctgaattattctgcctacgttctctttaaaagctgttgtacgtactacggagaaactcatcatttttatacaggacactaatgggaagaccaaaattactaataaattgacataaccaacattaaaactcataattattttgttgaccattttgttaaaatctacttttcaaaaaaaaaaagctagaaatgaatctaggcgtaggtgaacttttgctaagcagaaataacactactttgttgcctagagaaagataacttctcaagtatttttattccagtcctagatcatatatgttcttttgtgcaacggaattctaacagttctaagagaaagatcactgctgtttacagcgccttgtgcagccttagattttaatattcttttgtcattgttacatctcatagagtaaagctcttattaccttgatcctgagtcagaaatcccacctgaaatcaccttttttcccccttgatcaaacatcccatccttcagctaccatactgttgctacagggattttgtggactgtggcccctgtcctgaggttggcaccttcagttcagcacagcctgagcagtgagaaggtctgaaaggagagtatatagttaagatccttgagaaagggctgcctgaggaactgacctcttaaagatctcaggatctttaagacaacaagttaggttcctactggagttacctgccagaatggcctcttaattaactcaggtaatgaagagctaactgtgttataatcatcttgcttttgcctgaatttggagaaagtattataattaagttcccagtatcagaaatgtccttacataagattaaaatatcttgatgactaataccattctatgagaaagagtagttatatgcccagactgtattaatttactttagaaactaatgtttgaagtaatggaaaaaattttaaattataaagctaaggtgcaataacatttgctacttatttatagaattatttgaagaattttgtttttgaagtaatgctttaaggagtataagatattcaagataaattatactataaaatgattttattgaaagttgaaggttacacaaattgttttaggtatgagcagaagaggttaaggtatttctaaaggtaacatatagtcaagagtttcctcaaaatagttatttggagaagaatcagaatgtctgtgtatttcttgtctgtttctatgttgtcttatagctctgactaaatgtgtttacctatgcaaaagatttattaaagcatagaaaaggtgaatgaataaaaatataaaataattgtcctttttcttaaaa

SEQ ID NO: 330426 - DNA, 1872 bp, Artificial Sequence
  derived and/or modified sequence
agtcagcaccgtcaccccagcagcatccgccgcctgcaccgcgcgtgcggcccgccccggcctgaccccgccgccgaacccggcgccagccatggagcccgaagccccccgtcgccgccacacccatcagcgcggctacctgctgacacggaaccctcacctcaacaagaggtctctttattactatccacgatcgagggcatattgcttcagttctcaatgcatggccagaagatgtcatcaaggccattgtggtgactgatggagagcgtattcttggcttgggagaccttggctgtaatggaatgggcatccctgtgggtaaattggctctatatacagcttgcggagggatgaatcctcaagaatgtctgcctgtcattctggatgtgggaaccgaaaatgaggagttacttaaagatccactctacattggactacggcagagaagagtaagaggttctgaatatgatgattttttggacgaattcatggaggcagtttcttccaagtatggcatgaattgccttattcagtttgaagattttgccaatgtgaatgcatttcgtctcctgaacaagtatcgaaaccagtattgcacattcaatgatgatattcaaggaacagcatctgttgcagttgcaggtctccttgcagctcttcgaataaccaagaacaaactgtctgatcaaacaatactattccaaggagctggagaggctgccctagggattgcacacctgattgtgatggccttggaaaaagaaggtttaccaaaagagaaagccatcaaaaagatatggctggttgattcaaaaggattaatagttaagggacgtgcttccttaacacaagagaaagagaagtttgcccatgaacatgaagaaatgaagaacctagaagccattgttcaagaaataaaaccaactgccctcataggagttgctgcaattggtggtgcattctcagaacaaattctcaaagatatggctgccttcaatgaacggcctattatttttgctttgagtaatccaactagcaaagcagaatgttctgcagagcagtgctacaaaataaccaagggacgtgcaatttttgccagtggcagtccttttgatccagtcactcttccaaatggacagaccctatatcctggccaaggcaacaattcctatgtgttccctggagttgctcttggtgttgtggcgtgtggattgaggcagatcacagataatattttcctcactactgctgaggttatagctcagcaagtgtcagataaacacttggaagagggtcggctttatcctcctttgaataccattagagatgtttctctgaaaattgcagaaaagattgtgaaagatgcataccaagaaaagacagccacagtttatcctgaaccgcaaaacaaagaagcatttgtccgctcccagatgtatagtactgattatgaccagattctacctgattgttattcttggcctgaagaggtgcagaaaatacagaccaaagttgaccagtaggataatagcaaacatttctaactctattaatgaggtctttaaacctttcataatttttaaaggttggaatcttttataatgattcataagacacttagattaagattttactttaacagtctaaaaattgatagaagaatatcgatataaattgggataaacatcacatgagacaattttgcttcactttgccttctggttatttatggtttctgtctgaattattctgcctacgttctctttaaaagctgttgtacgtactacggagaaactcatcatttttatacaggacactaatgggaagaccaaaattactaataaattgacataaccaacattaaaactc

SEQ ID NO: 330427 - DNA, 699 bp, Artificial Sequence
  derived and/or modified sequence
gtgaagggccgggccagcctgacccaggagaaggagaagttcgcccacgagcacgaagaaatgaagaacctagaggccattgttcaagagataaagccaaccgcattaattggcgtggctgccatcggcggagcattctccgagcagatactgaaagacatggctgcctttaacgaaagacccataattttcgccctgtcaaatcctacttctaaggctgagtgttcagccgagcagtgctacaagatcacaaaggggagagctattttcgctagtgggtctcccttcgacccagtgaccttgccgaatggacagactctctatccgggacaggggaataacagctacgtatttcccggcgtggctcttggcgttgtggcatgcggcttgaggcaaatcaccgacaacattttcctcacaacggcagaagttatcgcacagcaggtgagtgacaagcatctggaggaggggcgcctgtacccccccttgaatactattcgcgatgttagcctgaagatcgctgaaaagatcgttaaggatgcataccaagagaagactgccacggtctaccctgaaccccaaaataaggaggcctttgtccgaagccagatgtattctaccgactacgatcaaatcttgccagattgctactcgtggccagaggaggttcagaaaattcagactaaggtcgaccaatag

SEQ ID NO: 330428 - DNA, 1221 bp, Artificial Sequence
  derived and/or modified sequence
atgggcatccccgtgggcaagctggccctgtacaccgcctgcggcgggatgaacccgcaggagtgcctcccagtaatcctcgacgtcggaacggaaaacgaggagctgcttaaagacccattgtacatagggcttaggcagcggagggtgagagggagcgagtacgacgacttcctggatgaatttatggaggcagtcagctcaaaatacggcatgaattgtctaatacaatttgaggacttcgccaatgtgaacgccttccgcctcttaaataaatacagaaaccagtattgtaccttcaatgacgacattcagggaacggccagcgtcgctgtggccggactgctcgccgccctgcgcatcaccaagaacaagctcagtgaccaaaccattttatttcaaggagccggagaggctgctctaggtattgcccatttaattgtgatggcactggagaaagaaggacttcctaaggaaaaggctatcaagaagatttggctggttgactccaaaggcctgatcgtcaaaggacgcgcctctttgacgcaagaaaaagagaagttcgctcatgaacacgaggaaatgaagaatctggaagcaatcgttcaggaaattaaacccacagcactgataggagtggctgcaattggcggagcattctcagagcaaatcctgaaggacatggctgcttttaacgagaggcccatcatcttcgctctgtccaaccctaccagcaaagccgagtgtagcgccgagcagtgttataaaatcactaagggccgtgccatattcgcttccgggtcccccttcgatcccgttactctgcctaacgggcagaccctttatcctggccagggcaacaacagctatgtgtttcctggtgttgcgctgggcgttgtggcctgtggacttcggcagatcactgataacatttttctaacaactgccgaggtgatcgcccaacaggtgtccgataagcacctggaggagggacggctgtacccccctctaaacaccatacgcgacgtgtctctcaaaatcgccgagaaaatcgtaaaagatgcctatcaggaaaagaccgcaaccgtgtatccggagccccaaaataaggaggcattcgtcaggtcccaaatgtactccaccgactacgaccaaatactgcccgactgctactcatggcctgaggaggtgcaaaagatccagaccaaggttgaccagtag

SEQ ID NO: 330429 - DNA, 1494 bp, Artificial Sequence
  derived and/or modified sequence
atggacctgcaggaccggaacgagaagctgttctaccgggtgctgacgtccgatatagagaaatttatgcctattgtgtacactcctaccgtgggcttggcctgccagcagtacagccttgtgttccgtaaaccccgcggcctttttatcacaattcatgacagggggcacattgcctcagtgctgaacgcctggcccgaagatgtcatcaaggcaattgtcgtgacagatggagaacgcatacttggactgggagatttggggtgtaacggcatgggcattccggtgggtaagctggcattgtacaccgcctgcggcgggatgaacccccaggagtgcttgccagtaatacttgacgtcggcacagagaatgaagagctcctgaaagatcccttgtatatcggtctacgccagagaagagtgagaggatcagagtacgacgacttccttgacgagtttatggaggccgtgtcttcaaagtatgggatgaattgtctcatacaatttgaggattttgcaaacgtgaatgcgttccggctgctgaataagtacaggaaccaatactgtacctttaacgacgatatccagggcacagcttctgttgcagtggccgggctcctggcagcactgcggattaccaagaataaactcagcgaccagactatcctattccagggcgctggggaagcagctctgggtattgcacatctcatagtcatggctctggagaaggaaggcttgcctaaagagaaagctatcaagaaaatttggctggtcgattccaaaggcttaatcgtgaagggacgagctagccttacacaggagaaagaaaagtttgcacatgaacatgaggagatgaagaatcttgaggccatcgtccaggaaattaagccaactgcattaatcggcgtggcagctattggcggggcattctctgagcagattctcaaagatatggcagccttcaatgagcgccctatcattttcgcgctgtccaatccgacatcaaaagccgagtgttccgcagagcagtgttacaagattacaaaaggccgtgcaatctttgccagtggatccccatttgaccccgtaaccttgccaaatgggcagaccctgtatccgggccaggggaataattcatacgtgtttcctggggtggcacttggcgtggtcgcatgcggcctgcgacagataaccgacaacatcttcctgactacggccgaagttattgcacagcaggtgtccgacaagcatctcgaagaaggccggctgtacccaccactcaacaccattagagacgtttccctgaagatcgccgaaaagatcgtcaaagatgcatatcaagagaagacggctacagtctatcctgaaccacagaacaaggaggcgttcgtgaggtcacagatgtacagtactgactatgaccagatcctgcccgactgttacagctggcccgaagaagttcagaagattcagacaaaggtagatcagtag

SEQ ID NO: 330430 - DNA, 699 bp, Artificial Sequence
  derived and/or modified sequence
gtgaaggggagagcctctctgactcaggagaaggagaaattcgcacatgagcacgaggaaatgaagaatctggaggccattgtgcaggaaatcaagcccactgccctgatcggagtcgccgctatcggcggagcgttctccgaacaaattctgaaggatatggcagcattcaacgaacgcccaattatcttcgccctttcaaacccaacctccaaagctgagtgtagtgctgagcagtgctacaaaattacaaagggcagagccatttttgcttcaggaagtccgttcgatcccgtgaccctgcccaacggccagactctttaccctgggcaaggtaacaatagctacgtcttccccggagtagctttaggggtcgtggcatgtggactcagacagatcaccgataacatttttcttaccaccgccgaagtcattgcccagcaggtgagtgacaaacatcttgaagaaggacgtttgtaccctcccctgaacacaatacgagacgtttccctgaagatcgccgaaaaaattgttaaggacgcctatcaggaaaaaactgccactgtgtatccagaacctcagaataaggaagctttcgtgagatcccagatgtactctacagattatgaccaaatcttgcctgattgctactcctggcctgaggaggtgcagaagattcagactaaagttgatcagtag

SEQ ID NO: 330431 - DNA, 1221 bp, Artificial Sequence
  derived and/or modified sequence
atgggcatcccagtggggaagctcgctctgtacaccgcttgtggcggtatgaatccccaggaatgcctgccagtcatccttgacgtaggtacagagaacgaagaactgcttaaggatcccctttatattggtctgcgccagaggcgggtccgaggcagcgagtatgacgatttcctggacgagttcatggaagctgtctcaagtaaatacggtatgaactgtctgatacagttcgaagacttcgccaatgtaaatgcattccggctcctcaacaaatatcgcaaccagtactgcactttcaacgacgacattcagggaaccgcctcagtggccgtagctgggctgcttgccgctctccgtattactaaaaataagctgtccgatcaaaccatcctctttcaaggcgctggcgaagcggctctcggcatagcacaccttatagtcatggccttagaaaaggagggcctcccaaaggagaaggccatcaagaaaatttggctagtcgactccaagggcctgatagtcaaggggagagccagccttacccaggaaaaggagaagttcgcccatgagcatgaagaaatgaaaaacctcgaagcaatcgtccaggaaataaagcccacggccttgattggggttgccgcaatcggcggagccttttccgaacagatactcaaagacatggctgcatttaacgagcgacctatcattttcgccttaagcaaccccacctcaaaagccgaatgcagtgccgagcagtgctataagatcaccaaaggcagagcaatctttgccagcggaagtcctttcgatccagtgaccctcccaaacgggcagacgttatacccagggcagggcaataatagctatgtcttcccaggtgtggcattaggagtggtcgcttgtgggctgaggcaaataaccgataacatttttttaacaactgccgaagtcattgcacaacaggtcagcgataaacacttggaagaagggaggctctaccctcctctgaataccatccgggacgtcagcttaaaaatcgccgagaaaatagtgaaggacgcgtaccaggagaaaacagctaccgtctatccggagccgcagaataaagaggccttcgttagatctcagatgtactctacggactatgatcagattctcccggactgctactcttggcccgaagaagtgcagaaaatccaaaccaaggtcgaccagtag

SEQ ID NO: 330432 - DNA, 1494 bp, Artificial Sequence
  derived and/or modified sequence
atggatttacaggacaggaacgaaaaactcttttatagagtcttgacgtctgatatagagaagtttatgccaatcgtctacacaccaacggttggacttgcttgccagcagtacagtctcgtatttaggaaaccgagaggactattcattaccattcacgatagaggccacattgcctcagtgctgaatgcttggccagaggacgttatcaaagccatagtggtgacagatggcgaaaggatcctgggactcggcgatctggggtgcaacggcatgggcatacccgtgggcaaattggccctgtacaccgcctgcgggggaatgaatccacaggaatgtctcccagtgattctggacgtcggaaccgagaatgaggagctgctcaaggatccactgtacattgggttgcggcagaggagagtgcgcggtagtgagtacgacgatttcctggacgagtttatggaggccgtgagcagcaagtacggtatgaactgcttaatccagtttgaagattttgctaatgttaatgcctttcggctgctcaacaaatatcgcaatcagtactgcacatttaatgacgatatccaaggcaccgcaagtgtggcagttgccggactgctggctgcactgcgcattactaagaacaaattaagtgatcagaccatccttttccagggtgccggtgaggcagcattgggtatcgcacacctgattgttatggctctggagaaggaaggccttcctaaggaaaaagcgattaagaaaatctggctcgtcgactctaagggcctcattgtgaagggtcgggcttcattgacgcaagaaaaagaaaaatttgcacacgagcacgaggaaatgaaaaacctagaggcgatagttcaggaaatcaaacccactgccttgataggcgtggcagccattggtggggctttttctgaacagatcttgaaggatatggcagcatttaatgagcgaccaatcatttttgctctcagtaaccctacatctaaggccgaatgtagcgctgagcagtgttacaaaataaccaaaggcagggccatctttgccagtggctctccttttgatccagtgacactgccaaacggccagaccctctaccctggacaggggaacaatagttatgtgtttccaggagtagccctgggggtcgtggcctgtggcctacgacagattactgataacatctttttaaccaccgcggaggtcatcgcccagcaagttagtgacaagcatcttgaggagggaaggctctatcctcccctaaacaccatcagagacgtgtcactcaaaatcgcagagaaaatcgttaaggacgcctatcaagagaagacagctacagtctaccccgagcctcagaataaagaggccttcgttcgctctcagatgtattccacagactatgatcaaatccttccggactgctactcttggcccgaagaagttcagaagatccagactaaggtcgaccaatag

SEQ ID NO: 330433 - DNA, 699 bp, Artificial Sequence
  derived and/or modified sequence
gtgaagggcagagccagcctgacccaggagaaggagaagttcgcccacgagcacgaggagatgaagaacctggaggccatcgtgcaggagatcaagcccaccgccctgatcggcgtggccgccatcggcggcgccttcagcgagcagatcctgaaggacatggccgccttcaacgagagacccatcatcttcgccctgagcaaccccaccagcaaggccgagtgcagcgccgagcagtgctacaagatcaccaagggcagagccatcttcgccagcggcagccccttcgaccccgtgaccctgcccaacggccagaccctgtaccccggccagggcaacaacagctacgtgttccccggcgtggccctgggcgtggtggcctgcggcctgagacagatcaccgacaacatcttcctgaccaccgccgaggtgatcgcccagcaggtgagcgacaagcacctggaggagggcagactgtacccccccctgaacaccatcagagacgtgagcctgaagatcgccgagaagatcgtgaaggacgcctaccaggagaagaccgccaccgtgtaccccgagccccagaacaaggaggccttcgtgagaagccagatgtacagcaccgactacgaccagatcctgcccgactgctacagctggcccgaggaggtgcagaagatccagaccaaggtggaccagtag

SEQ ID NO: 330434 - DNA, 1221 bp, Artificial Sequence
  derived and/or modified sequence
atgggcatccccgtgggcaagctggccctgtacaccgcctgcggcggcatgaacccccaggagtgcctgcccgtgatcctggacgtgggcaccgagaacgaggagctgctgaaggaccccctgtacatcggcctgagacagagaagagtgagaggcagcgagtacgacgacttcctggacgagttcatggaggccgtgagcagcaagtacggcatgaactgcctgatccagttcgaggacttcgccaacgtgaacgccttcagactgctgaacaagtacagaaaccagtactgcaccttcaacgacgacatccagggcaccgccagcgtggccgtggccggcctgctggccgccctgagaatcaccaagaacaagctgagcgaccagaccatcctgttccagggcgccggcgaggccgccctgggcatcgcccacctgatcgtgatggccctggagaaggagggcctgcccaaggagaaggccatcaagaagatctggctggtggacagcaagggcctgatcgtgaagggcagagccagcctgacccaggagaaggagaagttcgcccacgagcacgaggagatgaagaacctggaggccatcgtgcaggagatcaagcccaccgccctgatcggcgtggccgccatcggcggcgccttcagcgagcagatcctgaaggacatggccgccttcaacgagagacccatcatcttcgccctgagcaaccccaccagcaaggccgagtgcagcgccgagcagtgctacaagatcaccaagggcagagccatcttcgccagcggcagccccttcgaccccgtgaccctgcccaacggccagaccctgtaccccggccagggcaacaacagctacgtgttccccggcgtggccctgggcgtggtggcctgcggcctgagacagatcaccgacaacatcttcctgaccaccgccgaggtgatcgcccagcaggtgagcgacaagcacctggaggagggcagactgtacccccccctgaacaccatcagagacgtgagcctgaagatcgccgagaagatcgtgaaggacgcctaccaggagaagaccgccaccgtgtaccccgagccccagaacaaggaggccttcgtgagaagccagatgtacagcaccgactacgaccagatcctgcccgactgctacagctggcccgaggaggtgcagaagatccagaccaaggtggaccagtag

SEQ ID NO: 330435 - DNA, 1494 bp, Artificial Sequence
  derived and/or modified sequence
atggacctgcaggacagaaacgagaagctgttctacagagtgctgaccagcgacatcgagaagttcatgcccatcgtgtacacccccaccgtgggcctggcctgccagcagtacagcctggtgttcagaaagcccagaggcctgttcatcaccatccacgacagaggccacatcgccagcgtgctgaacgcctggcccgaggacgtgatcaaggccatcgtggtgaccgacggcgagagaatcctgggcctgggcgacctgggctgcaacggcatgggcatccccgtgggcaagctggccctgtacaccgcctgcggcggcatgaacccccaggagtgcctgcccgtgatcctggacgtgggcaccgagaacgaggagctgctgaaggaccccctgtacatcggcctgagacagagaagagtgagaggcagcgagtacgacgacttcctggacgagttcatggaggccgtgagcagcaagtacggcatgaactgcctgatccagttcgaggacttcgccaacgtgaacgccttcagactgctgaacaagtacagaaaccagtactgcaccttcaacgacgacatccagggcaccgccagcgtggccgtggccggcctgctggccgccctgagaatcaccaagaacaagctgagcgaccagaccatcctgttccagggcgccggcgaggccgccctgggcatcgcccacctgatcgtgatggccctggagaaggagggcctgcccaaggagaaggccatcaagaagatctggctggtggacagcaagggcctgatcgtgaagggcagagccagcctgacccaggagaaggagaagttcgcccacgagcacgaggagatgaagaacctggaggccatcgtgcaggagatcaagcccaccgccctgatcggcgtggccgccatcggcggcgccttcagcgagcagatcctgaaggacatggccgccttcaacgagagacccatcatcttcgccctgagcaaccccaccagcaaggccgagtgcagcgccgagcagtgctacaagatcaccaagggcagagccatcttcgccagcggcagccccttcgaccccgtgaccctgcccaacggccagaccctgtaccccggccagggcaacaacagctacgtgttccccggcgtggccctgggcgtggtggcctgcggcctgagacagatcaccgacaacatcttcctgaccaccgccgaggtgatcgcccagcaggtgagcgacaagcacctggaggagggcagactgtacccccccctgaacaccatcagagacgtgagcctgaagatcgccgagaagatcgtgaaggacgcctaccaggagaagaccgccaccgtgtaccccgagccccagaacaaggaggccttcgtgagaagccagatgtacagcaccgactacgaccagatcctgcccgactgctacagctggcccgaggaggtgcagaagatccagaccaaggtggaccagtag

SEQ ID NO: 330436 - protein, 142 aa, Artificial Sequence
  derived and/or modified sequence
SVFVRFNSSHGFPVEVDSDTSIFQLKEVVAKRQGVPADQLRVIFAGKELRNDWTVQNCDLDQQSIVHIVQRPWRKGQEMNATGGDDPRNAAGGCEREPQSLTRVDLSSSVLPGDSVGLAVILHTDSRKDSPPAGSPGNCLHG

SEQ ID NO: 330437 - DNA, 825 bp, Artificial Sequence
  derived and/or modified sequence
atgtccggggagtgtcaatcgccccattgccctgggactagtgccgaattcttctttaagtgtggagcccatccgacctctgacaaagagacatcagtggccctgcacctgattgctacaaacagcagaaatatcacttgtataacatgcactgatgtccggtctcctgtattggtcttccagtgcaatagccgccatgttatatgtctggattgcttccacttatattgcgtcacgcgcttaaacgatcggcagttcgtgcacgatccccaactcgggtacagtctaccgtgtgtggcaggctgtcccaatagcctgatcaaggaactgcaccactttaggattctgggggaggaacagtacaacagatatcagcagtacggggcagaggaatgcgtcctgcaaatgggaggggttctgtgtccaagaccgggatgcggagcaggccttcttcccgagcctgatcaacggaaggtgacatgcgaaggaggtaacggcttagggtgtggcttcgcgttttgtagagaatgcaaagaagcatatcatgaaggtgagtgctccgccgtcttcgaagcttcggggactacgacacaggcctatagagtcgatgaaagagctgcagaacaggccagatgggaagccgcatcaaaggagactatcaagaaaaccacaaaaccttgcccccgctgtcacgtgcccgtggagaagaatggggggtgtatgcatatgaagtgtccgcagccacagtgtaggctcgagtggtgttggaactgcggatgtgaatggaaccgggtctgtatgggtgatcactggttcgacgtctag

SEQ ID NO: 330438 - DNA, 825 bp, Artificial Sequence
  derived and/or modified sequence
atgtccggtgaatgtcagagtccccactgtccaggcaccagcgcagagtttttcttcaagtgtggagctcaccccactagtgataaggagacatctgtggcactacatctgatagccaccaactccagaaatatcacctgcatcacttgcaccgatgtgcggtctcctgtgcttgtgttccagtgtaattccagacatgtgatctgcctggactgttttcacctgtactgcgtaacgagactaaatgatcgacagttcgtgcacgacccacagctcggctatagcctcccctgtgtggcaggctgtccaaacagtctcatcaaggagctccatcacttccgtatccttggagaggagcagtacaatcgatatcaacagtatggcgcagaagagtgtgttcttcaaatgggaggagtcttatgccccaggcctggatgcggggctggtctgctgccagaacctgaccagaggaaagtcacctgtgaaggcggcaacgggctgggctgtgggtttgctttctgtcgggaatgcaaagaggcatatcacgagggagaatgcagtgctgtgtttgaggcgagtgggaccactacccaggcatacagggtggatgagcgggcagcagagcaagcccgttgggaggcagcttctaaggagacaatcaagaaaaccaccaaaccctgcccccgctgtcatgtccctgttgaaaaaaatggcggttgcatgcatatgaaatgcccacagccccagtgtaggctcgaatggtgttggaattgcggctgcgaatggaacagggtgtgcatgggcgaccactggttcgacgtatag

SEQ ID NO: 330439 - DNA, 612 bp, Artificial Sequence
  derived and/or modified sequence
atgtctggagagtgtcagtctccccattgcccaggtacttccgctgagtttttcttcaagtgtggcgcccaccccacctctgacaaggagacctcggttgcgttgcacctgatcgcaaccaattcacgcaatatcacatgtatcacttgcacagacgtgaggtctcctgtgttagtatttcagtgtaactccagacacgttatttgcctggactgttttcacctttattgtgtcacaaggctcaacgacagacagtttgtgcatgatccccagctggggtattcacttccttgcgtcgctggctgtcccaattcattgattaaagagctgcatcatttccgaattctgggcgaggagcagtacaacagataccaacagtacggggccgaagaatgtgtgcttcaaatgggcggcgtgttatgcccccggccagggtgcggtgctggtttgctgccggagcctgatcagcgtaaggtgacttgtgagggagggaatggcctcggttgtggatttgcattttgccgagagtgtaaagaagcctatcacgaaggtgagtgcagcgccgttttcgaggcctccggcactactactcagcatagcggctgtacatag

SEQ ID NO: 330440 - DNA, 825 bp, Artificial Sequence
  derived and/or modified sequence
atgtctggagagtgccagagcccccactgccccggcaccagcgctgagttcttcttcaagtgtggggcccaccccaccagtgacaaggagacctctgtggccctgcacctgattgccaccaacagcaggaacatcacctgcatcacctgcacagatgtgcgcagccctgtgctggtgttccagtgcaacagccgccacgtgatctgcctggactgcttccacctgtactgtgtgacccggctgaatgaccggcagtttgtgcatgacccccagctgggctacagcctgccctgtgtggccggctgccccaacagcctcatcaaggagctgcaccacttccgcatcctgggggaggagcagtacaaccgctaccagcagtatggagcagaagaatgtgtgctgcagatgggcggcgtgctgtgcccccggcccggctgtggggccggcctgctgcctgagccagaccagaggaaggtgacctgtgagggcggcaatggcctgggctgcggctttgccttctgccgggagtgcaaggaggcctaccacgagggagaatgttctgctgtgtttgaggccagcggcaccaccacccaggcctacagagtggatgaaagagctgctgagcaggcccgctgggaggccgccagcaaggagaccatcaagaagaccaccaagccctgcccccgctgccacgtgcctgtggagaagaatggaggctgcatgcacatgaagtgcccccagccccagtgccgcctggagtggtgctggaactgtggctgtgagtggaacagagtgtgcatgggagaccactggtttgatgtgtag

SEQ ID NO: 330441 - DNA, 612 bp, Artificial Sequence
  derived and/or modified sequence
atgtctggagagtgccagagcccccactgccccggcaccagcgctgagttcttcttcaagtgtggggcccaccccaccagtgacaaggagacctctgtggccctgcacctgattgccaccaacagcaggaacatcacctgcatcacctgcacagatgtgcgcagccctgtgctggtgttccagtgcaacagccgccacgtgatctgcctggactgcttccacctgtactgtgtgacccggctgaatgaccggcagtttgtgcatgacccccagctgggctacagcctgccctgtgtggccggctgccccaacagcctcatcaaggagctgcaccacttccgcatcctgggggaggagcagtacaaccgctaccagcagtatggagcagaagaatgtgtgctgcagatgggcggcgtgctgtgcccccggcccggctgtggggccggcctgctgcctgagccagaccagaggaaggtgacctgtgagggcggcaatggcctgggctgcggctttgccttctgccgggagtgcaaggaggcctaccacgagggagaatgttctgctgtgtttgaggccagcggcaccaccacccagcacagcggctgcacctag

SEQ ID NO: 330442 - DNA, 825 bp, Artificial Sequence
  derived and/or modified sequence
atgagcggcgagtgccagagcccccactgccccggcaccagcgccgaatttttcttcaagtgtggggctcatccgacgagcgataaggagacaagtgtagctctgcatttaatcgccacgaacagccgcaatatcacctgcatcacctgtacagatgttcgctcaccagtgcttgtgtttcagtgcaattcacggcacgtaatttgcctcgattgttttcatctgtattgtgtgactaggctgaatgaccgccagtttgtgcacgatccacagctggggtattccctgccttgcgtggctggatgccctaacagtctgattaaggagcttcatcatttcaggattctcggagaggaacaatataaccggtatcagcagtatggagccgaagaatgcgtgctccagatgggtggtgtgttgtgcccacgccccggctgcggtgcgggacttctgccagaacccgaccagcgaaaagtgacctgcgagggaggaaacggcctcggatgcggatttgctttctgccgggagtgcaaggaagcataccatgaaggcgagtgttcagctgtttttgaggcctctgggaccaccacccaggcctacagagtggatgaacgggccgcagagcaggctaggtgggaagccgccagcaaggagaccattaagaagacaacaaaaccatgccccaggtgtcacgtaccagttgaaaagaacggaggctgtatgcacatgaagtgcccccaacctcagtgtaggctggaatggtgttggaactgtggatgtgagtggaacagggtgtgtatgggcgatcactggttcgatgtgtag

SEQ ID NO: 330443 - DNA, 825 bp, Artificial Sequence
  derived and/or modified sequence
atgagcggcgagtgccagagcccccactgccccggcaccagcgccgaattttttttcaagtgtggcgctcatccaaccagcgacaaagaaacttcagttgcattacatcttatagcaaccaattctcggaacataacgtgtatcacttgtaccgatgtgagatctccggttctcgtgttccagtgcaattcacggcatgtcatctgcctggactgcttccacctctattgtgtcactaggctgaacgatcgacagttcgtgcacgacccacagttgggatattctcttccttgtgtggcaggttgccccaattcactaataaaggagctccatcactttcggatactgggtgaagaacagtataatcgttaccagcagtacggcgccgaggaatgcgtattacagatggggggagttttatgcccgcgccctggctgtggggccggccttctcccagagcccgaccagagaaaggtgacatgcgaaggcggcaacggactgggctgtgggttcgctttttgtagggagtgtaaggaggcataccacgagggggagtgctcagctgtctttgaggccagcggcaccacgacgcaggcctatagagtggacgaacgcgcagcggagcaggcgcggtgggaagcagcgagcaaagaaaccattaagaaaactacaaagccttgtcctagatgccacgtgcccgtggaaaagaatgggggatgtatgcacatgaaatgtcctcagccccagtgtaggttagagtggtgttggaactgtggctgtgaatggaatagagtgtgtatgggggaccattggtttgacgtatag

SEQ ID NO: 330444 - DNA, 612 bp, Artificial Sequence
  derived and/or modified sequence
atgagcggcgagtgccagagcccccactgccccggcaccagcgccgagttcttcttcaagtgcggggcccacccaacctctgacaaagaaacatccgtcgctttgcatttaattgccacaaacagcagaaatattacctgtatcacttgcacagacgttaggagtcctgtgctggtctttcagtgcaacagcaggcacgttatctgcctagactgttttcacctctactgcgttacaaggctgaatgataggcagtttgttcacgatccacagcttggttattcacttccatgtgtggcaggttgtcctaactccctcataaaggaactgcaccacttccgcatcctgggcgaagagcaatataacaggtaccaacagtatggggcggaagagtgtgtactacagatggggggagtgctttgccccagacccggttgtggggctgggttgctgcctgagccggatcagaggaaggtcacttgtgagggcggaaatgggttaggctgtggttttgccttctgccgtgagtgcaaggaagcctaccacgaaggcgagtgcagcgccgtcttcgaggccagtggcactaccacccaacactctggttgcacttag

SEQ ID NO: 330445 - DNA, 1276 bp, Artificial Sequence
  derived and/or modified sequence
atgatagtgtttgtcaggttcaactccagccatggtttcccagtggaggtcgattctgacaccagcatcttccagctcaaggaggtggttgctaagcgacagggggttccggctgaccagttgcgtgtgattttcgcagggaaggagctgaggaatgactggactgtgcagaattgtgacctggatcagcagagcattgttcacattgtgcagagaccgtggagaaaaggtcaagaaatgaatgcaactggaggcgacgaccccagaaacgcggcgggaggctgtgagcgggagccccagagcttgactcgggtggacctcagcagctcagtcctcccaggagactctgtggggctggctgtcattctgcacactgacagcaggaaggactcaccaccagctggaagtccagggtccatcttgctgggatgatgttttaattccaaaccggatgagtggtgaatgccaatccccacactgccctgggactagtgcagaatttttctttaaatgtggagcacaccccacctctgacaaggaaacatcagtagctttgcacctgatcgcaacaaatagtcggaacatcacttgcattacgtgcacagacgtcaggagccccgtcctggttttccagtgcaactcccgccacgtgatttgcttagactgtttccacttatactgtgtgacaagactcaatgatcggcagtttgttcacgaccctcaacttggctactccctgccttgtgtggctggctgtcccaactccttgattaaagagctccatcacttcaggattctgggagaagagcagtacaaccggtaccagcagtatggtgcagaggagtgtgtcctgcagatggggggcgtgttatgcccccgccctggctgtggagcggggctgctgccggagcctgaccagaggaaagtcacctgcgaagggggcaatggcctgggctgtgggtttgccttctgccgggaatgtaaagaagcgtaccatgaaggggagtgcagtgccgtatttgaagcctcaggaacaactactcaggcctacagagtcgatgaaagagccgccgagcaggctcgttgggaagcagcctccaaagaaaccatcaagaaaaccaccaagccctgtccccgctgccatgtaccagtggaaaaaaatggaggctgcatgcacatgaagtgtccgcagccccagtgcaggctcgagtggtgctggaactgtggctgcgagtggaaccgcgtctgcatgggggaccactggttcgacgtgtag

SEQ ID NO: 330446 - DNA, 609 bp, Artificial Sequence
  derived and/or modified sequence
atgagtggtgaatgccaatccccacactgccctgggactagtgcagaatttttctttaaatgtggagcacaccccacctctgacaaggaaacatcagtagctttgcacctgatcgcaacaaatagtcggaacatcacttgcattacgtgcacagacgtcaggagccccgtcctggttttccagtgcaactcccgccacgtgatttgcttagactgtttccacttatactgtgtgacaagactcaatgatcggcagtttgttcacgaccctcaacttggctactccctgccttgtgtggctggctgtcccaactccttgattaaagagctccatcacttcaggattctgggagaagagcagtacaaccggtaccagcagtatggtgcagaggagtgtgtcctgcagatggggggcgtgttatgcccccgccctggctgtggagcggggctgctgccggagcctgaccagaggaaagtcacctgcgaagggggcaatggcctgggctgtgggtttgccttctgccgggaatgtaaagaagcgtaccatgaaggggagtgcagtgccgtatttgaagcctcaggaacaactactcagcattcagggtgcacc

SEQ ID NO: 330447 - DNA, 825 bp, Artificial Sequence
  derived and/or modified sequence
atgagcggggagtgtcagagcccccattgtcctggcacatccgcagagttcttctttaaatgcggggctcaccctacatccgacaaagagacatctgttgcattgcatctcatagctactaacagcaggaatatcacatgcatcacttgtaccgatgtgagaagccctgttctggtttttcagtgtaatagtaggcacgtgatttgccttgattgcttccatctgtattgcgtgacacgtctgaatgaccgacagtttgttcatgatccccagctcggctacagcttaccttgcgtagccggttgtcctaattcactcataaaagaacttcaccactttcgaatcctgggcgaggagcagtacaacaggtatcagcagtacggagccgaggagtgcgtgctgcagatggggggtgttctctgccctagacccggatgcggagccggtctcctccccgaacccgaccagagaaaagttacctgcgaagggggtaacggacttggttgtggcttcgccttctgcagggagtgtaaagaggcatatcacgagggcgagtgcagcgccgtgtttgaggctagtgggacgacaacacaggcctatcgagtcgatgaaagggccgctgaacaagcccgttgggaagcagcttctaaagagaccataaaaaaaacaaccaagccttgtccacggtgtcatgtgcctgtagagaaaaacgggggttgcatgcacatgaagtgccctcagcctcagtgccggcttgaatggtgctggaactgcggatgcgagtggaatcgcgtttgtatgggagaccattggtttgacgtgtag

SEQ ID NO: 330448 - DNA, 825 bp, Artificial Sequence
  derived and/or modified sequence
atgtctggggagtgccagtcaccccactgccctgggactagtgctgagttctttttcaagtgcggagcccaccccacaagcgataaagaaacttccgtggcacttcacctgatagccacgaattctcggaatatcacatgtattacctgcactgatgtgcgctctccagtgttggtatttcaatgtaattcgagacacgttatctgtttagactgttttcacctgtactgtgtgacacgtttgaacgatagacagtttgtacatgacccacaactggggtactccttgccttgtgtggccggatgccctaacagtttaatcaaggaactccatcattttaggattctgggagaggagcaatacaacaggtaccaacagtatggcgcagaggagtgcgtgctgcagatgggcggagtcttatgcccccgtcccggttgtggggctggcctccttccagagccagatcagagaaaagtgacctgcgaagggggtaatggcttgggttgtggttttgctttttgccgggaatgtaaggaggcttaccacgaaggtgagtgctcagctgtgttcgaagcctcgggaacgaccacacaggcttaccgagtggacgagcgggctgccgaacaggccaggtgggaggccgcaagcaaagaaacaataaaaaagaccactaagccatgccccaggtgtcacgtccctgttgaaaagaacggtggatgtatgcatatgaaatgcccgcagccccagtgcaggttggagtggtgttggaattgtggctgcgagtggaacagggtgtgtatgggggaccattggttcgacgtgtag

SEQ ID NO: 330449 - DNA, 612 bp, Artificial Sequence
  derived and/or modified sequence
atgagcggcgagtgtcagtccccccactgccccggaacctccgccgagttcttttttaaatgcggggctcatcctaccagcgataaggaaacttccgtggctctccacctcattgctaccaattcacggaacataacctgtattacatgtacggacgtgaggagccccgttctggtctttcagtgtaactcgcgccacgttatctgcctcgactgctttcacctgtactgtgtaaccaggctaaacgaccgccaattcgtccacgaccctcagctaggatattcgctcccgtgcgtggcgggttgtcccaacagcctgatcaaagagctgcaccattttcgcatcctgggcgaggaacagtataatagataccagcagtatggggcagaagaatgcgtcctgcagatgggaggcgttctttgcccaagacccggttgcggggctgggctcttgcctgagccagatcagcgtaaggtcacatgtgagggcggaaatgggctcggctgtgggtttgccttttgcagggagtgtaaggaggcctaccacgagggcgaatgtagcgccgtgtttgaggcgagcgggacaactacccagcatagcggctgcacatag

SEQ ID NO: 330450 - DNA, 825 bp, Artificial Sequence
  derived and/or modified sequence
atgagcggcgagtgccagagcccccactgccccggcaccagcgccgagttcttcttcaagtgcggcgcccaccccaccagcgacaaggagaccagcgtggccctgcacctgatcgccaccaacagcagaaacatcacctgcatcacctgcaccgacgtgagaagccccgtgctggtgttccagtgcaacagcagacacgtgatctgcctggactgcttccacctgtactgcgtgaccagactgaacgacagacagttcgtgcacgacccccagctgggctacagcctgccctgcgtggccggctgccccaacagcctgatcaaggagctgcaccacttcagaatcctgggcgaggagcagtacaacagataccagcagtacggcgccgaggagtgcgtgctgcagatgggcggcgtgctgtgccccagacccggctgcggcgccggcctgctgcccgagcccgaccagagaaaggtgacctgcgagggcggcaacggcctgggctgcggcttcgccttctgcagagagtgcaaggaggcctaccacgagggcgagtgcagcgccgtgttcgaggccagcggcaccaccacccaggcctacagagtggacgagagagccgccgagcaggccagatgggaggccgccagcaaggagaccatcaagaagaccaccaagccctgccccagatgccacgtgcccgtggagaagaacggcggctgcatgcacatgaagtgcccccagccccagtgcagactggagtggtgctggaactgcggctgcgagtggaacagagtgtgcatgggcgaccactggttcgacgtgtag

SEQ ID NO: 330451 - DNA, 612 bp, Artificial Sequence
  derived and/or modified sequence
atgagcggcgagtgccagagcccccactgccccggcaccagcgccgagttcttcttcaagtgcggcgcccaccccaccagcgacaaggagaccagcgtggccctgcacctgatcgccaccaacagcagaaacatcacctgcatcacctgcaccgacgtgagaagccccgtgctggtgttccagtgcaacagcagacacgtgatctgcctggactgcttccacctgtactgcgtgaccagactgaacgacagacagttcgtgcacgacccccagctgggctacagcctgccctgcgtggccggctgccccaacagcctgatcaaggagctgcaccacttcagaatcctgggcgaggagcagtacaacagataccagcagtacggcgccgaggagtgcgtgctgcagatgggcggcgtgctgtgccccagacccggctgcggcgccggcctgctgcccgagcccgaccagagaaaggtgacctgcgagggcggcaacggcctgggctgcggcttcgccttctgcagagagtgcaaggaggcctaccacgagggcgagtgcagcgccgtgttcgaggccagcggcaccaccacccagcacagcggctgcacctag

SEQ ID NO: 330452 - protein, 368 aa, Artificial Sequence
  derived and/or modified sequence
MIVFVRFNSSHGFPVEVDSDTSIFQLKEVVAKRQGVPADQLRVIFAGKELRNDWTVQNCDLDQQSIVHIVQRPWRKGQEMNATGGDDPRNAAGGCEREPQSLTRVDLSSSVLPGDSVGLAVILHTDSRKDSPPAGSPAGRSIYNSFYVYCKGPCQRVQPGKLRVQCSTCRQATLTLTQGPSCWDDVLIPNRMSGECQSPHCPGTSAEFFFKCGAHPTSDKETSVALHLIATNSRNITCITCTDVRSPVLVFQCNSRHVICLDCFHLYCVTRLNDRQFVHDPQLGYSLPCVAGCPNSLIKELHHFRILGEEQYNRYQQYGAEECVLQMGGVLCPRPGCGAGLLPEPDQRKVTCEGGNGLGCGYGQRRTK

SEQ ID NO: 330453 - protein, 218 aa, Artificial Sequence
  derived and/or modified sequence
MNATGGDDPRNAAGGCEREPQSLTRVDLSSSVLPGDSVGLAVILHTDSRKDSPPAGSPAGRSIYNSFYVYCKGPCQRVQPGKLRVQCSTCRQATLTLTQGPSCWDDVLIPNRMSGECQSPHCPGTSAEFFFKCGAHPTSDKETSVALHLIATNSRNITCITCTDVRSPVLVFQCNSRHVICLDCFHLYCVTRLNDRQFVHDPQLGYSLPCVVSLLPSQ

SEQ ID NO: 330454 - DNA, 1107 bp, Artificial Sequence
  derived and/or modified sequence
atgatagtgttcgttaggttcaattcctcacacgggtttccagtggaagtggactccgatactagcatcttccagctgaaagaagttgtcgctaagcgacagggcgtgcccgcagatcagctccgagtgatcttcgctggcaaggagctgagaaatgactggactgtgcaaaactgtgacctcgaccaacagtctatcgttcacatcgtccaacgcccttggcggaagggccaggaaatgaacgcgacagggggcgacgatccgcggaatgccgctgggggttgtgaacgtgagcctcagagcctcaccagggttgacctttcttcatctgtcttgccaggagactccgtcggacttgcagtcattctccatacagattcaaggaaggacagcccacctgcaggttccccggccggaagatctatctataactctttctacgtttattgcaaagggccttgtcagagggttcagcccggtaagctgagagtgcaatgcagcacatgtagacaggccacactgaccttgactcagggcccgagctgttgggatgacgttctaatccctaacagaatgtctggggaatgccaatccccgcactgtcccgggacaagcgcagagttctttttcaagtgtggggcgcaccccactagtgacaaggagacatccgtcgctctgcaccttatcgccaccaatagccggaacatcacttgtattacctgcacagatgtgcggtcacccgttctggtctttcagtgcaacagtcgtcacgtgatctgtctggactgctttcatttatattgcgtaacacggcttaacgatcggcaatttgtgcacgatccccagctgggttattcactaccttgtgtcgccggctgcccaaactccctaatcaaggaattgcatcatttccggatcttgggggaggaacaatataatcgctaccagcagtacggggctgaggagtgtgtgctccagatgggtggggtactctgtcccaggcctggttgcggtgccgggctgctccccgaacccgatcaaaggaaagtcacctgcgaggggggcaacggtctcgggtgcggctatggccagagaagaactaagtag

SEQ ID NO: 330455 - DNA, 1107 bp, Artificial Sequence
  derived and/or modified sequence
atgattgtgtttgtgcgcttcaacagcagccacggcttccctgtggaggtggacagcgacaccagcatcttccagctgaaggaggtggtggccaagaggcagggcgtgcctgctgaccagctgcgggtcatctttgctgggaaggagctgagaaatgactggacagtgcagaactgtgacctggaccagcagagcatcgtgcacatcgtgcagaggccctggaggaagggccaggagatgaatgccactggaggagatgaccccagaaatgctgctgggggctgtgagcgggagccccagagcctgaccagggtggacctgagcagctctgtgctgcccggggacagcgtgggcctggccgtcatcctgcacacagacagcaggaaggacagccccccagctggcagccctgctggccgcagcatctacaacagcttctacgtgtactgcaagggcccctgccagagggtgcagcccgggaagctgcgggtgcagtgcagcacctgccggcaggccaccctgaccctgacccagggccccagctgctgggatgatgtgctgatccccaacaggatgtctggagagtgccagagcccccactgccccggcaccagcgctgagttcttcttcaagtgtggggcccaccccaccagtgacaaggagacctctgtggccctgcacctgattgccaccaacagcaggaacatcacctgcatcacctgcacagatgtgcgcagccctgtgctggtgttccagtgcaacagcagacatgtgatctgcctggactgcttccacctgtactgtgtgacccggctgaatgaccggcagtttgtgcatgacccccagctgggctacagcctgccctgtgtggccggctgccccaacagcctcatcaaggagctgcaccacttccgcatcctgggggaggagcagtacaaccgctaccagcagtacggggctgaggagtgtgtgctgcagatgggcggcgtgctgtgccccaggcctggctgtggggccggcctgctgcctgagccagaccagaggaaggtgacctgtgagggcggcaatggcctgggctgcggctacggccagaggaggaccaagtag

SEQ ID NO: 330456 - DNA, 1107 bp, Artificial Sequence
  derived and/or modified sequence
atgatcgtgttcgtgcggttcaacagcagccacggcttccccgtggaagtcgacagcgatacaagcatattccagctgaaggaggtcgtcgccaaacgtcaaggagtgccagcggaccaattgcgcgtgatatttgctggcaaagagctgagaaacgactggacagtgcagaattgtgatctggatcagcagtctattgtgcacatcgtccagaggccttggcgcaagggccaagagatgaacgcaacgggaggcgatgatcccaggaatgcagcagggggatgtgaacgcgagcctcaatccttgacccgggtcgacctgtcttctagcgtgctgcccggggactccgtcggactggccgtgatactgcacactgactcccggaaggactcccctccggcaggctcccctgccggcagaagcatctacaattctttctacgtgtactgcaaaggtccctgtcagcgggtgcagccgggaaaactgagagtacagtgctccacctgcagacaggccacacttacactgactcaggggcctagctgctgggatgatgttctgatcccaaaccgtatgtcgggtgagtgccagtccccgcactgcccgggcacctccgctgaattctttttcaagtgcggggctcatccaacatctgataaggagacctcggtggctctgcaccttatcgccacaaactcacgaaacattacatgtatcacttgtaccgacgtgaggtctcccgtcctcgtctttcaatgcaatagtcgccatgtgatttgtctggattgttttcatctgtattgtgtgacaaggctgaatgatcgacagtttgtgcacgatccccagctcgggtattcacttccatgcgttgcaggatgtcctaacagccttatcaaagagttgcaccattttcgcattctgggggaggagcagtacaaccggtaccagcagtacggggctgaggagtgcgtgctgcagatgggaggtgtgctgtgccctcgacctggatgtggcgctgggttattgcctgagccagaccagcggaaggtcacctgcgaaggcggaaacgggctcgggtgcggatacggtcagcggagaacaaagtag

SEQ ID NO: 330457 - DNA, 1505 bp, Artificial Sequence
  derived and/or modified sequence
gatttaacccaggagagccgctggtgggaggcgcggctggcgccgctgcgcgcatgggcctgttcctggcccgcagccgccacctacccagtgaccatgatagtgtttgtcaggttcaactccagccatggtttcccagtggaggtcgattctgacaccagcatcttccagctcaaggaggtggttgctaagcgacagggggttccggctgaccagttgcgtgtgattttcgcagggaaggagctgaggaatgactggactgtgcagaattgtgacctggatcagcagagcattgttcacattgtgcagagaccgtggagaaaaggtcaagaaatgaatgcaactggaggcgacgaccccagaaacgcggcgggaggctgtgagcgggagccccagagcttgactcgggtggacctcagcagctcagtcctcccaggagactctgtggggctggctgtcattctgcacactgacagcaggaaggactcaccaccagctggaagtccagcaggtagatcaatctacaacagcttttatgtgtattgcaaaggcccctgtcaaagagtgcagccgggaaaactcagggtacagtgcagcacctgcaggcaggcaacgctcaccttgacccagggtccatcttgctgggatgatgttttaattccaaaccggatgagtggtgaatgccaatccccacactgccctgggactagtgcagaatttttctttaaatgtggagcacaccccacctctgacaaggaaacatcagtagctttgcacctgatcgcaacaaatagtcggaacatcacttgcattacgtgcacagacgtcaggagccccgtcctggttttccagtgcaactcccgccacgtgatttgcttagactgtttccacttatactgtgtgacaagactcaatgatcggcagtttgttcacgaccctcaacttggctactccctgccttgtgtggctggctgtcccaactccttgattaaagagctccatcacttcaggattctgggagaagagcagtacaaccggtaccagcagtatggtgcagaggagtgtgtcctgcagatggggggcgtgttatgcccccgccctggctgtggagcggggctgctgccggagcctgaccagaggaaagtcacctgcgaagggggcaatggcctgggctgtgggtatggacaacgaagaacaaaataagctgcctcagggagaagtgagtgcctcattcaatacatcgttcaaggaaaagtcattggtagcaaagctatagaagaattacagagttccagatgtggaaaaagccctagacgtcattaactccagtgattatcaggatgtggttcacagatttattgtaagatgcctgtgaattcacccgtgcttaatttttttttccctcaattatcaagatagaaaaagtacaactcttaccatgtgggtatgcaagaaatgttagctgttacaaaaaaaatcgcgtataaaaaagttgaaaaccaaat

SEQ ID NO: 330458 - DNA, 1107 bp, Artificial Sequence
  derived and/or modified sequence
atgattgtgtttgtcagattcaactccagccatgggttccctgttgaagttgactcggatacatccatttttcagcttaaagaagtggttgccaagaggcagggggtgccagcagatcagctgcgagtgatcttcgctggcaaggaactccgaaacgattggaccgttcagaactgcgacctggaccagcagtccatcgtccatatcgtgcagcggccatggcgaaagggtcaggaaatgaacgcgactgggggtgacgaccctcgcaatgctgcgggtggatgtgaaagagagcctcaatctctcacgagggtcgacctgtcttcttcggttctgccgggagactccgtgggtctcgcggttatactacacaccgactcccgtaaagactctccacccgcaggatcgcccgcaggacgctccatatataattctttctatgtttattgtaaggggccatgccagagagtgcagccaggcaaactgcgggtgcagtgttcaacttgtcggcaagctactctgacacttacgcaagggccaagctgctgggatgatgtactaatcccgaatagaatgtcaggcgaatgccaatcaccccattgtccgggaacgagcgccgaatttttttttaaatgcggtgcccacccaaccagcgataaggaaaccagtgtggctctgcatctcatagccaccaactccagaaacatcacttgtataacgtgtactgacgttaggtcccctgtgctagttttccaatgtaattctaggcacgtcatctgtctggattgctttcacttgtattgcgttacccgactcaatgaccgacagttcgttcatgatccccaactcgggtactcccttccatgcgtggcgggatgtcccaactctcttataaaagaactacaccacttcaggattcttggcgaggaacagtacaacaggtaccagcagtacggtgcagaagagtgcgttttgcaaatgggcggtgtgctctgtcccagacctgggtgtggggctggtcttttgcccgaacctgaccagaggaaggtaacatgcgaaggcggtaatggcctgggctgtggatacggccaacgtaggactaagtag

SEQ ID NO: 330459 - DNA, 1107 bp, Artificial Sequence
  derived and/or modified sequence
atgatcgtgttcgtgagattcaacagcagccacggcttccccgtggaggtggacagcgacaccagcatcttccagctgaaggaggtggtggccaagagacagggcgtgcccgccgaccagctgagagtgatcttcgccggcaaggagctgagaaacgactggaccgtgcagaactgcgacctggaccagcagagcatcgtgcacatcgtgcagagaccctggagaaagggccaggagatgaacgccaccggcggcgacgaccccagaaacgccgccggcggctgcgagagagagccccagagcctgaccagagtggacctgagcagcagcgtgctgcccggcgacagcgtgggcctggccgtgatcctgcacaccgacagcagaaaggacagcccccccgccggcagccccgccggcagaagcatctacaacagcttctacgtgtactgcaagggcccctgccagagagtgcagcccggcaagctgagagtgcagtgcagcacctgcagacaggccaccctgaccctgacccagggccccagctgctgggacgacgtgctgatccccaacagaatgagcggcgagtgccagagcccccactgccccggcaccagcgccgagttcttcttcaagtgcggcgcccaccccaccagcgacaaggagaccagcgtggccctgcacctgatcgccaccaacagcagaaacatcacctgcatcacctgcaccgacgtgagaagccccgtgctggtgttccagtgcaacagcagacacgtgatctgcctggactgcttccacctgtactgcgtgaccagactgaacgacagacagttcgtgcacgacccccagctgggctacagcctgccctgcgtggccggctgccccaacagcctgatcaaggagctgcaccacttcagaatcctgggcgaggagcagtacaacagataccagcagtacggcgccgaggagtgcgtgctgcagatgggcggcgtgctgtgccccagacccggctgcggcgccggcctgctgcccgagcccgaccagagaaaggtgacctgcgagggcggcaacggcctgggctgcggctacggccagagaagaaccaagtag

SEQ ID NO: 330460 - DNA, 657 bp, Artificial Sequence
  derived and/or modified sequence
atgaatgcaacggggggcgacgacccacggaacgctgctggtggctgcgaaagggaaccacagtccctcaccagggtcgatttgtcgtcctccgtactccccggtgatagcgtcggtctggcggtgatcctgcacaccgattctcggaaagattccccccctgctggatccccagctgggaggtctatctacaacagtttttatgtgtactgcaaaggcccgtgtcaacgagtgcagccaggtaagctgcgagtccagtgcagtacctgccgtcaagccaccctgactctcacacaagggccttcctgttgggatgatgtcctaataccaaacaggatgtccggcgagtgtcagagcccccattgcccagggacttctgcagaatttttttttaagtgcggagcacatcctactagtgataaggaaaccagcgtggcgctacatcttattgccacaaactctcggaatatcacttgcatcacttgtaccgacgtccgaagcccagtgttggttttccagtgcaattccagacacgttatctgcctcgactgtttccacctgtactgcgtgacaaggcttaatgatcgccaattcgtgcacgatccgcagttagggtacagcctaccatgcgtggtgtccctgctacctagccaatag

SEQ ID NO: 330461 - DNA, 657 bp, Artificial Sequence
  derived and/or modified sequence
atgaatgccactggaggagatgaccccagaaatgctgctgggggctgtgagcgggagccccagagcctgaccagggtggacctgagcagctctgtgctgcccggggacagcgtgggcctggccgtcatcctgcacacagacagcaggaaggacagccccccagctggcagccctgctggccgcagcatctacaacagcttctacgtgtactgcaagggcccctgccagagggtgcagcccgggaagctgcgggtgcagtgcagcacctgccggcaggccaccctgaccctgacccagggccccagctgctgggatgatgtgctgatccccaacaggatgtctggagagtgccagagcccccactgccccggcaccagcgctgagttcttcttcaagtgtggggcccaccccaccagtgacaaggagacctctgtggccctgcacctgattgccaccaacagcaggaacatcacctgcatcacctgcacagatgtgcgcagccctgtgctggtgttccagtgcaacagccgccacgtgatctgcctggactgcttccacctgtactgtgtgacccggctgaatgaccggcagtttgtgcatgacccccagctgggctacagcctgccctgtgtggtgtccctgctgcccagccagtag

SEQ ID NO: 330462 - DNA, 657 bp, Artificial Sequence
  derived and/or modified sequence
atgaacgccaccggcggcgacgacccccggaacgccgccggcggctgcgaaagggaaccgcagagcctgacaagagtggatctcagcagttccgtactgcccggggattccgtggggctggctgtaatcctgcataccgattcgcggaaagactcccccccagcgggtagtcctgccggcagaagtatttataatagcttttatgtgtattgcaaggggccatgccagcgtgtccaaccggggaagctgagggttcaatgtagcacttgcaggcaggctacattgacactgacacaaggacctagttgctgggacgacgtgttgattcccaataggatgtcaggtgaatgtcagagtccacactgccccggaaccagcgctgaattcttttttaagtgcggcgcccaccctaccagcgacaaggagacctccgtggccctgcacctgattgctaccaatagtagaaatattacatgcatcacctgtaccgatgtgaggagtcccgtcttagtgttccaatgtaattcacgtcatgtcatatgtcttgactgtttccatctgtactgcgtgactcgcctgaatgacagacagttcgtgcacgacccgcaattaggctatagtctcccttgcgttgtgagcctcctgcctagccagtag

SEQ ID NO: 330463 - DNA, 794 bp, Artificial Sequence
  derived and/or modified sequence
gacagggggttccggctgaccagttgcgtgtgattttcgcagggaaggagctgaggaatgactggactgtgcagaattgtgacctggatcagcagagcattgttcacattgtgcagagaccgtggagaaaaggtcaagaaatgaatgcaactggaggcgacgaccccagaaacgcggcgggaggctgtgagcgggagccccagagcttgactcgggtggacctcagcagctcagtcctcccaggagactctgtggggctggctgtcattctgcacactgacagcaggaaggactcaccaccagctggaagtccagcaggtagatcaatctacaacagcttttatgtgtattgcaaaggcccctgtcaaagagtgcagccgggaaaactcagggtacagtgcagcacctgcaggcaggcaacgctcaccttgacccagggtccatcttgctgggatgatgttttaattccaaaccggatgagtggtgaatgccaatccccacactgccctgggactagtgcagaatttttctttaaatgtggagcacaccccacctctgacaaggaaacatcagtagctttgcacctgatcgcaacaaatagtcggaacatcacttgcattacgtgcacagacgtcaggagccccgtcctggttttccagtgcaactcccgccacgtgatttgcttagactgtttccacttatactgtgtgacaagactcaatgatcggcagtttgttcacgaccctcaacttggctactccctgccttgtgtggtaagccttctgccttcacaa

SEQ ID NO: 330464 - DNA, 657 bp, Artificial Sequence
  derived and/or modified sequence
atgaacgcaaccggcggagatgatcccaggaacgcggctgggggttgtgagagggaaccccagagtctcaccagggttgacctgtcaagttctgtcctgccaggagattcagtgggcctcgccgtgatcctgcacacggattctcgcaaagacagtccacccgcagggagtcctgcaggacgatccatctacaatagcttctatgtgtactgtaaaggaccttgtcagcgagtccagcctggtaagctcagagtgcagtgttccacttgcagacaggctaccctgacgctgactcaagggcctagctgttgggatgacgttctcatacccaatcgcatgtctggagagtgccaaagcccccactgccctggaacgagtgccgaattctttttcaaatgtggcgctcaccctacaagtgacaaagaaacaagcgttgctctgcatctgatcgccactaacagtaggaacataacctgcataacgtgcaccgacgtccggtctcctgttctggtatttcagtgcaactcgagacatgtgatttgtttggattgctttcacctgtactgcgtgaccaggctgaacgaccgtcagtttgtgcacgatccccaactaggttatagcctaccttgcgttgtttctctgcttccatctcagtag

SEQ ID NO: 330465 - DNA, 657 bp, Artificial Sequence
  derived and/or modified sequence
atgaacgccaccggcggcgacgaccccagaaacgccgccggcggctgcgagagagagccccagagcctgaccagagtggacctgagcagcagcgtgctgcccggcgacagcgtgggcctggccgtgatcctgcacaccgacagcagaaaggacagcccccccgccggcagccccgccggcagaagcatctacaacagcttctacgtgtactgcaagggcccctgccagagagtgcagcccggcaagctgagagtgcagtgcagcacctgcagacaggccaccctgaccctgacccagggccccagctgctgggacgacgtgctgatccccaacagaatgagcggcgagtgccagagcccccactgccccggcaccagcgccgagttcttcttcaagtgcggcgcccaccccaccagcgacaaggagaccagcgtggccctgcacctgatcgccaccaacagcagaaacatcacctgcatcacctgcaccgacgtgagaagccccgtgctggtgttccagtgcaacagcagacacgtgatctgcctggactgcttccacctgtactgcgtgaccagactgaacgacagacagttcgtgcacgacccccagctgggctacagcctgccctgcgtggtgagcctgctgcccagccagtag

SEQ ID NO: 330466 - DNA, 429 bp, Artificial Sequence
  derived and/or modified sequence
tctgtgtttgtgcggttcaacagtagtcacggctttcccgtggaggtcgatagtgacacctctatcttccagttgaaggaggtcgtcgccaagagacagggcgttcctgcagaccaactccgcgtgatattcgccggcaaggagctgcgtaacgactggaccgttcagaactgcgatctggatcaacaatccattgtccacatcgtccaacgcccgtggagaaaggggcaagagatgaatgcaactggcggggatgatccaagaaatgctgccggtggctgcgagagggagcctcagtcactgacgcgggtcgacttatctagttcagtgctaccaggggactccgttggcctggctgtgatccttcacaccgactctaggaaggattcaccaccagccggcagccctggcaactgcctccacgggtag

SEQ ID NO: 330467 - DNA, 429 bp, Artificial Sequence
  derived and/or modified sequence
tctgtgtttgtgcgcttcaacagcagccacggcttccctgtggaggtggacagcgacaccagcatcttccagctgaaggaggtggtggccaagaggcagggcgtgcctgctgaccagctgcgggtcatctttgctgggaaggagctgagaaatgactggacagtgcagaactgtgacctggaccagcagagcatcgtgcacatcgtgcagaggccctggaggaagggccaggagatgaatgccactggaggagatgaccccagaaatgctgctgggggctgtgagcgggagccccagagcctgaccagggtggacctgagcagctctgtgctgcccggggacagcgtgggcctggccgtcatcctgcacacagacagcaggaaggacagccccccagctggcagccctggcaactgcctgcatggatag

SEQ ID NO: 330468 - DNA, 429 bp, Artificial Sequence
  derived and/or modified sequence
agcgtgttcgtgcggttcaacagcagccacggcttccccgtggaggtggacagcgatacgtcaattttccaactgaaggaggtggtggccaaacgtcaaggggtgcctgcggatcagttacgcgtaattttcgcgggcaaagaattgaggaacgattggacagtacaaaattgcgacttggatcaacagagcatagtgcatatcgtccagaggccctggcgcaaaggacaggagatgaacgcaaccggcggagacgaccctaggaacgcagcaggcggctgcgaaagagagccacaaagcctgacacgggttgatttgtccagctcagtgttgcccggtgactctgtcgggttggcagtgattctccacaccgactctaggaaggattctccccccgctggaagccctggaaactgtctgcacggctag

SEQ ID NO: 330469 - DNA, 426 bp, Artificial Sequence
  derived and/or modified sequence
tcagtgtttgtcaggttcaactccagccatggtttcccagtggaggtcgattctgacaccagcatcttccagctcaaggaggtggttgctaagcgacagggggttccggctgaccagttgcgtgtgattttcgcagggaaggagctgaggaatgactggactgtgcagaattgtgacctggatcagcagagcattgttcacattgtgcagagaccgtggagaaaaggtcaagaaatgaatgcaactggaggcgacgaccccagaaacgcggcgggaggctgtgagcgggagccccagagcttgactcgggtggacctcagcagctcagtcctcccaggagactctgtggggctggctgtcattctgcacactgacagcaggaaggactcaccaccagctggaagtccaggtaattgtctgcatgga

SEQ ID NO: 330470 - DNA, 429 bp, Artificial Sequence
  derived and/or modified sequence
tcggtgtttgtcaggttcaactcgtcacacggatttcctgtggaggtggacagtgacaccagtatctttcagttaaaggaggtggtagctaaacgccagggtgtccccgctgaccagctgagggtgattttcgcagggaaggaactgagaaacgactggaccgttcagaattgcgaccttgaccagcagtccatcgttcacattgtacagcgaccttggcgcaagggccaggaaatgaatgctactgggggagacgaccctcgcaatgctgccggaggttgtgaacgtgaaccgcagtcgctgactcgcgtcgatctttccagtagcgttttgcccggtgactcggtcggactcgctgtcatcttacatactgattcacggaaagacagcccacccgctggttcacccggaaattgcctgcatgggtag

SEQ ID NO: 330471 - DNA, 429 bp, Artificial Sequence
  derived and/or modified sequence
agcgtgttcgtgagattcaacagcagccacggcttccccgtggaggtggacagcgacaccagcatcttccagctgaaggaggtggtggccaagagacagggcgtgcccgccgaccagctgagagtgatcttcgccggcaaggagctgagaaacgactggaccgtgcagaactgcgacctggaccagcagagcatcgtgcacatcgtgcagagaccctggagaaagggccaggagatgaacgccaccggcggcgacgaccccagaaacgccgccggcggctgcgagagagagccccagagcctgaccagagtggacctgagcagcagcgtgctgcccggcgacagcgtgggcctggccgtgatcctgcacaccgacagcagaaaggacagcccccccgccggcagccccggcaactgcctgcacggctag

SEQ ID NO: 330472 - DNA, 453 bp, Artificial Sequence
  derived and/or modified sequence
atgacccacgacaagtcttggcggaggtgctccatcagcggctctaccaagtgtcgatgcggctcccgcattgccggacccaatgctctggggtcggggggatcccgttcttcctcgtctagttcacgaagtatactctcctcttcaattttgtccagctcgattccctcttcgtcctcttcaagtagttcaccaagctcttcacctagctcaagctctccaagcagttctcacagcagttccagcccctcttcctcaagtagcactagttcgccatccagctccagcagctctagttcttcttcaccgtcctccagcaactcttcttctagctccagttcttccagtccaagtagcagcagctctagctcaagtagctctcctagctcctcatcttccagcccaagcagctcgtcgagttcttcctctagtagcccttcaagctcctcctag

SEQ ID NO: 330473 - protein, 206 aa, Artificial Sequence
  derived and/or modified sequence
MESDQRKVVGDGGSISKGKICSLKARAVLIDMEEGVVNEILQGPLRDVFDTKQLITDISGSGNNWAVGHKVFGSLYQDQILEKFRKSAEHCDCLQCFFIIHSMGGGTGSGLGTFLLKVLEDEFPEVYRFVTSIYPSGEDDVITSPYNSILAMKELNEHADCVLPIDNQSLFDIISKIDLMVNSGKLGTTVKPKSLVTSSSGALKKQ

SEQ ID NO: 330474 - DNA, 621 bp, Artificial Sequence
  derived and/or modified sequence
atggagagcgaccagagaaaggtggtgggcgacggcggcagcatcagcaagggcaagatctgcagcctgaaggccagagccgtgctgatcgacatggaggagggcgtggtgaacgagatcctgcagggccccctgagagacgtgttcgacaccaagcagctgatcaccgacatcagcggcagcggcaacaactgggccgtgggccacaaggtgttcggcagcctgtaccaggaccagatcctggagaagttcagaaagagcgccgagcactgcgactgcctgcagtgcttcttcatcatccacagcatgggcggcggcaccggcagcggcctgggcaccttcctgctgaaggtgctggaggacgagttccccgaggtgtacagattcgtgaccagcatctaccccagcggcgaggacgacgtgatcaccagcccctacaacagcatcctggccatgaaggagctgaacgagcacgccgactgcgtgctgcccatcgacaaccagagcctgttcgacatcatcagcaagatcgacctgatggtgaacagcggcaagctgggcaccaccgtgaagcccaagagcctggtgaccagcagcagcggcgccctgaagaagcagtag

SEQ ID NO: 330475 - DNA, 621 bp, Artificial Sequence
  derived and/or modified sequence
atggagagtgatcagaggaaggtagttggggatgggggatccatatcaaagggtaaaatctgtagtcttaaggccagggccgtattgatcgatatggaggaaggagtggtgaatgagattttgcagggtccactgagggacgttttcgacactaaacagctcattaccgatatctcgggtagtgggaacaactgggctgttggccacaaggtttttggatccttatatcaagatcagatactggaaaagtttagaaagtctgccgagcactgcgattgtctccagtgcttctttattatccatagcatgggcgggggcaccggctccgggctcggcacctttcttctgaaggtgttagaagacgaattcccagaggtctaccggtttgtcacgtccatctacccaagcggcgaagacgatgtgattacctcaccgtacaactccatcttggctatgaaagagctgaacgagcacgccgactgcgttctgcctattgacaaccagagccttttcgatataatcagcaagatcgatctaatggtgaattccggcaagctgggaactacagtaaagcctaaatcactcgtgactagttcttccggggcactcaaaaaacaatag

SEQ ID NO: 330476 - DNA, 621 bp, Artificial Sequence
  derived and/or modified sequence
atggagtccgatcagcgaaaagttgtgggcgatgggggtagcatttctaagggtaagatttgctcacttaaggctcgagctgtgctgatcgacatggaggagggtgtcgtgaatgagatcctccagggcccccttagggacgtttttgacactaagcagctaattacagacatttctggaagtgggaataactgggcagtgggacataaggtgttcggatctctgtaccaggatcaaatcctggagaagtttcgcaaatctgcagagcattgtgattgtctgcagtgcttctttataatccattccatgggtggaggcacaggatccggcctggggaccttcctcttaaaggtattggaggacgaattccccgaggtctaccgtttcgttactagcatttatccatctggtgaagacgatgtcatcaccagcccctacaacagcatccttgcaatgaaagaacttaatgagcatgcggactgtgtgctaccaattgataaccagagtctgttcgatattatatccaagattgaccttatggtgaactcggggaagctgggtaccacagtgaaacctaagtccctagtgacatcctcttcgggcgccctgaagaagcagtag

SEQ ID NO: 330477 - DNA, 621 bp, Artificial Sequence
  derived and/or modified sequence
atggagagtgaccagaggaaggtggtgggagatggcggcagcatcagcaagggcaagatctgcagcctgaaggcccgggctgtgctgattgacatggaggagggcgtggtgaatgagatcctgcagggccccctgagagatgtgtttgacaccaagcagctgatcacagacatcagcggcagcggcaacaactgggccgtgggccacaaggtgtttggcagcctgtaccaggaccagatcctggagaagttcaggaagtctgctgagcactgtgactgcctgcagtgcttcttcatcatccacagcatgggcggcggcactggaagtggcctgggcaccttcctgctgaaggtgctggaggatgagttccctgaggtgtacagatttgtgaccagcatctaccccagcggggaggatgatgtgatcaccagcccctacaacagcatcctggccatgaaggagctgaatgagcacgccgactgtgtgctgcccatcgacaaccagagcctgtttgacatcatcagcaagattgacctgatggtgaacagcggcaagctgggcaccaccgtgaagcccaagagcctggtgaccagcagcagcggggccctgaagaagcagtag

SEQ ID NO: 330478 - DNA, 621 bp, Artificial Sequence
  derived and/or modified sequence
atggagagcgaccagcggaaggtggtgggcgacggcggcagcatctctaagggcaagatctgcagcctaaaggctcgcgcagtgctgatcgacatggaggagggtgttgtgaacgaaatcctacaagggccacttcgggacgtattcgataccaagcaactcattaccgatattagtgggtccggcaataactgggccgtcggacacaaagtcttcgggagcctataccaggaccagatactggagaagttcagaaagagtgcagagcactgtgactgtctacagtgcttctttattattcattccatgggcggcggcaccggatccggcctgggaacgttcctcctgaaagttttagaggacgagtttcctgaggtctaccggttcgtgacatccatttacccaagtggggaagatgatgttatcacctctccttacaactctattctcgctatgaaagagcttaatgagcacgctgactgcgtattgcccattgacaatcagagtctctttgacatcattagcaaaattgatctgatggtaaactccggaaagctcgggaccacggtaaaaccgaagagtctggttacttccagcagcggtgccctgaaaaaacagtag

SEQ ID NO: 330479 - DNA, 621 bp, Artificial Sequence
  derived and/or modified sequence
atggagagcgaccagcggaaggtggtgggcgacggcggcagcatcagcaaggggaaaatctgctccctgaaggcacgggccgtactgatagatatggaggaaggagtcgtgaacgaaattttgcagggcccactcagagacgtttttgacacaaagcagctgattaccgacataagtgggtccggcaacaactgggcagtcggacataaggttttcggttctttgtatcaggaccagatattggaaaaatttaggaagtctgccgagcattgtgattgtctgcaatgcttcttcatcattcattccatgggcgggggcacaggaagcggactgggcacctttctgctgaaagtcctggaagacgagttccctgaagtttaccggtttgtaacctccatttatccttctggagaagacgacgtcatcacatcaccatataactccatcctggcaatgaaagagctcaacgaacacgccgattgtgttctacccatagacaaccaatcgctgtttgacatcattagtaaaattgatctgatggttaatagcgggaagctggggacaacagtgaaacccaagtctctcgtgacctcttcttcaggtgccctgaagaagcaatag

SEQ ID NO: 330480 - DNA, 621 bp, Artificial Sequence
  derived and/or modified sequence
atggagtccgatcagaggaaagtggtgggcgatggtggaagtattagtaagggtaagatatgtagtcttaaagcacgcgctgtgttaattgatatggaggaaggggtggttaatgaaattcttcagggtccgctccgtgacgtcttcgatactaaacagctgattaccgacatttcaggatctgggaacaactgggccgtgggacataaagtgttcggatccctatatcaggaccagatcttggagaagtttagaaaatcagctgagcactgtgactgtctgcagtgcttttttatcatacacagcatgggaggcggaacaggttcaggccttggcacatttctgctaaaggtgctggaagacgaattccccgaagtctatagatttgtgaccagcatctacccttcgggcgaggacgatgtcatcactagcccatacaattcaatccttgccatgaaggagctgaatgagcacgccgattgcgttttacccatcgacaaccagtcactgttcgacatcatttcgaagattgatctgatggtgaacagcggcaaactcggtacaactgtgaagcctaagagcctggtcacctcctcctctggagcactaaagaaacaatag

SEQ ID NO: 330481 - DNA, 621 bp, Artificial Sequence
  derived and/or modified sequence
atggaatctgatcagcgaaaggtggtgggagacggcggatctatctcaaaggggaagatttgcagcctgaaggctcgggcagtgctgattgacatggaggagggtgtggtgaatgagatcctccagggcccattgcgcgacgtgttcgatactaaacagctcattaccgatattagcggtagcggtaataactgggccgtcggtcacaaagtgtttggctctctctaccaagatcagatcctggaaaagttccggaaaagcgctgaacactgtgactgcttgcagtgcttttttattatccattcaatgggcggtggcacgggctcggggctcggcacctttctcctgaaggttttggaagatgaattcccagaggtttatcgatttgttactagtatctaccctagcggtgaggatgacgtgatcacgtcgccttacaatagcatcctggcaatgaaagagctgaacgagcacgccgactgcgtcctgcctatcgacaaccagtccctgttcgacattatttccaagatcgatttaatggtgaacagtggtaaactgggcacaaccgttaagccaaagagcctcgtgacatctagctccggggctctcaagaaacagtag

SEQ ID NO: 330482 - DNA, 2050 bp, Artificial Sequence
  derived and/or modified sequence
atggaatcagaccaaaggaaagtggttggtgatggtggaagtatttccaagggaaaaatatgttctttaaaagcacgagcagtcttgattgatatggaagaaggggtagtgaatgaaattctgcagggaccactgagagatgtatttgatacgaaacagctcatcactgatatttctggctcaggaaataattgggccgtgggtcacaaagttttcggcagtctttaccaagaccagattttagagaaattcagaaagtcggcagagcactgtgattgcttgcagtgtttctttataatacattccatgggaggaggaacaggatctggacttggcacatttcttttaaaggtgcttgaagacgaattcccagaagtatacagatttgtgacttccatttatccttctggtgaggatgatgtcataacctcaccttataatagcatcttggcaatgaaggaacttaatgagcatgcagactgtgtattgcccattgacaatcaatctttatttgacatcattagcaaaatcgacctcatggtgaattctggaaagttgggtacaactgtgaagccaaagagtctggttacttcaagttctggggctttaaaaaagcagcataagaagccctttgatgcaatgaataacattgtggcaaatttgctcctcaacctaacgagctctgcaagatttgaagggtcccttaatatggaccttaatgaaatcagcatgaatttagttccttttcctcaacttcattatctcgtgtcaagcctaacacctctgtatacactgacagatgttaacattcctcctagaagattggatcagatgttttcagatgcctttagtaaagatcaccagctgcttcgggcagaccccaaacacagtctttacctcgcctgtgcactcatggttagaggaaatgtacaaatttcagatcttcgtagaaatattgaaagattaaaaccatctctacaatttgtctcctggaatcaagaaggctggaagaccagcctgtgttccgtacctcctgtgggccattctcattcgttattagctttagcaaataacacatgtgtgaagcccaccttcatggaactgaaagagagattcatgaggctctacaagaaaaaggctcaccttcatcactatctacaagttgaagggatggaagaaagctgtttcacagaagctgtgtcatctttatcagcactcatacaggaatatgaccaactggacgccacaaaaaacatgcctgtgcaggatttacccagactaagcatagctatgtgaaaaagaaaccctcaaaaatactttcttaatttcacattgttttttctgacctttctgtttcaacatttttgtaatttggaaactccagttttttcatattatcgggaaatatttttgtctaaaagagtgatttctgtttaatcgcaatttgttggtaataccaatgtgtgaaattagtgaaatcttagtaccttaacttcaaacatttctcttcagaaaagttcccttttctaaaattgagataacatagttcttgaatattttgctgtatttatagcctcatatttaggcatttatgcactgatgtgtcttcaataaaaatcttgtacagatatatttttataattatttataatttatattttgatattctatttaagttatcctgattctttaaaagtagttattgggagtagaagaacacaatataaatatttccgtgtaatagccaccaacttttcaggcataggttttattacaactgttaaggaggttttgcttcttctttagataacaacttgtttgcccaaaagaatcctaatttgtacacttaacatgtatttgtattaaactttttaaataattgctttcttatcaaaccaattgattttataataaatgtctatatttttcaacagtgctacttgttattgttctgcatgacatttatgcaaatgaacagaatgttactaagcttgatatcttccaaactttgcaataaatggctataattgttccggttactataatcttc

SEQ ID NO: 330483 - DNA, 625 bp, Artificial Sequence
  derived and/or modified sequence
ggtgaccatggaatcagaccaaaggaaagtggttggtgatggtggaagtatttccaagggaaaaatatgttctttaaaagcacgagcagtcttgattgatatggaagaaggggtagtgaatgaaattctgcagggaccactgagagatgtatttgatacgaaacagctcatcactgatatttctggctcaggaaataattgggccgtgggtcacaaagttttcggcagtctttaccaagaccagattttagagaaattcagaaagtcggcagagcactgtgattgcttgcagtgtttctttataatacattccatgggaggaggaacaggatctggacttggcacatttcttttaaaggtgcttgaagacgaattcccagaagtatacagatttgtgacttccatttatccttctggtgaggatgatgtcataacctcaccttataatagcatcttggcaatgaaggaacttaatgagcatgcagactgtgtattgcccattgacaatcaatctttatttgacatcattagcaaaatcgacctcatggtgaattctggaaagttgggtacaactgtgaagccaaagagtctggttacttcaagttctggggctttaaaaaagcag

SEQ ID NO: 330484 - DNA, 108 bp, Artificial Sequence
  derived and/or modified sequence
agcccaaacaagctgttgttcgaccctcgcgtggggggtcgagtgtcccatgtgttcttcctgttccctccatttgtgctgctgcctggccctccgggactgccctag

SEQ ID NO: 330485 - protein, 124 aa, Artificial Sequence
  derived and/or modified sequence
MALVPCQVLRMAILLSYCSILCNYKAIEMPSHQTYGGSWKFLTFIDLFVVAVFWIIYAYDREMIYPKLLDNFIPGWLNHGMHTTVLPFILIEMRTSHHQYPSRSSGLTAICTFSVGYILWVCWV

SEQ ID NO: 330486 - DNA, 579 bp, Artificial Sequence
  derived and/or modified sequence
atgaccaaggtgctgagaatggccatcctgctgagctactgcagcatcctgtgcaactacaaggccatcgagatgcccagccaccagacctacggcggcagctggaagttcctgaccttcatcgacctggtgatccaggccgtgttcttcggcatctgcgtgctgaccgacctgagcagcctgctgaccagaggcagcggcaaccaggagcaggagagacagctgaagaagctgatcagcctgagagactggatgctggccgtgctggccttccccgtgggcgtgttcgtggtggccgtgttctggatcatctacgcctacgacagagagatgatctaccccaagctgctggacaacttcatccccggctggctgaaccacggcatgcacaccaccgtgctgcccttcatcctgatcgagatgagaaccagccaccaccagtaccccagcagaagcagcggcctgaccgccatctgcaccttcagcgtgggctacatcctgtgggtgtgctgggtgcaccacgtgaccggcatgtgggtgtaccccttcctggagcacatcggccccggcgccagatag

SEQ ID NO: 330487 - DNA, 375 bp, Artificial Sequence
  derived and/or modified sequence
atggccctggtgccctgccaggtgctgagaatggccatcctgctgagctactgcagcatcctgtgcaactacaaggccatcgagatgcccagccaccagacctacggcggcagctggaagttcctgaccttcatcgacctgttcgtggtggccgtgttctggatcatctacgcctacgacagagagatgatctaccccaagctgctggacaacttcatccccggctggctgaaccacggcatgcacaccaccgtgctgcccttcatcctgatcgagatgagaaccagccaccaccagtaccccagcagaagcagcggcctgaccgccatctgcaccttcagcgtgggctacatcctgtgggtgtgctgggtgtag

SEQ ID NO: 330488 - DNA, 579 bp, Artificial Sequence
  derived and/or modified sequence
atgactaaggtgctccgcatggcaatactgctctcttactgttcaatactgtgcaattacaaagccattgagatgcctagccaccaaacatatggggggtcctggaagtttctgacatttattgacctggtcatacaagccgtctttttcggaatctgcgtgctcacagatctgagcagcctacttaccagggggtccgggaatcaggaacaggagcggcagctgaaaaaactaatcagtctgcgtgattggatgctggcagtgctcgcttttccagtcggcgtgtttgttgtcgccgtgttctggataatctatgcctatgacagagagatgatatatcccaaacttctagacaactttatccctgggtggctaaaccacggtatgcatactacagtgctcccattcatcttgattgagatgaggacgtcccaccaccagtaccccagtagatcgtctgggcttaccgcaatttgtacgttttcagtgggatatatcttgtgggtgtgctgggtacaccacgtaacaggtatgtgggtctacccattcttggaacacatcggacccggcgccaggtag

SEQ ID NO: 330489 - DNA, 375 bp, Artificial Sequence
  derived and/or modified sequence
atggcactcgtgccatgtcaggtgctgagaatggctatcctgctatcctactgctctatattgtgcaactacaaggccattgaaatgccatcgcaccagacatacggaggctcttggaaattcctaaccttcatcgatcttttcgtcgttgccgtgttttggataatttatgcgtacgaccgggagatgatataccctaaactgttggataattttatcccagggtggcttaaccatgggatgcataccaccgtactccctttcattcttattgagatgaggaccagccaccatcaatacccatcaaggagttctggactgaccgccatctgtacgttcagtgttggctatatcttatgggtttgctgggtctag

SEQ ID NO: 330490 - DNA, 579 bp, Artificial Sequence
  derived and/or modified sequence
atgaccaaggtgctgaggatggccatcctgctgagctactgcagcatcctgtgcaactacaaggccatcgagatgcccagccaccagacctatggaggctcctggaagttcctgaccttcatcgacctggtgatccaggccgtgttcttcggcatctgtgtgctgacagacctgagcagcctgctgacccggggcagcggcaaccaggagcaggagcggcagctgaagaagctgatcagcctgcgggactggatgctggccgtgctggccttccctgtgggcgtgtttgtggtggccgtgttctggatcatctatgcctatgaccgggagatgatctaccccaagctgctggacaacttcatccctggctggctgaaccacggcatgcacaccaccgtgctgcccttcatcctgattgagatgaggaccagccaccaccagtaccccagccgcagcagcggcctgacagccatctgcaccttctctgtgggctacatcctgtgggtgtgctgggtgcaccacgtgacaggcatgtgggtgtaccccttcctggagcacatcggccctggggccaggtag

SEQ ID NO: 330491 - DNA, 375 bp, Artificial Sequence
  derived and/or modified sequence
atggccctggtgccctgccaggtgctgaggatggccatcctgctgagctactgcagcatcctgtgcaactacaaggccatcgagatgcccagccaccagacctatggaggctcctggaagttcctgaccttcatcgacctgtttgtggtggccgtgttctggatcatctatgcctatgaccgggagatgatctaccccaagctgctggacaacttcatccctggctggctgaaccacggcatgcacaccaccgtgctgcccttcatcctgattgagatgaggaccagccaccaccagtaccccagccgcagcagcggcctgacagccatctgcaccttctctgtgggctacatcctgtgggtgtgctgggtgtag

SEQ ID NO: 330492 - DNA, 727 bp, Artificial Sequence
  derived and/or modified sequence
cgcccactagccacagggcccgcttccccctggagatcagcgcgcacttcccgagccctcgtagcactcagaggtcgcatccacacctgggatgcctagggggcgcctcctggccgggtgtcccgggaccctgcgaacgcaggagcagaatgacgaaggtgctgcggatggcaatcctgctgtcttactgctctatcctgtgtaactacaaggccatcgaaatgccctcacaccagacctacggagggagctggaaattcctgacgttcattgatctggttatccaggctgtcttttttggcatctgtgtgctgactgatctttccagtcttctgactcgaggaagtgggaaccaggagcaagagaggcagctcaagaagctcatctctctccgggactggatgttagctgtgttggcctttcctgttggggtttttgttgtagcagtgttctggatcatttatgcctatgacagagagatgatatacccgaagctgctggataattttatcccagggtggctgaatcacggaatgcacacgacggttctgccctttatattaatcgagatgaggacatcgcaccatcagtatcccagcaggagcagcggacttaccgccatatgtaccttctctgttggctatatattatgggtgtgctgggtgcatcatgtaactggcatgtgggtgtaccctttcctggaacacattggcccaggagccagaat

SEQ ID NO: 330493 - DNA, 444 bp, Artificial Sequence
  derived and/or modified sequence
cgcccccgcgcgcccggcgcctccctcacgcccgccctccttgccgcccagccggtccaggcctctggcgaacatggcgcttgtcccctgccaggtgctgcggatggcaatcctgctgtcttactgctctatcctgtgtaactacaaggccatcgaaatgccctcacaccagacctacggagggagctggaaattcctgacgttcattgatctgtttgttgtagcagtgttctggatcatttatgcctatgacagagagatgatatacccgaagctgctggataattttatcccagggtggctgaatcacggaatgcacacgacggttctgccctttatattaatcgagatgaggacatcgcaccatcagtatcccagcaggagcagcggacttaccgccatatgtaccttctctgttggctatatattatgggtgtgctgggt

SEQ ID NO: 330494 - DNA, 579 bp, Artificial Sequence
  derived and/or modified sequence
atgaccaaggtgctgcggatggccatcctgctgagctactgcagcattttgtgcaattacaaagcgatcgaaatgccctctcatcagacctatgggggatcgtggaagttccttaccttcattgatctggtcatccaggctgtgttttttgggatatgcgttcttactgatctgtccagtctgcttactcggggatctggcaatcaagaacaggaaaggcagcttaagaaactgatcagcttacgggattggatgctggctgtgctggcattccctgtaggggtgtttgttgtggccgtgttctggattatctacgcctacgatcgggaaatgatatacccaaagcttctggacaatttcatccctggctggctgaatcatggcatgcacaccacggtcttgccctttatcctcatcgaaatgcgcactagtcaccaccagtatccatcccggagctctgggctcactgcaatttgcacatttagcgtcggatacatactgtgggtgtgctgggtacaccacgtgaccgggatgtgggtgtacccattcctggagcacatcggaccaggggcacgctag

SEQ ID NO: 330495 - DNA, 375 bp, Artificial Sequence
  derived and/or modified sequence
atggccctggtgccctgccaggtgctgcggatggccatcctgctgtcctactgctccatcctgtgcaactacaaagccattgaaatgccaagccatcagacctacggaggcagctggaagttcttgacttttatagatctcttcgttgtcgcagtgttctggatcatttacgcttacgatagggagatgatctaccctaagctgctggacaacttcatcccgggttggttaaaccacggcatgcacactactgtcctcccgtttatcctcatagagatgaggaccagtcatcatcaatatccatccagatctagtggcctaacagcaatatgcactttctctgtaggctacatactctgggtatgttgggtctag

SEQ ID NO: 330496 - DNA, 579 bp, Artificial Sequence
  derived and/or modified sequence
atgaccaaggtgttgagaatggcaatcttactgtcatactgttccattctctgtaattataaggccatcgagatgccaagtcaccagacttacggcggaagctggaaatttctgacttttattgacttggttatccaggcagtgttcttcggtatctgtgtcctgaccgatctgagctccctactgacacgcggatctgggaatcaggaacaggagaggcagttaaagaagcttatcagccttagggattggatgttggccgtgctcgcctttccagtgggagtgtttgttgtcgctgtgttctggattatttacgcatacgacagggagatgatatacccaaaactcctggacaactttatccctgggtggctgaatcatggtatgcataccactgtgttaccttttatactgattgaaatgagaacatctcaccaccagtacccctcccggtccagcggattgactgcaatttgcaccttcagtgtcggatacatcttatgggtttgttgggtccaccacgtgacgggtatgtgggtgtacccctttttagagcacatcggtccaggagccagatag

SEQ ID NO: 330497 - DNA, 375 bp, Artificial Sequence
  derived and/or modified sequence
atggctctggtgccttgccaggtgttgcggatggctattctgcttagctattgttccatcctgtgtaactacaaggcaatcgagatgcctagtcatcagacatacggtggtagctggaaattcctgactttcatcgacctttttgttgtagccgtcttttggattatatatgcttatgaccgcgagatgatctacccaaagctgcttgacaatttcattcccggttggttgaatcacgggatgcatacaactgttctgcccttcattctgattgagatgcgaacctcccaccaccagtacccctctaggtccagcggactgactgccatttgtacattctccgtgggttacatcctctgggtatgctgggtatag

SEQ ID NO: 330498 - DNA, 1188 bp, Artificial Sequence
  derived and/or modified sequence
atgaagatccccctgaacaagttccccggcttcgccaagcccggcaccgagcagtacctgctggccaagcagctggccaagcccaaggagaagatccccatcatcgtgggcgactacggccccatgtgggtgtaccccaccagcaccttcgactgcgtggtggccgaccccagaaagggcagcaagatgtacggcctgaagagctacatcgagtaccagctgacccccaccaacaccaacagaagcgtgaaccacagatacaagcacttcgactggctgtacgagagactgctggtgaagttcggcagcgccatccccatccccagcctgcccgacaagcaggtgaccggcagattcgaggaggagttcatcaagatgagaatggagagactgcaggcctggatgaccagaatgtgcagacaccccgtgatcagcgagagcgaggtgttccagcagttcctgaacttcagagacgagaaggagtggaagaccggcaagagaaaggccgagagagacgagctggccggcgtgatgatcttcagcaccatggagcccgaggcccccgacctggacctggtggagatcgagcagaagtgcgaggccgtgggcaagttcaccaaggccatggacgacggcgtgaaggagctgctgaccgtgggccaggagcactggaagagatgcaccggccccctgcccaaggagtaccagaagatcggcaaggccctgcagagcctggccaccgtgttcagcagcagcggctaccagggcgagaccgacctgaacgacgccatcaccgaggccggcaagacctacgaggagatcgccagcctggtggccgagcagcccaagaaggacctgcacttcctgatggagtgcaaccacgagtacaagggcttcctgggctgcttccccgacatcatcggcacccacaagggcgccatcgagaaggtgaaggagagcgacaagctggtggccaccagcaagatcaccctgcaggacaagcagaacatggtgaagagagtgagcatcatgagctacgccctgcaggccgagatgaaccacttccacagcaacagaatctacgactacaacagcgtgatcagactgtacctggagcagcaggtgcagttctacgagaccatcgccgagaagctgagacaggccctgagcagattccccgtgatgtag

SEQ ID NO: 330499 - DNA, 1188 bp, Artificial Sequence
  derived and/or modified sequence
atgaaaatccctctgaacaagtttcctggcttcgccaaaccagggaccgagcagtatcttctagccaagcaactagccaagcccaaagagaaaatccctatcatcgtgggggactacggtcctatgtgggtttacccaacctcgacttttgactgcgtagtcgccgatccccgcaaagggtccaagatgtacgggctcaaatcatacatcgagtatcagctaacgcccaccaataccaaccgctccgttaaccatcggtataagcattttgactggttgtacgagcgcctgctggtcaagtttgggtctgcaatcccgatcccaagtctgcccgacaagcaagtgactggcagattcgaggaggaatttatcaaaatgcggatggaaaggctgcaagcttggatgacacgcatgtgcagacaccccgttatatctgaatctgaagtgtttcaacagtttctgaattttcgggacgagaaggaatggaagaccgggaagaggaaggcggaacgtgatgaattggccggtgtgatgatctttagcaccatggagcccgaggcgcccgatttggatctggtggagatcgaacagaaatgcgaagctgtgggcaaatttaccaaagctatggacgacggagttaaggagctactgaccgtgggccaggagcactggaaaaggtgtacaggtccactgcctaaggagtatcagaagatcggcaaggccctacagtcactagccaccgtcttttcttcttccggataccagggggagacagatttaaatgacgccatcactgaagcagggaaaacatacgaggagatcgctagcctggtggccgagcagcctaaaaaggatctgcactttttgatggagtgcaaccacgagtataaggggtttttgggctgtttccccgacatcataggaacccacaagggcgctattgagaaagtgaaggaatcagataaactcgtggccacgtctaaaattaccctgcaagataaacaaaacatggtgaagagagtctcaatcatgtcatatgcacttcaggcagagatgaatcactttcactctaatcgcatttatgattataattctgtcattcggctgtacttggaacagcaggtccagttctacgagaccatcgctgaaaagctccgccaagctttgtccaggttccctgtgatgtag

SEQ ID NO: 330500 - DNA, 1188 bp, Artificial Sequence
  derived and/or modified sequence
atgaagatccccctgaacaagtttcctggctttgccaagccaggcacagagcagtacctgctggccaagcagctggccaagcccaaggagaagatccccatcatcgtgggggactatggccccatgtgggtgtaccccaccagcacctttgactgtgtggtggccgaccccaggaagggcagcaagatgtatggcctgaagagctacatcgagtaccagctgacccccaccaacaccaacagatctgtgaaccaccgctacaagcactttgactggctgtatgaaaggctgctggtgaagtttggaagtgccatccccatccccagcctgcctgacaagcaggtgacaggccgctttgaggaggagttcatcaagatgaggatggagcggctgcaggcctggatgaccaggatgtgccgccaccctgtgatcagcgagagcgaggtgttccagcagttcctgaacttcagagatgagaaggagtggaagacaggcaagaggaaggccgagagagatgagctggccggcgtgatgatcttcagcaccatggagcctgaggccccagacctggacctggtggagattgagcagaagtgtgaggccgtgggcaagttcaccaaggccatggatgatggagtgaaggagctgctgactgtgggccaggagcactggaagcgctgcaccggccccctgcccaaggagtaccagaagattggcaaggccctgcagagcctggccaccgtcttcagcagcagcggctaccagggcgagacagacctgaatgatgccatcacagaagctgggaagacctatgaggagatcgccagcctggtggccgagcagcccaagaaggacctgcacttcctgatggagtgcaaccacgagtacaagggcttcctgggctgcttcccagacatcatcggcacccacaagggggccatcgagaaggtgaaggagagtgacaagctggtggccaccagcaagatcaccctgcaggacaagcagaacatggtgaagagggtgtccatcatgtcctatgccctgcaggccgagatgaaccacttccacagcaaccgcatctatgactacaacagcgtcatccggctgtacctggagcagcaggtgcagttctatgagaccatcgccgagaagctgcggcaggccctgagccgcttccctgtgatgtag

SEQ ID NO: 330501 - DNA, 1188 bp, Artificial Sequence
  derived and/or modified sequence
atgaagatccccctgaacaagttccccggcttcgccaagcccggcactgaacagtacctgcttgcaaaacagttggctaagcctaaggagaagattccaattattgtaggggattatgggcccatgtgggtgtatccaacgtccacctttgattgcgtcgtggccgacccgagaaaagggagcaagatgtatggacttaaaagctacattgagtatcagctgaccccaacaaataccaatcggagcgtgaatcaccgctacaaacacttcgactggctgtacgagcgactcttggtaaaattcggaagtgcaatacctatcccgtcgctgcctgacaaacaggtcacaggtagattcgaggaagagttcatcaagatgaggatggagagactccaagcatggatgacccggatgtgccgacaccccgttattagcgaatccgaggtttttcagcagtttttgaactttcgggatgagaaggaatggaaaaccgggaaaagaaaagccgagcgcgacgaactggcaggagtgatgatcttctccacaatggagccagaggctccagacctggatctggtggaaatcgagcagaaatgcgaggccgttggaaagttcaccaaggctatggatgacggagtgaaggagctgctaaccgtgggtcaggagcactggaaacgatgcactggccctcttccaaaggagtaccagaaaattggtaaagcccttcagtccctcgccactgtgttcagcagttctgggtaccaaggagagaccgacctgaacgatgccataaccgaagctggaaagacctatgaggaaatcgctagtctggtggccgaacaaccgaagaaggacctccattttctcatggaatgcaatcatgaatacaagggcttcctggggtgctttccagacataataggtactcacaagggtgcaatcgagaaggttaaggaatctgataagctcgtggctactagtaaaattacactccaggataagcagaacatggtgaaacgggtctctatcatgtcatacgctttacaggccgagatgaatcacttccactccaatagaatatatgactacaattcagtgattaggctttatcttgagcagcaggtccagttctacgaaacaatcgccgagaaattgcggcaggctttatctagattcccagtgatgtag

SEQ ID NO: 330502 - DNA, 1188 bp, Artificial Sequence
  derived and/or modified sequence
atgaaaatcccacttaataagttccccggattcgcaaaacccggtacagagcagtacctgctggctaagcaactggcgaagcccaaggagaaaatacctattatcgtcggtgattacggaccaatgtgggtgtaccctactagtaccttcgactgcgttgtggcggatcctcggaagggaagcaagatgtacgggttgaaatcttacatcgaataccagctgacgcctacaaataccaatagatcggtgaatcataggtacaagcacttcgactggctctatgagcggctcctggtgaagttcggtagtgcgatcccgatcccctctctaccagacaaacaggtaaccggacgatttgaggaggaatttataaaaatgcgcatggagaggctgcaggcctggatgacccgcatgtgcaggcacccagttattagtgagagtgaggtgtttcagcagtttctgaactttagggatgagaaagagtggaaaaccggtaaacgtaaagcagagagagacgaattggccggagtgatgatattttcaacgatggagcctgaagcccctgacctggatttagtagaaattgagcagaagtgcgaagctgtggggaaattcactaaagcaatggatgacggtgtaaaagaactgctgacggtgggccaagaacattggaagaggtgcactgggcctcttccaaaggaatatcagaagatcgggaaagcgttacaaagcctggcaaccgtgttcagcagttctggctaccagggagaaacagacttaaatgatgccatcactgaggctgggaagacgtacgaggagatcgcaagccttgttgcagagcaaccgaaaaaagatctgcatttccttatggagtgcaatcacgaatacaaagggtttctggggtgtttcccggatattatcggtacgcataaaggggctatcgagaaggtaaaagagagcgataaactggttgccaccagtaaaattaccctccaggacaaacaaaacatggttaagagggtttccattatgtcttacgccttgcaggctgaaatgaatcatttccattcaaaccggatctacgactataacagtgtcatcaggctctatctggaacagcaagtgcaattttatgagactatcgccgagaaactgcgacaggctttaagccggttcccagtcatgtag

SEQ ID NO: 330503 - DNA, 393 bp, Artificial Sequence
  derived and/or modified sequence
gagccgagccgagccgagctgggggcgcagagcgcgggaggcggcggcggcgcggagcccagatggagtttccctcttgttgcccgagccagagtacagtggtgtgatctcggttcactgcaacctctgcctcccaggttcaagcgattctcctgcctcagcctcccgagtggctgggattacaggtggctccgctgccggatgggagtgccccagtgtgctggatgaagctggcgcatgcaccatgtcatcatgtgtctctagccagcccagcagcaaccgggccgccccccaggatgagctggggggcaggggcagcagcagcagcgaaagccagaagccctgtgaggccctgcggggcctctcatccttgagcatccacctgggcatgga

SEQ ID NO: 330504 - DNA, 550 bp, Artificial Sequence
  derived and/or modified sequence
aagtcgcgaggtgcatccgcttcggctgcagtaggtggtggcggcggcagccctgggtggggtcccataggggcatctgagaagtcactggagctagcgtttccgggaaacctggagactcgctgagtggcgggggtcgtcggctgcccctctgcccagcaagggcttttctagatgttatcatcaggcaatcgctgcacctgtcgcagcccccaagccacctcttccagaagtaaccataaccttgcttccttcttaggctatttactgaggacccactggatgtcaagcattgtgcatagttttcttcgattgttgcaacatcccttgcgagagtttcactcctgttgcccaggctggagtgcaatggcatgatctcagctcaccgcaacctccgcctcctgagttcaagcagttctcctgcctcagcctcctgaatagctcggattacagtttctggagcagcagagctgaaggaacccaaacttggactgaagtgactctactaaggtcagctctatggctcttccacatgattcaaacgaaactt

SEQ ID NO: 330505 - DNA, 1428 bp, Artificial Sequence
  derived and/or modified sequence
ctattttaaagttaccagttcagaaaaagctggttctagcacgtaggtctgatagaccatattctaaaggtcagctaaaaaggactttcaaaccagggcaagtaagattgtccgtagcattttggggccagaatggctttagtctctgagttgccacagggtaaggtaagaactatgagcaggtccttccaactcatgattcctaagttccagaaaagttaacaggccacagcttacattgggagctgaagattatctgggtcagttggctgtctttggtatttggctcgactttatgatatatgatgggaataatcagcttctgaatgccagtaaggttggggaagtgctgagaggagggactaggcagatttattaccaagtggttaatttttcatctctctggcctctgtataagtatgcagataagttacatgtaattcttctctacaaaactctccatcagttagtggtagagcctgttaaagtagcagcttggtattatgaatctgctaggctcttaaacacttacggacttctaggtatgaatgtagctggtataagctggcacctgtacatattccatttagtttgtaccgatacctctgtaagttcttcagcccctctgccctgtcccctacctttgattcatcaaatgcttataatttttgtttggagactactgcgtgcatgcctctattgctcttccttggctcttattatttggtcctactcctaactcacctgataactccaacttttggtagattttgttcctgtctcttatagtgtcccaacttggtttcttcctaccaaacaaaaagacacgggaagtatctgtagtagaatgtttctggtatccagttggcaaatggaaactgaggttggccccaactgttcttagaccacctttaggttttgttgatcttaatgaaatacacagcattgcatttcattccttttcatttaaactataaaattatatcaaatgatgcctacattaagattctccctataagactgccattccagatggcaaaaggtgaatagtcataatagaaaccaattcttaagcacatgtgtggtattcccttgaccacaccctgggccatggtatctgttaatatgaaagcacatggggaaccacagaggagaatggcctaggtggtggctgctgtttgctgaggtgtgctgcttactcaagcaggagggcacctctgactgcttgggatctccttttttttttttctttttttagacagagttttgctcttgtcactcaggctggagtgcaattttgtagtcttggctcacctcaacctctacctcccaggagaatcgcttgaacccaggaggcagaggttgcagtgagccgagttcacaccactgcaccactccagcctgggcgacaagagtgagactccatct

SEQ ID NO: 330506 - protein, 122 aa, Artificial Sequence
  derived and/or modified sequence
MSAVCGGAARMLRTPGRHGYAAEFSPYLPGRLACATAQHYGIAGCGTLLILDPDEAGLRLFRSFDWNDGLFDVTWSENNEHVLITCSGDGSLQLWDTAKAAGPLQVYKEHAQEYVQGSCVVK

SEQ ID NO: 330507 - DNA, 369 bp, Artificial Sequence
  derived and/or modified sequence
atgtctgccgtatgcggcggcgctgccaggatgctgaggactcctggtcgacatgggtacgctgcggagttctctccctacctgccaggaagattggcatgtgcaacagcgcagcactacggaatcgccggatgtggcacactgttgatccttgatcccgatgaagctggccttagactcttcagaagctttgactggaatgatgggctttttgacgtgacctggagcgaaaataatgagcatgtactcatcacctgctctggggacggctcacttcagctgtgggacacggccaaggcagctgggccacttcaagtttacaaagaacatgctcaagaatacgtgcagggaagttgtgtggtaaaatag

SEQ ID NO: 330508 - DNA, 369 bp, Artificial Sequence
  derived and/or modified sequence
atgtctgctgtgtgtggcggggccgccaggatgctgcggaccccaggccgccacggctatgctgctgagttcagcccctacctgcccggccgcctggcctgtgccacagcccagcactacggcattgctggctgcggcaccctgctgatcctggaccctgatgaggccggcctgcggctcttccgcagctttgactggaatgatggcctgtttgatgtgacctggagcgaaaataatgaacatgtgctgatcacctgcagcggagatggcagcctgcagctgtgggacacagccaaggctgctggccccctgcaggtgtacaaggagcacgcccaggagtatgtgcagggcagctgtgtggtgaagtag

SEQ ID NO: 330509 - DNA, 369 bp, Artificial Sequence
  derived and/or modified sequence
atgagcgccgtgtgcggcggcgccgcccggatgctgcggacccccggaaggcacggatacgcggctgaattttctccttacctacctggcaggctagcgtgtgcaaccgcccagcactacggaattgctggctgcggtacactgctgattttggacccagatgaggccgggctcaggcttttccgctcctttgactggaatgacggcctgttcgatgtaacctggtctgagaataacgagcacgttctgataacctgtagcggtgatggctccctgcaactttgggatactgcaaaggccgctggccccctgcaagtctacaaagagcacgcacaggaatacgtgcaggggtcgtgtgtggtgaagtag

SEQ ID NO: 330510 - DNA, 680 bp, Artificial Sequence
  derived and/or modified sequence
gcctggtctctctaaccgcgccagtgtgcctccgactcggaacggcttccgcggccggggcagcgagggccgggggcggcgggcgggatgagtgcggtgtgcggtggagcggcgcggatgctgcggacgccgggacgccacggctacgccgccgagttctccccgtacctgccgggccgcctggcctgcgccaccgcgcagcactacggcatcgcgggctgtggaaccctactaatattggatccagatgaagctgggctaaggctttttagaagctttgactggaatgatggtttgtttgatgtgacttggagtgagaacaacgaacatgtcctcatcacctgtagtggcgatggctcgctgcagctctgggacactgccaaagctgcagggccactgcaagtctataaagaacacgctcaggagtatgttcagggaagctgtgttgtgaaatagaagagcaactaatgggtcattttcttctgtggaagagagtatataataaagacgtatagcatggttttagtcaatcttggatttgaatcccagctttgtaagttacctgttgtgagaccttgcgtatgtcacatatttttcctaaacttgagtgtttttatttgcaaactaagtttattagtagtctgtatcacagaccagcattgaataaatatgagctagta

SEQ ID NO: 330511 - DNA, 369 bp, Artificial Sequence
  derived and/or modified sequence
atgtcggccgtgtgcggaggagccgcaagaatgctccggacccccggaaggcatggatacgccgcagagttttcaccttacctacctggtaggttagcgtgtgccaccgcccagcactacgggattgccggatgtggtactttattaatcttagatcccgacgaagcaggattgaggctgttccgatccttcgactggaacgacggacttttcgacgtcacttggagtgagaacaatgagcatgtgcttatcacatgcagtggagacggatccctccagctttgggatacggctaaagccgcagggccactacaggtctacaaagagcatgcccaggagtatgtccaagggtcatgcgtagtcaagtag

SEQ ID NO: 330512 - DNA, 369 bp, Artificial Sequence
  derived and/or modified sequence
atgagcgccgtgtgcggcggcgccgccagaatgctgagaacccccggcagacacggctacgccgccgagttcagcccctacctgcccggcagactggcctgcgccaccgcccagcactacggcatcgccggctgcggcaccctgctgatcctggaccccgacgaggccggcctgagactgttcagaagcttcgactggaacgacggcctgttcgacgtgacctggagcgagaacaacgagcacgtgctgatcacctgcagcggcgacggcagcctgcagctgtgggacaccgccaaggccgccggccccctgcaggtgtacaaggagcacgcccaggagtacgtgcagggcagctgcgtggtgaagtag

SEQ ID NO: 330513 - protein, 570 aa, Artificial Sequence
  derived and/or modified sequence
MGGEWGQSAICPESAQEWTYQVGQHLVDMDLGAITKYSALHAKPNGLILQYGTAGFRTKAEHLDHVMFRMGLLAVLRSKQTKSTIGVMVTASHNPEEDNGVKLVDPLGEMLAPSWEEHATCLANAEEQDMQRVLIDISEKEAVNLQQDAFVVIGRDTRPSSEKLSQSVIDGVTVLGGQFHDYGLLTTPQLHYMVYCRNTGGRYGKATIEGYYQKLSKAFVELTKQASCSGDEYRSLKVDCANGIGALKLREMEHYFSQGLSVQLFNDGSKGKLNHLCGADFVKSHQKPPQGMEIKSNERCCSFDGDADRIVYYYHDADGHFHLIDGDKIATLISSFLKELLVEIGESLNIGVVQTAYANGSSTRYLEEVMKVPVYCTKTGVKHLHHKAQEFDIGVYFEANGHGTALFSTAVEMKIKQSAEQLEDKKRKAAKMLENIIDLFNQAAGDAISDMLVIEAILALKGLTVQQWDALYTDLPNRQLKVQVADRRVISTTDAERQAVTPPGLQEAINDLVKKYKLSRAFVRPSGTEDVVRVYAEADSQESADHLAHEVSLAVFQLAGGIGERPQPGF

SEQ ID NO: 330514 - DNA, 1713 bp, Artificial Sequence
  derived and/or modified sequence
atgggcggcgaatggggccaatccgctatttgccccgaaagcgcccaggaatggacttatcaggtgggccagcatctggttgatatggatttgggggctattactaaatactcagctttgcacgccaagccgaacgggctgattctgcagtacggcaccgccggatttagaacaaaagcagagcacctggatcacgtcatgtttcgcatgggcctccttgctgtgctgagaagcaagcaaacaaaatctactatcggggtgatggtgacggcatcccacaaccctgaagaggacaacggggtcaagctggtggaccctctcggcgaaatgttggcccccagttgggaagagcacgcaacatgcttggctaacgctgaggaacaagatatgcagcgcgtattgatcgatatctcagaaaaggaggctgtgaacttgcagcaggatgccttcgtggtcatagggcgagacacacgtccttcatctgaaaaactgtcccagtcagtgattgatggggtaactgtcctcgggggccaattccatgattatgggctcctcacaaccccccaactacactatatggtttactgtcgaaacacgggcggacgctacggtaaggctaccatcgaaggttattaccagaaactgagcaaggccttcgtggagcttactaagcaggcaagctgctcaggagacgaataccgctcattgaaggtggactgcgctaatggcataggcgccctgaagctgagggagatggaacactatttttcacaagggctgtctgtacagctattcaatgacgggtctaagggtaagctcaaccacctgtgtggcgctgactttgtaaaatctcaccagaagccaccacaaggtatggagatcaagagcaatgagcgctgttgttcctttgacggggacgccgatcgaatcgtgtactactaccacgacgcggacggacatttccacctcatcgacggagacaaaattgcgactctgatcagttcattcttgaaagagctcctggtagagatcggtgagagcctgaatatcggggtggtgcagactgcctacgccaatggtagcagcactaggtacctcgaggaagtgatgaaagtgcccgtgtattgcacgaaaacaggggtgaaacacttacaccacaaggcacaggagttcgacatcggtgtctacttcgaggccaacggtcacggaacggccttgttcagtacagctgtggaaatgaaaattaagcagtctgccgagcagttagaagataaaaaaaggaaggccgccaagatgctggagaacattatcgaccttttcaatcaagccgctggtgatgccatcagtgacatgttggtcatcgaagcaattctcgctctaaaaggcctgaccgtgcagcagtgggatgctttatacaccgacctcccaaacagacaactcaaggttcaggtcgctgaccgtcgggtgatcagcaccactgatgctgagaggcaggccgtcacccctccaggactgcaggaggccataaatgacctcgtgaaaaagtacaaactgtccagggcttttgtccgtccatccgggacggaagacgtcgtgagagtttatgccgaagctgactcccaagaatccgcggaccacttagcccatgaagtctccctggccgtgtttcagctggccggagggattggggaaaggccacaacccggcttctag

SEQ ID NO: 330515 - DNA, 1629 bp, Artificial Sequence
  derived and/or modified sequence
atggatctgggggccataaccaagtatagcgcccttcacgccaagcccaatggattgatcctccagtatgggaccgcggggtttcgaaccaaggcagaacacttggatcacgtcatgttccgcatggggcttctggccgtactgagaagcaagcagactaagagcactataggggtcatggtcaccgcctcccataaccctgaggaggataatggtgttaagcttgtcgatcccttgggggaaatgttagccccatcttgggaggagcacgcaacgtgcctggctaatgccgaagagcaggatatgcaaagggtcctgattgatatttccgagaaagaagcagtgaatttgcagcaggacgcctttgtcgtgatcggacgagataccagaccgagtagcgagaaactctcacaatcagtgatcgacggagtaaccgtcttgggggggcagttccacgattacggcctgcttaccactcctcagttgcactatatggtgtactgtaggaacacggggggcaggtacggcaaggctacaatcgaaggatactaccagaagctctcaaaagcgtttgtggagcttaccaaacaagcttcgtgtagcggggatgaatacaggtcactgaaagttgactgcgctaatggcattggagctctaaaactgagagagatggaacattatttctcacaggggctgtctgtgcagctgtttaacgatggatcaaaagggaaacttaatcacctctgtggagccgactttgtaaaatcacaccaaaaaccccctcagggaatggagattaagagtaatgagcggtgttgctccttcgacggcgacgcggatcgcatcgtatattattatcacgatgcagatggccacttccacctaatcgacggagacaagattgccactctcatatcctcctttttgaaagaactgttggtcgagatcggtgaaagtctcaatattggagtggttcagaccgcctatgcaaatggcagtagcacaagatatttggaggaggtcatgaaggtacctgtttattgtacgaagactggcgtgaagcacctgcaccacaaggcacaggaattcgacatcggtgtatactttgaagctaatggccacgggaccgcactcttctctaccgcagtggagatgaagattaagcagagtgccgaacagctggaggataaaaaacgtaaggctgccaaaatgcttgagaatattatcgatctcttcaaccaggcagcaggggatgccatctctgacatgttggtgatcgaggccatcctggccctcaagggtcttaccgtgcaacaatgggacgctctttatacagacttgccaaacagacaattgaaggttcaagtcgctgataggagagtgatcagtacaactgacgccgaacgccaagccgtgaccccccccggcctgcaggaggccatcaacgatctcgtgaagaaatataaactatctcgcgccttcgttcgcccttccggtaccgaggatgtggtgcgggtctacgctgaggccgacagccaagagtctgccgatcacctggctcatgaagtcagtctcgctgtgttccagctggctggcgggattggcgagcggcctcagcctggcttttag

SEQ ID NO: 330516 - DNA, 1713 bp, Artificial Sequence
  derived and/or modified sequence
atgggcggggagtggggccagagcgccatctgcccagagagcgcccaggagtggacctaccaggtgggccagcacctggtggacatggacctgggcgccatcaccaagtacagcgccctgcacgccaagcccaacggcctcatcctgcagtatggaacagctggcttccgcaccaaggccgagcacctggaccacgtgatgttcaggatgggcctgctggccgtgctgcggagcaagcagaccaagagcaccatcggcgtgatggtgacagccagccacaacccagaagaagataatggagtgaagctggtggaccccctgggggagatgctggcccccagctgggaggagcacgccacctgcctggccaatgctgaggagcaggacatgcagagggtgctgattgacatcagcgagaaggaggccgtgaacctgcagcaggatgcctttgtggtgattggccgggacacccggcccagcagcgagaagctgagccagagcgtgattgatggagtgacagtgctgggcggccagttccatgactatggcctgctgaccaccccccagctgcactacatggtgtactgcagaaatactggaggccgctatggcaaggccaccatcgagggctactaccagaagctgagcaaggcctttgtggagctgaccaagcaggccagctgcagcggagatgagtaccgcagcctgaaggtggactgtgccaacggcatcggggccctgaagctgcgggagatggagcactacttcagccagggcctgtctgtgcagctgttcaatgatggcagcaagggcaagctgaaccacctgtgtggggctgactttgtgaagagccaccagaagccaccccagggcatggagatcaagagcaatgaacgctgctgcagctttgatggagatgctgaccgcatcgtgtactactaccatgatgctgatggccacttccacctgattgatggagacaagatcgccaccctcatcagcagcttcctgaaggagctgctggtggagatcggggagagcctgaacatcggcgtggtgcagacagcctatgccaacggcagcagcacccgctacctggaggaggtgatgaaggtgcctgtgtactgcaccaagacaggagtgaagcacctgcaccacaaggcccaggagtttgatattggagtgtactttgaggccaacggccacggcacagccctcttcagcacagctgtggagatgaagatcaagcagagcgctgagcagctggaggacaagaagaggaaggccgccaagatgctggagaacatcatcgacctcttcaaccaggccgctggagatgccatcagtgacatgctggtgattgaggccatcctggccctgaagggcctgactgtgcagcagtgggatgccctgtacacagacctgcccaaccggcagctgaaggtgcaggtggccgacagaagagtcatcagcaccacagatgctgagcggcaggccgtgaccccacctggcctgcaggaggccatcaatgacctggtgaagaagtacaagctgagccgggcctttgtgcggcccagcggcacagaagatgtggtgcgggtgtatgcagaggccgacagccaggagagcgctgaccacctggcccacgaggtgtccctggccgtgttccagctggccggcggcatcggggagcggccccagcccggcttctag

SEQ ID NO: 330517 - DNA, 1629 bp, Artificial Sequence
  derived and/or modified sequence
atggacctgggcgccatcaccaagtacagcgccctgcacgccaagcccaacggcctcatcctgcagtatggaacagctggcttccgcaccaaggccgagcacctggaccacgtgatgttcaggatgggcctgctggccgtgctgcggagcaagcagaccaagagcaccatcggcgtgatggtgacagccagccacaacccagaagaagataatggagtgaagctggtggaccccctgggggagatgctggcccccagctgggaggagcacgccacctgcctggccaatgctgaggagcaggacatgcagagggtgctgattgacatcagcgagaaggaggccgtgaacctgcagcaggatgcctttgtggtgattggccgggacacccggcccagcagcgagaagctgagccagagcgtgattgatggagtgacagtgctgggcggccagttccatgactatggcctgctgaccaccccccagctgcactacatggtgtactgcagaaatactggaggccgctatggcaaggccaccatcgagggctactaccagaagctgagcaaggcctttgtggagctgaccaagcaggccagctgcagcggagatgagtaccgcagcctgaaggtggactgtgccaacggcatcggggccctgaagctgcgggagatggagcactacttcagccagggcctgtctgtgcagctgttcaatgatggcagcaagggcaagctgaaccacctgtgtggggctgactttgtgaagagccaccagaagccaccccagggcatggagatcaagagcaatgaacgctgctgcagctttgatggagatgctgaccgcatcgtgtactactaccatgatgctgatggccacttccacctgattgatggagacaagatcgccaccctcatcagcagcttcctgaaggagctgctggtggagatcggggagagcctgaacatcggcgtggtgcagacagcctatgccaacggcagcagcacccgctacctggaggaggtgatgaaggtgcctgtgtactgcaccaagacaggagtgaagcacctgcaccacaaggcccaggagtttgatattggagtgtactttgaggccaacggccacggcacagccctcttcagcacagctgtggagatgaagatcaagcagagcgctgagcagctggaggacaagaagaggaaggccgccaagatgctggagaacatcatcgacctcttcaaccaggccgctggagatgccatcagtgacatgctggtgattgaggccatcctggccctgaagggcctgactgtgcagcagtgggatgccctgtacacagacctgcccaaccggcagctgaaggtgcaggtggccgacagaagagtcatcagcaccacagatgctgagcggcaggccgtgaccccacctggcctgcaggaggccatcaatgacctggtgaagaagtacaagctgagccgggcctttgtgcggcccagcggcacagaagatgtggtgcgggtgtatgcagaggccgacagccaggagagcgctgaccacctggcccacgaggtgtccctggccgtgttccagctggccggcggcatcggggagcggccccagcccggcttctag

SEQ ID NO: 330518 - DNA, 1713 bp, Artificial Sequence
  derived and/or modified sequence
atgggcggcgagtggggccagagcgccatctgccccgagagcgcccaggaatggacctaccaagtgggccagcatcttgtggatatggatctgggggctatcaccaaatatagtgcacttcacgctaaacctaatggcctaatcttgcagtacgggactgctgggtttcgcacaaaagccgagcaccttgaccacgttatgtttcgcatgggactgctggctgttctgcgcagcaagcaaacaaagtccacaattggcgtcatggttacggcatcgcacaaccctgaggaagataacggcgtgaagctggtggatcctctcggtgaaatgttagcacctagttgggaagagcacgcaacatgcctcgccaatgcggaggaacaggacatgcagcgtgttctgatcgatatttccgagaaggaggctgttaacctgcagcaggatgcctttgtggtgattggtcgggataccaggcctagtagcgagaagctgagtcagtctgttatagatggggtcactgtgctgggtggccagttccacgactatggccttctaaccaccccacagctacactatatggtctactgcagaaacactggaggccgctacggaaaagcaaccatcgaggggtactaccaaaagttgagcaaagcctttgtcgagcttacaaaacaggcctcatgttcaggagacgagtatcggtctcttaaggtcgattgcgccaatggcattggagcactgaaactgagggagatggaacactatttcagtcaggggctttcggtacagctattcaatgacggatcaaaaggcaagttgaaccacctatgtggtgccgattttgtgaaatctcaccagaaaccgcctcagggaatggagatcaagtccaacgaaagatgctgcagctttgacggggacgctgacagaattgtctactactaccacgatgctgatgggcattttcatcttatcgatggggacaaaatcgccacgctgatctcttcttttttaaaggaactgttagtggaaattggagaatctctcaacatcggggtggtccagacagcatatgctaatggaagctcaaccagatatttggaggaggtgatgaaagtccctgtgtattgtaccaagacgggagtgaaacatctgcatcataaggcccaggagtttgacattggggtctattttgaagctaacggccacggaactgccctgtttagcaccgcggttgagatgaaaatcaagcagtccgccgaacaactggaggacaaaaagcggaaggccgcgaagatgctagaaaacataatcgatctgtttaatcaagccgcaggcgatgctatctccgatatgctcgttatagaagcaatactcgcattgaaaggactcacagtgcagcagtgggatgccctgtatacagacctacccaatagacagctgaaggtgcaggtagcagacaggagagttatttcgaccacggacgccgaacggcaggcagtaacgccacccggcttacaggaagcaattaacgatttagtgaagaagtacaaattgtcacgagcgttcgtgagaccatcaggcacagaagacgtcgtgagagtatatgctgaagcagatagccaggagtcggcagatcaccttgcccacgaggtgtctctggctgtgtttcagctcgctggcggaatcggtgaaagacctcagcctggattctag

SEQ ID NO: 330519 - DNA, 1629 bp, Artificial Sequence
  derived and/or modified sequence
atggacctgggcgccatcaccaagtacagcgccctgcacgccaagccaaacggtctgattctgcagtacgggacggcagggtttcgaaccaaggctgaacatctggaccatgtgatgttccgcatgggattactcgccgttttaaggagcaaacagaccaaatcaactatcggggtaatggtcaccgcctcgcacaatcctgaagaggataacggcgtgaagttggtggatccactgggcgagatgctggctccatcttgggaggagcatgccacttgtcttgcaaacgcagaggagcaggacatgcagcgtgtgctgatcgacatatcggaaaaggaagccgtgaatttgcagcaggacgcctttgtggtgattggccgggatacccgaccctcttccgaaaaactgagccagtctgtgatcgatggggtaacagtcctaggcggccaatttcacgattacggcttgctgacgactccccaactgcattatatggtatactgtcgtaacacaggtggcagatatggcaaagcaaccatagaaggctactaccagaaattgagcaaagcctttgtggagctgactaaacaagcaagttgttcgggtgatgagtaccgtagcctgaaagtggattgtgctaacggaattggggccttgaaactgcgggaaatggagcattattttagtcagggcctgtcagtgcagctttttaacgatgggagtaaggggaagttgaatcacctgtgtggggctgatttcgtgaagtcacatcagaaacccccgcaaggcatggaaataaaatccaatgagaggtgctgttcctttgacggggatgctgataggattgtgtactactaccatgacgccgacggtcacttccacttaatcgacggagataagatcgccacattgatcagctcattcttgaaagagctgctggtagaaattggagaatctctgaatatcggtgttgttcagacagcctacgccaacgggtctagcacccgttaccttgaggaagtaatgaaggtgccggtttattgcaccaagacgggagtgaaacacctgcatcataaagcccaggagtttgatataggcgtgtattttgaagctaatggccacgggactgctttgttcagtactgctgtggagatgaagattaaacagagtgcagaacaactggaagacaaaaagcggaaagctgctaagatgctggagaacattatagacctgttcaaccaagcagccggcgatgccatcagcgatatgctggtgattgaagccattctggctctgaaggggctaaccgtgcaacagtgggatgccttatatactgacctccctaataggcagcttaaggtgcaggtcgccgatcgcagggttattagtacaacagatgcggaacgtcaggcagtgactccccctggcctgcaagaggccatcaatgaccttgttaagaagtacaagttgagcagagcttttgttaggccaagcggcactgaagacgttgtgagagtttacgcggaggcagacagtcaggagagtgctgatcacctcgcccacgaggtatctctagccgtcttccagctggccggggggatcggcgaaagacctcagccaggattttag

SEQ ID NO: 330520 - DNA, 1971 bp, Artificial Sequence
  derived and/or modified sequence
aacaccgcggtggccttttcgcttgggccgcattccagggctccggacgtttacgattcactggcctctgccccgagggacccaggataaggttgagagtggaccaatttaagtgtgcccggcgtccaggatagtcctggagctaaaatgggaggagagtggggacaatctgctatctgccctgagtctgcccaggagtggacataccaagttggacaacatcttgtagacatggatttaggtgctattacaaaatactcagcattacacgccaagcccaatggactgatccttcaatacgggactgctggatttcgaacgaaggcagaacatcttgatcatgtcatgtttcgcatgggattattagctgtcctgaggtcaaaacagacaaaatccactataggagtcatggtaacagcgtcccacaatcctgaggaagacaatggtgtaaaattggttgatcctttgggtgaaatgttggcaccatcctgggaggaacatgccacctgtttagcaaatgctgaggaacaagatatgcagagagtgcttattgacatcagcgagaaagaagctgtgaatctgcaacaagatgcctttgtagttattggtagagataccaggcccagcagtgagaaactttcacaatctgtaatagatggtgtgactgttctaggaggtcaattccatgattatggcttgttaacaacaccccagctgcactacatggtgtattgtcgaaacacgggtggccgatatggaaaggcaactatagaaggttactaccagaaactctctaaggcttttgtggaactcaccaaacaggcttcttgcagtggagatgaatacagatcacttaaggttgactgtgcaaatggcataggggccctgaagctaagggaaatggaacactacttctcacagggcctgtcagttcagctgtttaatgatgggtccaagggcaaactcaatcatttatgtggagctgactttgtgaaaagtcatcagaaacctccacagggaatggaaattaagtccaatgaaagatgctgttcttttgatggagatgcagacagaattgtttattactaccatgatgcagatggccactttcatctcatagatggagacaagatagcaacgttaattagcagtttccttaaagagctcctggtggagattggagaaagtttgaatattggtgttgtacaaactgcatatgcaaatggaagttcaacacggtatcttgaagaagttatgaaggtacctgtctattgcactaagactggtgtaaaacatttgcaccacaaggctcaagagtttgacattggagtttattttgaagcaaatgggcatggcactgcactgtttagtacagctgttgaaatgaagataaaacaatcagcagaacaactggaagataagaaaagaaaagctgctaagatgcttgaaaacattattgacttgtttaaccaggcagctggtgatgctatttctgacatgctggtgattgaagcaatcttggctctgaagggcttgactgtacaacagtgggatgctctctatacagatcttccaaacagacaacttaaagttcaggttgcagacaggagagttattagcactaccgatgctgaaagacaagcagttacacccccaggattacaggaggcaatcaatgacctggtgaagaagtacaagctttctcgagcttttgtccggccctctggtacagaagatgtcgtccgagtatatgcagaagcagactcacaagaaagtgcagatcaccttgcacatgaagtgagcttggcagtatttcagctggctggaggaattggagaaaggccccaaccaggtttctgaagataattttcatattcctgagaaactggactttttacaagtctttacaaaactgtcaataataatggcagtactaagagatttataatcataatgtttacaatgcagcct

SEQ ID NO: 330521 - DNA, 556 bp, Artificial Sequence
  derived and/or modified sequence
gactcgcggaccgcccccccccaacaccgcggtggccttttcgcttgggccgcattccagggctccggacgtttacgattcactggcctctgccccgagggacccaggataaggacatggatttaggtgctattacaaaatactcagcattacacgccaagcccaatggactgatccttcaatacgggactgctggatttcgaacgaaggcagaacatcttgatcatgtcatgtttcgcatgggattattagctgtcctgaggtcaaaacagacaaaatccactataggagtcatggtaacagcgtcccacaatcctgaggaagacaatggtgtaaaattggttgatcctttgggtgaaatgttggcaccatcctgggaggaacatgccacctgtttagcaaatgctgaggaacaagatatgcagagagtgcttattgacatcagcgagaaagaagctgtgaatctgcaacaagatgcctttgtagttattggtagagataccaggcccagcagtgagaaactttcacaatctgtaatagatggtgtgactgttct

SEQ ID NO: 330522 - DNA, 6107 bp, Artificial Sequence
  derived and/or modified sequence
gagccggaagccacgcagggccacgtctgcggttctgaggactgggtttgggtgcagacgttgttgcttgggcgcttctccgctgcgtgtaggtgaagggggcttcctgaccgagacatggatttaggtgctattacaaaatactcagcattacacgccaagcccaatggactgatccttcaatacgggactgctggatttcgaacgaaggcagaacatcttgatcatgtcatgtttcgcatgggattattagctgtcctgaggtcaaaacagacaaaatccactataggagtcatggtaacagcgtcccacaatcctgaggaagacaatggtgtaaaattggttgatcctttgggtgaaatgttggcaccatcctgggaggaacatgccacctgtttagcaaatgctgaggaacaagatatgcagagagtgcttattgacatcagcgagaaagaagctgtgaatctgcaacaagatgcctttgtagttattggtagagataccaggcccagcagtgagaaactttcacaatctgtaatagatggtgtgactgttctaggaggtcaattccatgattatggcttgttaacaacaccccagctgcactacatggtgtattgtcgaaacacgggtggccgatatggaaaggcaactatagaaggttactaccagaaactctctaaggcttttgtggaactcaccaaacaggcttcttgcagtggagatgaatacagatcacttaaggttgactgtgcaaatggcataggggccctgaagctaagggaaatggaacactacttctcacagggcctgtcagttcagctgtttaatgatgggtccaagggcaaactcaatcatttatgtggagctgactttgtgaaaagtcatcagaaacctccacagggaatggaaattaagtccaatgaaagatgctgttcttttgatggagatgcagacagaattgtttattactaccatgatgcagatggccactttcatctcatagatggagacaagatagcaacgttaattagcagtttccttaaagagctcctggtggagattggagaaagtttgaatattggtgttgtacaaactgcatatgcaaatggaagttcaacacggtatcttgaagaagttatgaaggtacctgtctattgcactaagactggtgtaaaacatttgcaccacaaggctcaagagtttgacattggagtttattttgaagcaaatgggcatggcactgcactgtttagtacagctgttgaaatgaagataaaacaatcagcagaacaactggaagataagaaaagaaaagctgctaagatgcttgaaaacattattgacttgtttaaccaggcagctggtgatgctatttctgacatgctggtgattgaagcaatcttggctctgaagggcttgactgtacaacagtgggatgctctctatacagatcttccaaacagacaacttaaagttcaggttgcagacaggagagttattagcactaccgatgctgaaagacaagcagttacacccccaggattacaggaggcaatcaatgacctggtgaagaagtacaagctttctcgagcttttgtccggccctctggtacagaagatgtcgtccgagtatatgcagaagcagactcacaagaaagtgcagatcaccttgcacatgaagtgagcttggcagtatttcagctggctggaggaattggagaaaggccccaaccaggtttctgaagataattttcatattcctgagaaactggactttttacaagtctttacaaaactgtcaataataatggcagtactaagagatttataatcataatgtttacaatgcagcctactggattgtctctagatctgtttttcttaaacactaacagaataattctttataaataggtaagccttacacttgttaaagaaatttacctctaatttcagtctcactaatgtaaaatactgggacttaagtatacaattcagtcactaactgtacagttttatgtggggaacaattcatgcaggctactggaaaattaaatcttattaccaactccttgtgatatctttgccatcaccatcacatgagcaagatgatgttttgcagcattccccattgctgatacaaatggagagggcagagaagactttatacaaccagtttttccattgcagagtcttaagaaagattattagatgacttacctatatgactaatgccatcaggaactcagaggtatgaatagggggttgtccatccctcttccatactgaggtggagatgctcatgcaatacttttaaggatgcatggtccagccttcagttattcttcactgctcttggtgaaggtatgtgggagaaaaactaattataatacgtttcccagcctctgatggagaaggaacaccattctgataccagaacatggttaataaggaaaagagaaaaatccccaaccaatcttaattgaaccaagtctgaaaccaatggaaaaaaaaaatgggtagtgtatattttgcaggtttaagacaactcaggacaataaaaacaatggactttacatgtgtatatatatagctctcttaggcaccataatcagtatgagccaacaatatttaaacttgattcaggccacattcagacatttgctcttatatacaaatatttaaattaaatacaatctgaaatgtgttctgttacatacaaaaaaggaaaaactatacaacgcagagcagtgtgtgtgttttaaataattacatttacatgtaagctaaatggaaccagcaatggtgctcaagtttttatcatcccttccagaaaatctttttctaccatctcttctattttttgcctggctttgctggaacatggtttgtggttctccagtttcatgtccttattagggaaggcatttgagtagaggataggactccctgagtgtcctccacatcggcttgtgactttgctgttgaagacttgactgagcacattgaagaacggcaggagctgctccatactgcgcacggtgcagatggtgagcagcaagtgccctggctcccaacccaatgttctccctgagttgtcttcctctggatttttctgcagaaaacaaaaagtgaactggtattaatacaacagacaatgtggtatgttagaaaaattaaaaatatataaactttggcaattggtcaagaaatgaatacaaatgacattaagtttctaactcctgacctgatcaaaacccttggtgcttctgagaccttttactgccatttattagttttacatggagcagtctaacattgtagtaatagttcccaactagaatgcgcagataagcttagttaacagaaatagctttgaacaggaatagagtcaaacataaaagttttatgttgtgctttgtatttactcaaaaagctcccaggtttctgaaccctcactactgtaaccaaggactaggtcacaaaattactacagaaaaaaggaacaaagtgctttatacatttcataatatatccccttttattataattagttaattcccttttatctaaatggcctaaatttgccatgatggtagcagtgtccaaagtgaataattactgtcagtactgcatcacagagaaaggaagggatccctcaggagacactgctgtctccttctgggttgtgctaaacaacatagggaggaaagctggacctggagtcaaaggaattgagttagtgtgctggctctgccatacttacggcacccttgggcaggatatacaaaggttcctcacttataaaatgggacagtctaaaactaccttttagtagagaagtcaaatgagaaggtatgtgaaaactctgtcaactaaatataaagactaataatttgggtattaagaggctagtttgagaagccacctgaattacacaaacacagctacagacatcattctgtctagagaaagataagagagaacaggttggttgaacttgggcagaatcacagatacaattccacactaaagaatgaaaataagcaatgaactagacagaaggaagaaatcatgaagacttaggaagcagaattacaatctgtcatattaacaaatggagtttgccttctaagatcagatgttgctcagaaactttcattgtttacctaataatttaatatcactagtttcctagtgggtcaagcagatgcaaaatccagcttattttcttctatgtgctctcaagcttattgcttattttaaagtaaaatcctgaaaaaggaaaatattaggttggtgcaaacgtaattgcggtttttgcattgttgaaatttgccgttttatattggagtacattcttaaataaatgtggttatgttatacatcattttaagcatatttctcactttttttttgctaatgacttattgctgtttatatttattttagactatggaaatgatgttagacaaaaatcaaatttagcgattttctgagttcaaaataggttataaagcagcagagacaacacacaacatcaacaatgcatttggcccaggaactgctaatgaacatacagtgccgtgatggctcaagaagttttgcaaaggagactagagccttgaagatgaggagtgcagtggccagtcatcggaaattgataatgaccaattgagaacatcatcgaagctgatcctcttacaactataagagagctgcccaagaactcaatgttgaccattttatggtcgttcggcatttgaagcaaattgaaaaggtgaaaaagctcaataaatgggtgcctcatgagctgagtgaaaaataaaaaaattcgttgttttgaagtgtcattttctctattctatgcaacaataatgaatcatttctctatcggattgtgatgtgtgccaaaaggtggattttatacgacaactggcgatgaccagctcagtggctggactgaaagaagctccaaagcacttcccaaagccaaacttgctccaaaaaatggtcatggtcattgtttggtggtttgctgccagtctgatccactacagctttctgaatccaggtgaaaccattacatctgataagtatgctcagcaaatcaatgagatgcaccaaaaactgcaatgcctgcagccggcattggccaccagaaagggcccaattcttttcacgacaacactgggccgcacgttgcacaaccaacgcttcgaaaattgaactaattgggctatgaagttttgcctcatctgccatattcacctgacctcttgccaacaaactaccacttctttaggcatctcagcaacgttttgcagggaaattgcttccacaactagcaggacacagaaaatgctttccaagagttcgtcaaatttggaagcatggatttttatgctacaggagtaaacaaacttatttctcattggcaaaaatgtgttgattgtaatggttcctattttaattaataaagatttgtgtgaacctagttataatgacttaaaattcatggtcccaaacagcaattacttttgcaccaaactaaaaatataagttaaaatggaagagtctaggagcaaaccaagaaaagatcacctacttcatcatctctggtcaaaaacaaaccaaaaaacttaacagctatcacttaagtttgcttcctagcaattatttagcttccagtctagattacaggatatataaaactttctttctttctttcttaactatgacactggcaccaatgagagtcctgtgactgactttcacatttccaccattactcaattactggtaccataccacctctaatcccctaaatcaaactgcaattcaacaataaagggcgtacagagatgactttgtcctgaaggaaaatgaatatccttgtaccctctatatagctaacttccaaatgtaagagaactatggggtaaccttttgtttctattcctatcaagatgagcctttaagagagggacttttattaagctcttgaccaagaagaatacacttgattcagagtttctgatgctcttaatcagaactatatgtattgtctcaatattaaataaagtcaaatgtttccatacaaa

SEQ ID NO: 330523 - DNA, 1713 bp, Artificial Sequence
  derived and/or modified sequence
atgggcggagagtggggacagtcagcaatctgcccagagagtgcgcaggagtggacctaccaggttggacagcacctggtcgacatggatctaggagccattacaaagtattccgcactgcacgcaaagcctaacggcttaatcttgcagtacggcacagccggtttcagaacaaaagccgaacaccttgatcatgttatgttccgcatgggccttttggcagtgcttcgctccaagcagacgaagtcaacgattggggttatggttactgctagccacaaccccgaagaagacaatggggtcaaattagtggatcccctaggcgagatgctggcccctagttgggaggagcacgcgacctgcttggccaacgccgaggaacaggatatgcagcgagtgttgattgatatcagcgagaaagaggccgtgaaccttcagcaggacgccttcgtggtgatcgggcgtgacaccagaccttccagtgaaaagctgtcccagtccgtaatagacggggtcacagtcctagggggacaatttcacgattatggacttctgaccacccctcagttacactatatggtctactgccgcaatacgggtggtcggtatggaaaggctacgatcgagggttactaccagaaactgagcaaagccttcgtggagcttaccaaacaggccagctgctcaggggatgaatatcggtccttgaaggtcgactgcgccaatggcataggtgccctgaagttgagagagatggagcattatttcagccaggggttatccgttcagctcttcaacgatggctctaaagggaagctaaaccatctgtgcggagcagattttgtaaaatcccaccagaagcccccacaaggcatggagatcaagtcgaatgaaaggtgttgcagcttcgacggagatgctgaccggattgtctactactatcatgatgctgatggacattttcacctcattgatggcgacaagatcgccaccttgatcagcagcttcttgaaagaactgctggtggagattggggaaagtctgaacatcggagtcgtgcagaccgcatacgcgaacggttcctccacacggtatctggaggaggtcatgaaggtgccggtgtactgcaccaagacaggggtgaagcacctccatcacaaagctcaggaattcgacatcggagtctatttcgaagcaaatggtcatggcacggccctgttcagcaccgccgtcgagatgaagatcaaacaatcagccgagcagcttgaggataagaagagaaaagcagccaagatgttggagaacattatcgatttgttcaatcaggcagccggagacgccatttctgacatgctggtgattgaagccatcctggcattgaaagggcttactgtccaacagtgggacgctctgtacactgatctgcctaatcgacaacttaaagttcaggtggccgataggcgagtcatctctacaactgatgcggagaggcaagccgtgaccccacccggtctgcaggaagcaataaacgatctggtgaagaaatacaaactctccagagctttcgtgcgaccgtctggcaccgaggacgtggtacgggtctacgccgaggcggatagtcaggaatccgctgaccacctggcacatgaggttagcctcgcagtgttccaactggccggtggcatcggagagcggcctcagcccggattctag

SEQ ID NO: 330524 - DNA, 1629 bp, Artificial Sequence
  derived and/or modified sequence
atggacctcggcgctattactaaatactcagcactgcatgccaagccgaacggattaattctgcaatatgggaccgctggatttcgtaccaaagccgaacacctagaccacgtcatgtttcgaatgggactgttggccgtcctgcggtccaaacagacaaagagcactatcggagttatggtcacagcttctcacaacccagaggaggacaacggtgtgaagctcgtagaccctctgggggagatgctggccccttcctgggaggaacacgccacctgtctggccaatgctgaggaacaggacatgcaacgcgttcttatcgacatcagcgagaaggaagccgtgaatttacaacaggacgccttcgtggtgatcggcagagacactcgtccttcgagcgagaagctcagccagtccgtgatcgacggcgtgaccgtcctgggtgggcaattccacgattacggactccttacaacaccgcagttgcattacatggtctattgtcgcaacaccggcggacggtatggcaaggcaacaatcgagggttattaccagaagctgagcaaagcctttgtagagctcaccaaacaggcatcatgctcgggagacgagtacaggtcattgaaggtggactgcgccaacggaatcggagctctgaaactcagggagatggaacattactttagccaaggcttatctgtgcagctgtttaatgatggctcaaagggaaagctgaaccacctgtgcggcgctgacttcgttaaaagccaccagaaaccacctcagggtatggagatcaagagcaatgagaggtgttgcagtttcgacggcgacgccgacagaatcgtgtattactaccatgacgccgacggacacttccacctcattgacggagataagatcgctactttgatctcaagcttcttgaaggagctgttagttgagatcggagagtccctcaacattggagtggttcagacagcatatgctaacggtagttcaacccgctacctggaagaagtgatgaaggtgcccgtatattgcactaaaacgggagtaaagcatctgcaccataaagcccaagagtttgacatcggggtgtacttcgaagccaatggtcatggaaccgcactgttttccaccgcagtggaaatgaagattaagcagagtgcagagcagctcgaagataaaaagaggaaagccgctaagatgctcgaaaacatcatcgatctgtttaaccaggcagcaggagacgctatctctgatatgttggtgatcgaggcgattctcgccttgaagggtttaactgtccagcagtgggacgctctgtataccgacctgccgaatagacagttgaaggtgcaggtggctgaccgaagagttatatctacgacagacgccgagaggcaggccgtcacccctcctgggttgcaagaagccataaatgatctggttaaaaaatacaagctgagccgggcattcgtacgtccgagcggtaccgaggacgtggtaagagtatacgcggaggccgactctcaggagtccgccgaccacctggcacacgaggtgagcctggccgtgttccagctagccggtggcatcggggagaggcctcagccaggattctag

SEQ ID NO: 330525 - DNA, 1713 bp, Artificial Sequence
  derived and/or modified sequence
atgggcggcgagtggggccagagcgccatctgccccgagagcgcccaggagtggacctaccaggtgggccagcacctggtggacatggacctgggcgccatcaccaagtacagcgccctgcacgccaagcccaacggcctgatcctgcagtacggcaccgccggcttcagaaccaaggccgagcacctggaccacgtgatgttcagaatgggcctgctggccgtgctgagaagcaagcagaccaagagcaccatcggcgtgatggtgaccgccagccacaaccccgaggaggacaacggcgtgaagctggtggaccccctgggcgagatgctggcccccagctgggaggagcacgccacctgcctggccaacgccgaggagcaggacatgcagagagtgctgatcgacatcagcgagaaggaggccgtgaacctgcagcaggacgccttcgtggtgatcggcagagacaccagacccagcagcgagaagctgagccagagcgtgatcgacggcgtgaccgtgctgggcggccagttccacgactacggcctgctgaccaccccccagctgcactacatggtgtactgcagaaacaccggcggcagatacggcaaggccaccatcgagggctactaccagaagctgagcaaggccttcgtggagctgaccaagcaggccagctgcagcggcgacgagtacagaagcctgaaggtggactgcgccaacggcatcggcgccctgaagctgagagagatggagcactacttcagccagggcctgagcgtgcagctgttcaacgacggcagcaagggcaagctgaaccacctgtgcggcgccgacttcgtgaagagccaccagaagcccccccagggcatggagatcaagagcaacgagagatgctgcagcttcgacggcgacgccgacagaatcgtgtactactaccacgacgccgacggccacttccacctgatcgacggcgacaagatcgccaccctgatcagcagcttcctgaaggagctgctggtggagatcggcgagagcctgaacatcggcgtggtgcagaccgcctacgccaacggcagcagcaccagatacctggaggaggtgatgaaggtgcccgtgtactgcaccaagaccggcgtgaagcacctgcaccacaaggcccaggagttcgacatcggcgtgtacttcgaggccaacggccacggcaccgccctgttcagcaccgccgtggagatgaagatcaagcagagcgccgagcagctggaggacaagaagagaaaggccgccaagatgctggagaacatcatcgacctgttcaaccaggccgccggcgacgccatcagcgacatgctggtgatcgaggccatcctggccctgaagggcctgaccgtgcagcagtgggacgccctgtacaccgacctgcccaacagacagctgaaggtgcaggtggccgacagaagagtgatcagcaccaccgacgccgagagacaggccgtgaccccccccggcctgcaggaggccatcaacgacctggtgaagaagtacaagctgagcagagccttcgtgagacccagcggcaccgaggacgtggtgagagtgtacgccgaggccgacagccaggagagcgccgaccacctggcccacgaggtgagcctggccgtgttccagctggccggcggcatcggcgagagaccccagcccggcttctag

SEQ ID NO: 330526 - DNA, 1629 bp, Artificial Sequence
  derived and/or modified sequence
atggacctgggcgccatcaccaagtacagcgccctgcacgccaagcccaacggcctgatcctgcagtacggcaccgccggcttcagaaccaaggccgagcacctggaccacgtgatgttcagaatgggcctgctggccgtgctgagaagcaagcagaccaagagcaccatcggcgtgatggtgaccgccagccacaaccccgaggaggacaacggcgtgaagctggtggaccccctgggcgagatgctggcccccagctgggaggagcacgccacctgcctggccaacgccgaggagcaggacatgcagagagtgctgatcgacatcagcgagaaggaggccgtgaacctgcagcaggacgccttcgtggtgatcggcagagacaccagacccagcagcgagaagctgagccagagcgtgatcgacggcgtgaccgtgctgggcggccagttccacgactacggcctgctgaccaccccccagctgcactacatggtgtactgcagaaacaccggcggcagatacggcaaggccaccatcgagggctactaccagaagctgagcaaggccttcgtggagctgaccaagcaggccagctgcagcggcgacgagtacagaagcctgaaggtggactgcgccaacggcatcggcgccctgaagctgagagagatggagcactacttcagccagggcctgagcgtgcagctgttcaacgacggcagcaagggcaagctgaaccacctgtgcggcgccgacttcgtgaagagccaccagaagcccccccagggcatggagatcaagagcaacgagagatgctgcagcttcgacggcgacgccgacagaatcgtgtactactaccacgacgccgacggccacttccacctgatcgacggcgacaagatcgccaccctgatcagcagcttcctgaaggagctgctggtggagatcggcgagagcctgaacatcggcgtggtgcagaccgcctacgccaacggcagcagcaccagatacctggaggaggtgatgaaggtgcccgtgtactgcaccaagaccggcgtgaagcacctgcaccacaaggcccaggagttcgacatcggcgtgtacttcgaggccaacggccacggcaccgccctgttcagcaccgccgtggagatgaagatcaagcagagcgccgagcagctggaggacaagaagagaaaggccgccaagatgctggagaacatcatcgacctgttcaaccaggccgccggcgacgccatcagcgacatgctggtgatcgaggccatcctggccctgaagggcctgaccgtgcagcagtgggacgccctgtacaccgacctgcccaacagacagctgaaggtgcaggtggccgacagaagagtgatcagcaccaccgacgccgagagacaggccgtgaccccccccggcctgcaggaggccatcaacgacctggtgaagaagtacaagctgagcagagccttcgtgagacccagcggcaccgaggacgtggtgagagtgtacgccgaggccgacagccaggagagcgccgaccacctggcccacgaggtgagcctggccgtgttccagctggccggcggcatcggcgagagaccccagcccggcttctag

SEQ ID NO: 330527 - protein, 442 aa, Artificial Sequence
  derived and/or modified sequence
MSYNGLHQRVFKELKLLTLCSISSQIGPPEVALTTDEKSISVVLTAPEKWKRNPEDLPVSMQQIYSNLKYNVSVLNTKSNRTWSQCVTNHTLVLTWLEPNTLYCVHVESFVPGPPRRAQPSEKQCARTLKDQSSEFKAKIIFWYVLPVSITVFLFSVMGYSIYRYIHVGKEKHPANLILIYGNEFDKRFFVPAEKIVINFITLNISDDSKISHQDMSLLGKSSDVSSLNDPQPSGNLRPPQEEEEVKHLGYASHLMEIFCDSEENTEGTSLTQQESLSRTIPPDKTVIEYEYDVRTTDICAGPEEQELSLQEEVSTQGTLLESQAALAVLGPQTLQYSYTPQLQDLDPLAQEHTDSEEGPEEEPSTTLVDWDPQTGRLCIPSLSSFDQDSEGCEPSEGDGLGEEGLLSRLYEEPAPDRPPGENETYLMQFMEEWGLYVQMEN

SEQ ID NO: 330528 - DNA, 1329 bp, Artificial Sequence
  derived and/or modified sequence
atgtcttataatggcttacatcagagggttttcaaagaacttaaactgctcaccttatgctcaatcagcagtcaaattgggcctcctgaagtggccctcaccacagatgaaaaaagtatttccgtagttttaacagctcccgaaaaatggaaacgaaatccggaggacttacctgtgtccatgcagcagatctattccaacctgaagtacaacgtgtctgtgctgaacacaaaaagcaataggacgtggtctcaatgtgttaccaatcatacactcgtgcttacatggctggagcccaatactctgtactgcgtccatgtagaatcatttgttcccggccccccgagacgggcgcagccctccgaaaagcagtgcgccagaacgctcaaagatcaatcctccgagttcaaagccaagatcattttttggtatgttctgcccgtgtcgatcacagtattcttgtttagtgtgatgggatacagcatttataggtacattcatgtggggaaggaaaaacaccccgctaacttgatactcatttacggcaatgagttcgacaaacggttctttgttccggcagagaagattgttattaactttattacactgaacatcagcgatgactccaaaatatcccaccaggatatgtctctgcttggtaaaagttccgacgtcagtagtcttaatgatccacaaccctctggcaacttgcgaccgccacaggaggaggaggaggttaaacacttgggttacgcttcccacttaatggaaattttttgcgattctgaggagaacaccgagggaacctcactcacccagcaggagagcctatccagaacaatccccccagataagacagtgatcgagtatgagtatgatgtccggaccactgatatctgcgccgggcccgaggagcaggagctgtctttgcaggaagaagtgtctacacagggcacactgttagagtctcaggccgccctggccgtcctcggcccccagaccctccaatactcatatacgcctcaattgcaggatctcgatccgctcgctcaggagcacaccgattcggaggagggcccagaggaggagccttcaacaaccctcgttgattgggatccacagaccggccgcctgtgcatcccttccctgtccagtttcgatcaggactcagagggctgcgagccctcagagggagacgggcttggggaggaaggtttacttagccgactctatgaggagcctgctcctgaccgtccaccaggtgaaaatgagacttatttgatgcagttcatggaggagtggggcctgtacgttcagatggaaaattag

SEQ ID NO: 330529 - DNA, 3503 bp, Artificial Sequence
  derived and/or modified sequence
gaccatcagaccggcctgaataccagaatctctttgcaatgcactcgcctcgctcattaccagaaggaggttttacctgcctagtgacctggttggtctgggcatgaaccccgagaggtggaaactctcagactctcaggactgacagccgagtggctggggactataaatccgcgagaactgccctcgcgctgccatccagctgggtagccgggggagcgcgcgtgggggctccgcgagtcgctcgcccttggtttctggggaagcctgggggacgcggctgtggcggaggcgccctgggactcaggtcgcctggagcgtggcacgcagagccccaggcgcggagctgaggccgcgcggccgcgcttggccccagcgggcgtgggactgagcagtctgctgccccccgacatgtgacccagccccgccgcccatgcgggctcccggccgcccggccctgcggccgctgccgctgccgccgctgctgctgttgctcctggcggcgccttggggacgggcagttccctgtgtctctggtggtttgcctaaacctgcaaacatcaccttcttatccatcaacatgaagaatgtcctacaatggactccaccagagggtcttcaaggagttaaagttacttacactgtgcagtatttcatcacaaattggcccaccagaggtggcactgactacagatgagaagtccatttctgttgtcctgacagctccagagaagtggaagagaaatccagaagaccttcctgtttccatgcaacaaatatactccaatctgaagtataacgtgtctgtgttgaatactaaatcaaacagaacgtggtcccagtgtgtgaccaaccacacgctggtgctcacctggctggagccgaacactctttactgcgtacacgtggagtccttcgtcccagggccccctcgccgtgctcagccttctgagaagcagtgtgccaggactttgaaagatcaatcatcagagttcaaggctaaaatcatcttctggtatgttttgcccgtatctattaccgtgtttcttttttctgtgatgggctattccatctaccgatatatccacgttggcaaagagaaacacccagcaaatttgattttgatttatggaaatgaatttgacaaaagattctttgtgcctgctgaaaaaatcgtgattaactttatcaccctcaatatctcggatgattctaaaatttctcatcaggatatgagtttactgggaaaaagcagtgatgtatccagccttaatgatcctcagcccagcgggaacctgaggccccctcaggaggaagaggaggtgaaacatttagggtatgcttcgcatttgatggaaattttttgtgactctgaagaaaacacggaaggtacttctctcacccagcaagagtccctcagcagaacaatacccccggataaaacagtcattgaatatgaatatgatgtcagaaccactgacatttgtgcggggcctgaagagcaggagctcagtttgcaggaggaggtgtccacacaaggaacattattggagtcgcaggcagcgttggcagtcttgggcccgcaaacgttacagtactcatacacccctcagctccaagacttagaccccctggcgcaggagcacacagactcggaggaggggccggaggaagagccatcgacgaccctggtcgactgggatccccaaactggcaggctgtgtattccttcgctgtccagcttcgaccaggattcagagggctgcgagccttctgagggggatgggctcggagaggagggtcttctatctagactctatgaggagccggctccagacaggccaccaggagaaaatgaaacctatctcatgcaattcatggaggaatgggggttatatgtgcagatggaaaactgatgccaacacttccttttgccttttgtttcctgtgcaaacaagtgagtcacccctttgatcccagccataaagtacctgggatgaaagaagttttttccagtttgtcagtgtctgtgagaattacttatttcttttctctattctcatagcacgtgtgtgattggttcatgcatgtaggtctcttaacaatgatggtgggcctctggagtccaggggctggccggttgttctatgcagagaaagcagtcaataaatgtttgccagactgggtgcagaatttattcaggtgggtgtactctggcctcttggttcattattttcaaacaagcacacttgtacaattattttctgggtacttcccatatgcacatagcactgtaaaaaatatttcccaaagatcactcattttataaataccactttttcagaattgggtttattgcgagcaggaggagatacttaaaacatgcacatataccaggttggtggtaagttggtcgcatgtgaaaacctcaactatttaatcatcatgattcatattttgagtgaatacatcaggcacagaccttcatgatatcacacactcttggctactttaagaggccatctttaatactttatgagtagttctggagtgtaaacataaacgagtattcttttgtagtcagaaaagtgtcctctcaataatttagtaggggcttattgtctctcaaaactaacctaaaagaaaatgacacattttataatagaatattacatttatttctggaagtgtgttttcaaaaagatatttacatagtctgtaaactagaaagtgttaggtaaagctctaggttactgtgttactattataatattaaacattcgaataggcagtcgttcaaagactctttggaatatctatgaatgaatatcctctattcttataatattaaaacccataagtaaatataggacatacaagagaaatgagttaaatgactatgtaagggagagtttattaaaatttgatgaaatttactgtaggaactaaactatgccataaaacaatagctttctagttcatttccagtaactgttcccatctcctttaccacttgttaagaaaattaaattcttcagtcacgctgctttaaaatgggacaaaatctattaagttgaaccatatataattgtggatatttggctgtttttaatctgacaagcagtaacttcatatggtttgccttaatatatatttgttttagtcatgaactcataatccattgatgctctttcatgagaagagatatcacccatatttccttattgatattattggtacaggcagacaaccctggtaggagagatggattctggggtcatgacctttcgtgattatccgcaaatgcaaacagtttcagatctaatggtttaatttagggagtaattatattaatcagagtgttctgttattctcaatctttatagaaacgattctgctggttttgaagaacagatgtattacactaactgtaaaagtagttcaagagtgagaaagaataaattgttattaagagcaaaagaaaaataaagtgattgatgata

SEQ ID NO: 330530 - DNA, 1329 bp, Artificial Sequence
  derived and/or modified sequence
atgagctacaacggcctgcaccagagggtcttcaaggagctgaagctgctgaccctgtgcagcatcagcagccagatcggccccccagaggtggccctgaccacagatgagaagagcatctctgtggtgctgacagcccctgagaagtggaagaggaaccctgaggacctgcctgtgtccatgcagcagatctacagcaacctgaagtacaacgtgtctgtgctgaacaccaagagcaacagaacctggagccagtgtgtgaccaaccacaccctggtgctgacctggctggagcccaacaccctgtactgtgtgcacgtggagagctttgtgcccggccccccccggcgggcccagcccagcgagaagcagtgtgcccggaccctgaaggaccagagcagcgagttcaaggccaagatcatcttctggtacgtgctgcctgtgtccatcaccgtcttcctgttctctgtgatgggctacagcatctaccgctacatccacgtgggcaaggagaagcacccagccaacctgatcctgatctatggaaatgaatttgacaagcgcttctttgtgcctgctgagaagatcgtcatcaacttcatcaccctgaacatcagtgatgacagcaagatcagccaccaggacatgagcctgctgggcaagagcagtgatgtgagcagcctgaatgacccccagcccagcggcaacctgcggcccccccaggaggaggaggaggtgaagcacctgggctacgccagccacctgatggagatcttctgtgacagcgaggagaacacagagggcaccagcctgacccagcaggagagcctgagcaggaccatccccccagacaagacagtcatcgagtatgaatatgatgtgaggaccacagacatctgtgccggccctgaggagcaggagctgagcctgcaggaggaggtgtccacccagggcaccctgctggagagccaggccgccctggccgtgctgggcccccagaccctgcagtacagctacaccccccagctgcaggacctggaccccctggcccaggagcacacagacagcgaggagggccctgaggaggagcccagcaccaccctggtggactgggacccccagacaggccgcctgtgcatccccagcctgagcagctttgaccaggacagcgagggctgtgagcccagtgaaggagatggcctgggggaggagggcctgctgagccggctgtatgaggagcccgccccagacaggcctcctggagaaaatgagacctacctgatgcagttcatggaggagtggggcctgtatgtgcagatggagaactag

SEQ ID NO: 330531 - DNA, 1329 bp, Artificial Sequence
  derived and/or modified sequence
atgagctacaacggcctgcaccagcgggtgttcaaggagctgaagctcctgacattgtgcagcatttcttcccagatcggtccccccgaggtcgccttaaccacagatgagaagtcaatcagcgtggtgcttaccgcgcccgaaaagtggaagcgcaacccagaagatctccccgtgagtatgcaacagatatattctaacttgaagtacaacgtttctgtgcttaataccaagagtaacagaacatggagtcagtgtgtgacaaaccacacactcgttctgacgtggttagagccaaacaccctatattgcgttcatgtggaatcttttgttcccggacctccgaggagagcacagccgagtgagaagcagtgtgcacgcaccctcaaggaccagtcatcagagtttaaggccaaaattatcttttggtacgttttgcctgtttcgatcaccgtgtttcttttctccgtgatgggttacagcatctatcgatatatccacgtggggaaagagaagcaccccgctaatctgatcctgatatatggaaacgagttcgacaaaaggttctttgtgccagccgagaaaatagtcattaattttattacccttaacatttcagatgattctaagatatcacaccaggacatgagcttgctgggtaagagctcagacgttagttccctgaatgatccacagcctagcgggaatctgcggcctccacaggaggaagaggaagtgaagcacctgggctatgcttcacatctgatggagatcttctgtgactctgaggagaacaccgagggcacaagtctgacacaacaggagagcctgagccgaacaatacctccagacaagacagtcatcgaatatgagtatgacgtcagaaccaccgatatctgcgcaggccctgaagaacaggagctgagcctgcaggaagaagtgtccactcaaggaacgctgctggagtcccaggccgccctcgcggttctcggaccccagaccctccagtatagctacactccacagcttcaggacctcgatcccctcgcccaagaacacacagattctgaggaaggccccgaggaagagcctagtaccaccctcgttgactgggacccacaaactgggaggctctgtattccctctttaagctctttcgaccaggattctgaaggctgtgaaccgagcgagggggatggcttgggggaagaaggcctcttgtcacgcttgtacgaagaacctgcacccgatcgtccgcccggcgaaaatgaaacctacttaatgcaattcatggaggagtggggcctgtatgtgcagatggagaactag

SEQ ID NO: 330532 - DNA, 1329 bp, Artificial Sequence
  derived and/or modified sequence
atgtcctataacggattacaccaacgggtgtttaaagagctgaagctactgactctgtgctctatctcatcgcagattggccctccagaagtggcactgacaacggacgaaaagtctatttccgtggtgctcaccgcccctgagaaatggaagagaaatccagaggacttgccagtgagcatgcagcagatctacagcaacctaaaatataacgtttctgtgctgaacacgaagtcaaataggacctggagccaatgcgtcacaaaccacacacttgtacttacgtggctggagcccaacacgctctattgcgtgcacgtcgaatccttcgtgcctggtcctcctcgacgcgcacagcccagcgagaagcaatgtgctcgtaccttgaaggatcagagcagtgagttcaaagccaagatcatcttttggtacgttttaccggtctcaatcaccgtgtttctcttttcagtcatggggtactctatctacaggtacatccacgtaggcaaggaaaagcatcctgccaaccttatactgatttacgggaacgagttcgacaaacgcttttttgttcccgcagaaaagatagtcattaacttcatcaccctgaacatttctgacgacagtaagatctcccaccaggatatgagtctcctggggaagtcttcagatgtgtccagcctcaatgacccacagccgagcggcaacctacgcccaccccaggaggaagaagaagtgaaacatctcggatacgcaagccatctgatggaaattttttgtgactcggaagagaataccgaggggacgagcctgacccaacaagagtcgttgagcagaacaataccaccagacaaaacggttatcgagtacgagtacgatgtacgtactaccgatatttgcgccggaccagaagaacaggaattgtctcttcaagaagaagtgtccacccagggcactcttttggagtcgcaggcagctttagcagtacttgggccacagacactccagtattcttacaccccacagctccaggatctcgaccccctcgcacaggagcataccgacagcgaagagggaccggaagaggaacctagcactacactggtggattgggacccccagaccggaaggctgtgtattccgtcattaagttcattcgaccaggattcggaaggttgcgagccttccgaaggcgacggcctgggcgaggaaggattgctgtcacggctgtatgaggaacccgcaccggatcggccacccggagagaatgaaacttacttaatgcaatttatggaagagtggggactttacgtgcagatggagaactag

SEQ ID NO: 330533 - DNA, 1329 bp, Artificial Sequence
  derived and/or modified sequence
atgagctacaacggcctgcaccagagagtgttcaaggagctgaagctgctgaccctgtgcagcatcagcagccagatcggcccccccgaggtggccctgaccaccgacgagaagagcatcagcgtggtgctgaccgcccccgagaagtggaagagaaaccccgaggacctgcccgtgagcatgcagcagatctacagcaacctgaagtacaacgtgagcgtgctgaacaccaagagcaacagaacctggagccagtgcgtgaccaaccacaccctggtgctgacctggctggagcccaacaccctgtactgcgtgcacgtggagagcttcgtgcccggcccccccagaagagcccagcccagcgagaagcagtgcgccagaaccctgaaggaccagagcagcgagttcaaggccaagatcatcttctggtacgtgctgcccgtgagcatcaccgtgttcctgttcagcgtgatgggctacagcatctacagatacatccacgtgggcaaggagaagcaccccgccaacctgatcctgatctacggcaacgagttcgacaagagattcttcgtgcccgccgagaagatcgtgatcaacttcatcaccctgaacatcagcgacgacagcaagatcagccaccaggacatgagcctgctgggcaagagcagcgacgtgagcagcctgaacgacccccagcccagcggcaacctgagacccccccaggaggaggaggaggtgaagcacctgggctacgccagccacctgatggagatcttctgcgacagcgaggagaacaccgagggcaccagcctgacccagcaggagagcctgagcagaaccatcccccccgacaagaccgtgatcgagtacgagtacgacgtgagaaccaccgacatctgcgccggccccgaggagcaggagctgagcctgcaggaggaggtgagcacccagggcaccctgctggagagccaggccgccctggccgtgctgggcccccagaccctgcagtacagctacaccccccagctgcaggacctggaccccctggcccaggagcacaccgacagcgaggagggccccgaggaggagcccagcaccaccctggtggactgggacccccagaccggcagactgtgcatccccagcctgagcagcttcgaccaggacagcgagggctgcgagcccagcgagggcgacggcctgggcgaggagggcctgctgagcagactgtacgaggagcccgcccccgacagaccccccggcgagaacgagacctacctgatgcagttcatggaggagtggggcctgtacgtgcagatggagaactag

SEQ ID NO: 330534 - protein, 457 aa, Artificial Sequence
  derived and/or modified sequence
MDRSLRNVLVVSFGFLLLFTAYGGLQSLQSSLYSEEGLGVTALSTLYGGMLLSSMFLPPLLIERLGCKGTIILSMCGYVAFSVGNFFASWYTLIPTSILLGLGAAPLWSAQCTYLTITGNTHAEKAGKRGKDMVNQYFGIFFLIFQSSGVWGNLISSLVFGQTPSQETLPEEQLTSCGASDCLMATTTTNSTQRPSQQLVYTLLGIYTGSGVLAVLMIAAFLQPIRDVQRESEGEKKSVPFWSTLLSTFKLYRDKRLCLLILLPLYSGLQQGFLSSEYTRSYVTCTLGIQFVGYVMICFSATDALCSVLYGKVSQYTGRAVLYVLGAVTHVSCMIALLLWRPRADHLAVFFVFSGLWGVADAVWQTQNNALYGVLFEKSKEAAFANYRLWEALGFVIAFGYSMFLCVHVKLYILLGVLSLTMVAYGLVECVESKNPIRPHAPGQVNQAEDEEIQTKM

SEQ ID NO: 330535 - DNA, 1374 bp, Artificial Sequence
  derived and/or modified sequence
atggacagaagcctgagaaacgtgctggtggtgagcttcggcttcctgctgctgttcaccgcctacggcggcctgcagagcctgcagagcagcctgtacagcgaggagggcctgggcgtgaccgccctgagcaccctgtacggcggcatgctgctgagcagcatgttcctgccccccctgctgatcgagagactgggctgcaagggcaccatcatcctgagcatgtgcggctacgtggccttcagcgtgggcaacttcttcgccagctggtacaccctgatccccaccagcatcctgctgggcctgggcgccgcccccctgtggagcgcccagtgcacctacctgaccatcaccggcaacacccacgccgagaaggccggcaagagaggcaaggacatggtgaaccagtacttcggcatcttcttcctgatcttccagagcagcggcgtgtggggcaacctgatcagcagcctggtgttcggccagacccccagccaggagaccctgcccgaggagcagctgaccagctgcggcgccagcgactgcctgatggccaccaccaccaccaacagcacccagagacccagccagcagctggtgtacaccctgctgggcatctacaccggcagcggcgtgctggccgtgctgatgatcgccgccttcctgcagcccatcagagacgtgcagagagagagcgagggcgagaagaagagcgtgcccttctggagcaccctgctgagcaccttcaagctgtacagagacaagagactgtgcctgctgatcctgctgcccctgtacagcggcctgcagcagggcttcctgagcagcgagtacaccagaagctacgtgacctgcaccctgggcatccagttcgtgggctacgtgatgatctgcttcagcgccaccgacgccctgtgcagcgtgctgtacggcaaggtgagccagtacaccggcagagccgtgctgtacgtgctgggcgccgtgacccacgtgagctgcatgatcgccctgctgctgtggagacccagagccgaccacctggccgtgttcttcgtgttcagcggcctgtggggcgtggccgacgccgtgtggcagacccagaacaacgccctgtacggcgtgctgttcgagaagagcaaggaggccgccttcgccaactacagactgtgggaggccctgggcttcgtgatcgccttcggctacagcatgttcctgtgcgtgcacgtgaagctgtacatcctgctgggcgtgctgagcctgaccatggtggcctacggcctggtggagtgcgtggagagcaagaaccccatcagaccccacgcccccggccaggtgaaccaggccgaggacgaggagatccagaccaagatgtag

SEQ ID NO: 330536 - DNA, 1374 bp, Artificial Sequence
  derived and/or modified sequence
atggaccgcagcctgaggaacgtgctcgtggtctcattcggcttcttgctgttgtttaccgcgtacggcgggctccaaagcctgcagtcaagtctctacagtgaagagggcctcggcgtgaccgccctgtctacactatatgggggcatgcttctgtcatctatgtttttaccccccctattgatcgagaggcttggctgtaaagggaccattattctctctatgtgtggttatgtggccttctctgtcggtaacttttttgcttcatggtacacattgattccaacatccatcctgctgggccttggggcagcccctctttggtccgctcagtgcacgtacttgacaattacggggaatacccacgccgagaaggccggcaagcgcgggaaggacatggttaatcaatacttcggcattttcttcctgatatttcagtctagcggtgtatggggaaacttgatcagttctttggtgttcggacagactcccagccaggagactcttcccgaggagcagctgacttcctgcggtgctagcgactgcctgatggccacaactactactaactccacccagaggccttctcaacagcttgtgtacactctgctgggcatttatacagggtccggggtactggccgtgcttatgattgccgcatttcttcaaccaatacgggacgtccaacgcgagagcgagggcgaaaaaaagtccgtacccttttggtcaacactgctgagtacctttaaactgtacagggacaagagactctgcctcctcatccttttgcccctgtactcaggcctccagcagggtttcctcagcagtgaatacacaagaagttacgtgacctgcaccctgggcattcagttcgttgggtacgtaatgatttgcttttccgctacggacgctttgtgctccgtcctgtatggcaaggtgagccagtacacaggacgagctgtcctgtacgttctcggcgccgtgactcatgtatcgtgcatgatagccctgctcctatggcgccctcgcgctgatcacctcgctgtgtttttcgtgttttccggactttggggggtggccgacgcagtgtggcagacacagaacaacgccctgtatggcgtcctatttgagaagtcgaaggaggctgcctttgccaactatcgattgtgggaggcactaggatttgtcatcgcttttgggtactccatgttcttatgcgtgcatgttaagttatacattttactcggcgtactgagcctgacaatggtggcttacggcctggtagaatgtgtggagtcgaagaatcctatccggccacacgcacccgggcaagtgaatcaagccgaagacgaggaaatacagacgaagatgtag

SEQ ID NO: 330537 - DNA, 1374 bp, Artificial Sequence
  derived and/or modified sequence
atggacaggagcctgagaaatgtgctggtggtgtcctttggcttcctgctgctcttcaccgcctacggcggcctgcagagcctgcagagcagcctgtacagcgaggagggcctgggcgtgacagccctgagcaccctgtatggaggcatgctgctgagctccatgttcctgccccccctgctgattgaaaggctgggctgcaagggcaccatcatcctgtccatgtgtggctacgtggccttctctgtgggcaacttctttgcctcctggtacaccctcatccccaccagcatcctgctgggcctgggcgccgcccccctgtggagcgcccagtgcacctacctgaccatcaccggcaacacccatgctgagaaggccggcaagaggggcaaggacatggtgaaccagtacttcggcatcttcttcctgatcttccagagcagcggcgtgtggggcaacctgatcagcagcctggtgtttggccagacccccagccaggagaccctgcctgaggagcagctgaccagctgtggggccagtgactgcctgatggccaccaccaccaccaacagcacccagaggcccagccagcagctggtgtacaccctgctgggcatctacacaggcagcggcgtgctggccgtgctgatgattgctgccttcctgcagcccatcagagatgtgcagcgggagagcgagggggagaagaagtctgtgcccttctggagcaccctgctgagcaccttcaagctgtacagagacaagaggctgtgcctgctgatcctgctgcccctgtacagcggcctgcagcagggcttcctgagcagcgagtacaccaggagctatgtgacctgcaccctgggcatccagtttgtgggctacgtgatgatctgcttcagcgccacagatgccctgtgcagcgtgctgtatggcaaggtgtcccagtacacaggccgggctgtgctgtatgtgctgggcgctgtgacccacgtgtcctgcatgattgccctgctgctgtggaggcccagggctgaccacctggccgtgttctttgtgttcagcggcctgtggggcgtggctgatgctgtgtggcagacccagaacaatgccctgtatggagtgctgtttgagaagagcaaggaggccgcctttgccaactaccgcctgtgggaggccctgggctttgtgattgccttcggctacagcatgttcctgtgtgtgcacgtgaagctgtacatcctgctgggcgtgctgagcctgaccatggtggcctacggcctggtggagtgtgtggagagcaagaaccccatccggccccacgcccctggccaggtgaaccaggctgaagatgaggagatccagaccaagatgtag

SEQ ID NO: 330538 - DNA, 1374 bp, Artificial Sequence
  derived and/or modified sequence
atggaccggagcctgcggaacgtgctggtggtgagcttcggcttcctactactgttcacggcatacggagggctccagtcactgcagagttcgctgtacagcgaggagggtctgggcgtgaccgctctttctaccctatatggaggcatgctccttagcagcatgttcctgcccccacttcttatcgagagactcgggtgtaaaggtactatcatcctgtccatgtgtgggtatgtggcgttctccgtgggcaatttttttgcgagttggtacaccctaatcccaacttcgattctgcttggtctaggcgcagccccactttggtccgctcagtgtacctatcttacgattacaggcaatactcatgcagagaaggccggaaaacgcggaaaagacatggtgaaccagtatttcggcattttttttctgatttttcaaagtagcggcgtgtggggaaacctgattagcagccttgtgtttggtcagactccgagccaagagaccctgccagaagaacagctcactagctgcggggcttcagactgcctaatggctacgacaacaactaactctacacaaagaccatcccagcagctggtgtacactctgttggggatttatacaggaagcggcgtgctggctgtcctgatgattgccgcatttctacagcccatcagagacgtgcaacgtgagtccgagggcgaaaagaagtcagtgcccttctggtcaacactgctctcaaccttcaagctttacagagacaagcgactttgcttactcatcctgctgccactgtactccgggttgcagcaaggcttcctaagctcagaatacaccagaagttacgtgacatgcactctgggtatacaatttgtgggctacgtgatgatatgcttcagcgccactgacgccctttgcagtgttctgtacggtaaggtgtctcaatacacgggtcgcgcagtgttatatgttctgggtgcagtcacacacgtaagttgcatgattgctctcttgctctggcgtcccagggcggatcacttagctgttttctttgtgttcagcgggttatggggcgttgcagatgccgtctggcagactcagaataacgctctgtacggggtgctctttgagaaaagtaaggaggcggcattcgccaactaccggctatgggaggctctagggttcgttatcgcctttggttatagcatgtttctgtgcgtgcacgtgaaactctatatactgctgggagtcctgtccctcactatggtggcttacggtctcgtggaatgtgtggagagtaaaaacccgatccggccacacgcacccggccaggtgaatcaagccgaggacgaggaaatccagacgaaaatgtag

SEQ ID NO: 330539 - DNA, 1374 bp, Artificial Sequence
  derived and/or modified sequence
atggataggtccctgcgaaacgttctcgtcgtgtcgtttggattcctgctcctgttcaccgcctatgggggattgcagagccttcagtcctctctctatagtgaagaagggctaggcgtgacagccctgagtacactgtatgggggaatgcttttgtcttctatgttcctcccccctctgctgattgagaggctcggctgcaaaggaaccatcattctgtctatgtgtggctatgtggccttctcagtggggaatttcttcgcttcctggtacacccttatacctacttccatcctgctggggttgggggctgcaccgttgtggagtgcccagtgtacctacctcactattaccgggaatactcacgctgaaaaagccggtaaacgcggaaaggatatggtcaatcaatatttcggtatatttttcctaatttttcagtccagtggcgtgtggggtaatcttatcagcagcttagtgtttggacaaactccatcacaagaaactttgccagaggagcagctgacctcctgtggggcaagcgactgcttgatggccacgactactaccaattcaacacaaaggccctcacagcagcttgtctacactctcctgggaatctacactgggtctggcgtgctcgccgttctgatgatagcagcctttttgcaaccgatccgggacgtgcaaagggaatcggaaggggagaaaaagagcgtgcctttttggagtactctactgagcacgttcaagctgtatcgcgacaaacggctatgcttactgatcctcttaccactatactccggattgcagcagggttttctgagcagcgagtacacaaggagttacgtcacatgtaccctcggcatccagtttgttgggtacgtcatgatctgcttctccgcaaccgacgcgctgtgttccgtgctatatggtaaagtttctcagtacaccggcagagccgtgttatatgtgctaggagctgtgacacacgtatcctgtatgatcgcgttgctgctttggcgtcccagggccgatcacctcgctgtctttttcgtcttttcaggcttgtggggtgttgcagatgcggtttggcaaacccagaacaatgctctatatggggtcctgtttgagaaatcaaaagaggcagcttttgccaattatcgcctgtgggaagccttaggttttgtaatcgctttcggatactcaatgtttctttgcgtgcacgtgaagctttacattttgctgggggtactttccctgactatggtcgcatatggcctggtcgaatgcgtcgagtccaaaaatcccatacgacctcacgcgccagggcaggtaaaccaagctgaagacgaggagatccagactaagatgtag

SEQ ID NO: 330540 - DNA, 2116 bp, Artificial Sequence
  derived and/or modified sequence
attaacgagtgacagtcttaatgactaacacacctctaacatttcacctctagctcagatgagagagagaatgggacttcttggtactgattgtttttcccatgcctcaattggtttcttttagggagctacaaatttacgtgttcactggtgattgatcttttcatccagcacaatggacagaagtctaaggaacgtccttgtggtttcctttgggttcctgcttctctttacagcctatggaggtctgcagagcctgcagagcagcctgtacagcgaggagggcctgggtgtcacagcgctcagcaccctctatggaggcatgctcctgtcctccatgttcctcccaccgctcctcatcgagaggctgggctgcaaggggaccatcatcctctccatgtgtggctacgtggccttctccgtgggcaacttcttcgccagctggtacactttgatccccacctccatactgctgggactcggggccgccccgctgtggtctgcacagtgcacatacctcacgatcacgggaaacacacatgcagagaaggcgggaaagcgtggcaaagacatggtgaaccagtattttggcatcttcttcctcatattccagtcatccggtgtgtggggcaacttgatctcatcgctggtatttggccagactcccagccaagagacccttccagaagagcagctcacgtcctgtggggccagtgactgcctgatggccaccacaaccaccaacagcacccagaggccctcccagcagctggtctacaccctcctgggcatctacactgggagtggtgtcctggctgtcctgatgatagctgcgttcctccaacccatacgagatgttcagcgggaaagtgaaggagagaagaaatcagtacctttctggtccactttactgtcgactttcaagctatatagagataaacgtctgtgcctcttaattctgctgccgctgtacagtggattgcagcaaggattcctctccagcgaatacacaaggtcctatgtcacctgcaccctgggcatccagttcgtcggctacgtgatgatctgcttctcggccactgacgcgctgtgctccgtgttgtatggaaaggtctcgcagtacacgggcagggctgtgctgtacgtgctgggcgcggtgacccacgtgtcctgcatgattgccctactgctgtggagacctcgtgctgaccatctggcagtgttcttcgtattctctggcctgtggggcgtggcagatgccgtctggcagacacaaaacaatgctctctacggcgttctgtttgagaagagcaaggaagctgccttcgccaattaccgcctgtgggaggccctgggcttcgtcattgccttcgggtacagcatgtttttgtgcgtgcacgtcaagctctacattctgctgggggtcctgagcctgaccatggtggcgtatgggcttgtggagtgcgtggagtccaagaacccgatcagaccccacgctccaggacaggtcaaccaggcagaggatgaagaaatacaaacaaaaatgtgagagcagtgaggtccgaggaggatgaactcagaaagcaccagccagagaattttcttagaagatgcctcaggacatagagcggctcctcatcaccatctcagcacaatttggccattctgaagagatcatgttatttcactcttcatgtattttttttctattctaacaaatttttcgtccaccatcttaacagagatcaagtgtatacatgaaggtatcagttcatttaattttagatgcaaaagaaaaaggtctaacgtacaatcagccaattagaatttgcctgaaatcatagactcaccctagttttattgctgtagttgtttttaagaattggaagcctgcttaaaaaatgtagttgagccccataattttacaaatgggcgaacttttaaacttctaactctacttggatcaaaacctcatacattttacaaaggggtcctgacaagtcagctgactcaacctcacagagtcagggggtgacaaagccagactggggctcaggattcctgaaacgtgtggggtctgcgtttctaaataaagacggttatttaatggacttac

SEQ ID NO: 330541 - protein, 144 aa, Artificial Sequence
  derived and/or modified sequence
MDRSLRNVLVVSFGFLLLFTAYGGLQSLQSSLYSEEGLGVTALSTLYGGMLLSSMFLPPLLIERLGCKGTIILSMCGYVAFSVGNFFASWYTLIPTSILLGLGAAPLWSAQCTYLTITGNTHAEKAGKRGKDMVNQYFGIFFLI

SEQ ID NO: 330542 - DNA, 435 bp, Artificial Sequence
  derived and/or modified sequence
atggacagaagcctgagaaacgtgctggtggtgagcttcggcttcctgctgctgttcaccgcctacggcggcctgcagagcctgcagagcagcctgtacagcgaggagggcctgggcgtgaccgccctgagcaccctgtacggcggcatgctgctgagcagcatgttcctgccccccctgctgatcgagagactgggctgcaagggcaccatcatcctgagcatgtgcggctacgtggccttcagcgtgggcaacttcttcgccagctggtacaccctgatccccaccagcatcctgctgggcctgggcgccgcccccctgtggagcgcccagtgcacctacctgaccatcaccggcaacacccacgccgagaaggccggcaagagaggcaaggacatggtgaaccagtacttcggcatcttcttcctgatctag

SEQ ID NO: 330543 - DNA, 435 bp, Artificial Sequence
  derived and/or modified sequence
atggaccgctctcttagaaacgtgttggtcgtctcattcgggttcttacttctttttacagcctatggaggtctccagtctctccaatcgtccctgtattcagaggagggcttgggcgtgacagccctttcaacactttacggcgggatgctactgagttccatgtttcttccgcccctcttaatcgagcggctcggctgcaaaggcacaatcattttgtccatgtgtgggtacgtcgcgtttagcgtgggaaacttttttgcttcttggtacacactgatccctacatcaatcttactcggtctgggagcggcaccactatggtctgctcaatgcacatatttgaccatcaccggaaatacgcatgcagagaaagcgggcaaacgtggtaaggacatggtgaatcagtattttgggattttctttctgatctag

SEQ ID NO: 330544 - DNA, 435 bp, Artificial Sequence
  derived and/or modified sequence
atggacaggagcctgagaaatgtgctggtggtgtcctttggcttcctgctgctcttcaccgcctacggcggcctgcagagcctgcagagcagcctgtacagcgaggagggcctgggcgtgacagccctgagcaccctgtatggaggcatgctgctgagctccatgttcctgccccccctgctgattgaaaggctgggctgcaagggcaccatcatcctgtccatgtgtggctacgtggccttctctgtgggcaacttctttgcctcctggtacaccctcatccccaccagcatcctgctgggcctgggcgccgcccccctgtggagcgcccagtgcacctacctgaccatcaccggcaacacccatgctgagaaggccggcaagaggggcaaggacatggtgaaccagtacttcggcatcttcttcctgatctag

SEQ ID NO: 330545 - DNA, 435 bp, Artificial Sequence
  derived and/or modified sequence
atggaccggagcctgcggaacgtgctggtggtgagcttcggcttcctgttacttttcactgcctacggaggattacagagcctccagtcaagcctttatagcgaagaaggactgggggtcacagctctttcaacactgtacgggggcatgcttctgtcaagcatgtttctaccacctctgctcatcgagaggttagggtgcaaaggaactatcattctatcaatgtgcggttatgtcgccttcagtgttgggaacttcttcgcatcatggtacactttaattccaacatcgatcctgctcggactgggagccgccccactctggagcgcccaatgtacatacctgactatcacaggcaatacccacgcagagaaggcggggaagagagggaaagacatggtgaatcagtacttcggcatctttttcctcatttag

SEQ ID NO: 330546 - DNA, 435 bp, Artificial Sequence
  derived and/or modified sequence
atggaccgcagtctgcggaatgtattggtggttagcttcggatttctcctgctgttcacggcttatgggggactgcagtccctgcagtcctccctgtacagcgaggagggcctgggcgtgacagctctgagtactctgtacggcggaatgctcctctcctccatgttcttaccgccactgctcatcgagagactggggtgtaaggggaccatcatattgagtatgtgcggatacgtggctttctcagtggggaattttttcgcctcctggtacacactgatccccacgtccatactcttgggtctcggcgcagcgccactttggtccgcacagtgtacttatcttaccataactggcaacacacacgctgaaaaggcaggcaaaaggggaaaagacatggttaatcagtattttggaattttcttcctgatatag

SEQ ID NO: 330547 - DNA, 775 bp, Artificial Sequence
  derived and/or modified sequence
gagggccagagttaagacagagcttaagacagagaacctcaacaggaggcctgaaggaaagcacctgggagtcattaggcagcaagggagggaattgcaattctgggcggggctcagctgtgcagagtttagcaaggtctccaggtgcttctgctgagggccagagttaagaaagagcgagaacctcatcaggaggactgaaggaaaggagccaggctgcagccctctgcctgcccttccgtgccatcatctccaggattaatgaaagggccattcaggaaacagcacagggagctacaaatttacgtgttcactggtgattgatcttttcatccagcacaatggacagaagtctaaggaacgtccttgtggtttcctttgggttcctgcttctctttacagcctatggaggtctgcagagcctgcagagcagcctgtacagcgaggagggcctgggtgtcacagcgctcagcaccctctatggaggcatgctcctgtcctccatgttcctcccaccgctcctcatcgagaggctgggctgcaaggggaccatcatcctctccatgtgtggctacgtggccttctccgtgggcaacttcttcgccagctggtacactttgatccccacctccatactgctgggactcggggccgccccgctgtggtctgcacagtgcacatacctcacgatcacgggaaacacacatgcagagaaggcgggaaagcgtggcaaagacatggtgaaccagtattttggcatcttcttcctcatatt

SEQ ID NO: 330548 - protein, 1196 aa, Artificial Sequence
  derived and/or modified sequence
MPTAESEAKVKTKVRFEELLKTHSDLMREKKKLKKKLVRSEENISPDTIRSNLHYMKETTSDDPDTIRSNLPHIKETTSDDVSAANTNNLKKSTRVTKNKLRNTQLATENPNGDASVEEDKQGKPNKKVIKTVPQLTTQDLKPETPENKVDSTHQKTHTKPQPGVDHQKSEKANEGREETDLEEDEELMQAYQCHVTEEMAKEIKRKIRKKLKEQLTYFPSDTLFHDDKLSSEKRKKKKEVPVFSKAETSTLTISGDTVEGEQKKESSVRSVSSDSHQDDEISSMEQSTEDSMQDDTKPKPKKTKKKTKAVADNNEDVDGDGVHEITSRDSPVYPKCLLDDDLVLGVYIHRTDRLKSDFMISHPMVKIHVVDEHTGQYVKKDDSGRPVSSYYEKENVDYILPIMTQPYDFKQLKSRLPEWEEQIVFNENFPYLLRGSDESPKVILFFEILDFLSVDEIKNNSEVQNQECGFRKIAWAFLKLLGANGNANINSKLRLQLYYPPTKPRSPLSVVEAFEWWSKCPRNHYPSTLYVTVRGLKVPDCIKPSYRSMMALQEEKGKPVHCERHHESSSVDTEPGLEESKEVIKWKRLPGQACRIPNKHLFSLNAGERGCFCLDFSHNGRILAAACASRDGYPIILYEIPSGRFMRELCGHLNIIYDLSWSKDDHYILTSSSDGTARIWKNEINNTNTFRVLPHPSFVYTAKFHPAVRELVVTGCYDSMIRIWKVEMREDSAILVRQFDVHKSFINSLCFDTEGHHMYSGDCTGVIVVWNTYVKINDLEHSVHHWTINKEIKETEFKGIPISYLEIHPNGKRLLIHTKDSTLRIMDLRILVARKFVGAANYREKIHSTLTPCGTFLFAGSEDGIVYVWNPETGEQVAMYSDLPFKSPIRDISYHPFENMVAFCAFGQNEPILLYIYDFHVAQQEAEMFKRYNGTFPLPGIHQSQDALCTCPKLPHQGSFQIDEFVHTESSSTKMQLVKQRLETVTEVIRSCAAKVNKNLSFTSPPAVSSQQSKLKQSNMLTAQEILHQFGFTQTGIISIERKPCNHQVDTAPTVVALYDYTANRSDELTIHRGDIIRVFFKDNEDWWYGSIGKGQEGYFPANHVASETLYQELPPEIKERSPPLSPEEKTKIEKSPAPQKQSINKNKSQDFRLGSESMTHSEMRKEQSHEDQGHIMDTRMRKNKQAGRKVTLIE

SEQ ID NO: 330549 - protein, 498 aa, Artificial Sequence
  derived and/or modified sequence
MRELCGHLNIIYDLSWSKDDHYILTSSSDGTARIWKNEINNTNTFRVLPHPSFVYTAKFHPAVRELVVTGCYDSMIRIWKVEMREDSAILVRQFDVHKSFINSLCFDTEGHHMYSGDCTGVIVVWNTYVKINDLEHSVHHWTINKEIKETEFKGIPISYLEIHPNGKRLLIHTKDSTLRIMDLRILVARKFVGAANYREKIHSTLTPCGTFLFAGSEDGIVYVWNPETGEQVAMYSDLPFKSPIRDISYHPFENMVAFCAFGQNEPILLYIYDFHVAQQEAEMFKRYNGTFPLPGIHQSQDALCTCPKLPHQGSFQIDEFVHTESSSTKMQLVKQRLETVTEVIRSCAAKVNKNLSFTSPPAVSSQQSKLKQSNMLTAQEILHQFGFTQTGIISIERKPCNHQVDTAPTVVALYDYTANRSDELTIHRGDIIRVFFKDNEDWWYGSIGKGQEGYFPANHVASETLYQELPPEIKERSPPLSPEEKTKIEKSPAPQKVK

SEQ ID NO: 330550 - DNA, 3591 bp, Artificial Sequence
  derived and/or modified sequence
atgccgacagcagagtcagaggccaaggtgaaaacaaaagtccggtttgaggaactcctgaaaacacattcagaccttatgcgcgagaagaagaagctgaaaaagaagctagttcggagcgaggagaacatttcccccgataccatacggagtaacctgcactatatgaaggaaactaccagtgacgatccagacaccattcggtccaatctgccccatataaaggagactaccagtgatgacgtttcagctgcaaacactaataatctgaagaaaagcacccgggtgaccaagaacaagcttcgcaatacacagctggcgactgagaaccctaacggcgacgcctccgtggaagaggacaagcaggggaagccaaataaaaaggtcatcaaaaccgtgccacagctgacaactcaggatctaaagccggagacacccgagaataaagtggactcaacccaccagaaaactcacacaaagccacagcctggcgttgaccaccaaaagagcgagaaagcaaacgagggtcgcgaagaaaccgacctggaggaagatgaggagcttatgcaggcatatcagtgtcacgtcaccgaggaaatggccaaggagattaaacgaaaaatacggaaaaagctcaaggagcagctcacatactttccttctgacactctgtttcacgacgataagctgtctagtgagaagaggaagaaaaagaaagaggtcccggtgttcagcaaagccgagaccagtaccttgactattagcggcgataccgtggaaggggagcagaagaaggagagtagtgttcgatctgtgtcttcagatagtcatcaagacgatgaaattagcagcatggagcagtcgactgaggatagcatgcaagatgacacgaagccaaagcccaaaaagacgaaaaaaaaaaccaaggccgtggccgataataacgaggacgttgatggcgatggtgtgcacgagatcaccagtcgtgactctccggtctacccaaaatgtctgctggatgacgatctggtattgggtgtctatattcaccgcactgatcgccttaaatctgattttatgataagccatcccatggtcaagatacatgttgttgacgaacacacaggccaatacgttaaaaaggacgattcaggtaggcccgtctcaagttattacgaaaaagagaatgtggactacatcttacccatcatgacacagccctacgacttcaaacaactaaagtcacgtttgcccgagtgggaggaacagattgtcttcaacgaaaatttcccatatctcctgagggggagcgacgaaagccctaaggtcatcctcttttttgagattctcgatttcttatccgtagacgaaattaagaacaactctgaggttcaaaaccaggaatgcggattcagaaagatcgcttgggcattccttaaactcctcggcgccaatggaaacgcaaacattaacagtaaactcaggctgcagttatactaccctccaactaaaccccggtctcccctgagtgtggtggaagcttttgaatggtggtcaaagtgtccacggaatcattacccatcaacactgtatgtgacagtccgcggcctaaaggtcccggattgtataaagccttcctaccgatctatgatggcacttcaggaagaaaagggcaagcccgtccactgcgagcggcaccacgaaagctcctctgtcgacacagaaccggggctcgaagaatcaaaggaagttattaaatggaagaggttacctgggcaggcctgtaggattccaaataaacatctgtttagcctgaacgctggtgagcgagggtgcttttgtctggattttagtcataacggcaggatactggccgccgcttgcgcttctcgcgatgggtatcccatcatcctgtatgagatcccgagcggcaggtttatgcgagaattgtgtggacatctaaatattatctacgacctaagttggtcaaaagatgatcattacattctgacatcttcttccgatggcaccgctaggatatggaagaatgaaatcaataacaccaacaccttccgagttctcccgcacccatccttcgtatacacagcaaaatttcatccagctgtccgcgagctcgtggttaccgggtgttatgattcgatgatcaggatctggaaggtggaaatgcgagaagacagtgctatcttagtgagacagtttgacgtgcacaagagctttatcaatagcctgtgcttcgatactgagggccaccacatgtactctggtgactgcaccggcgtcatcgtggtgtggaatacctacgtgaaaatcaacgacctcgagcattcggttcatcactggacgattaacaaagagattaaagaaactgagtttaagggaatcccaatctcttacctggaaatacaccccaatggaaagcggcttctcatccataccaaagattcgacactccggattatggacttgagaattctggttgccagaaaatttgtgggagcggcaaactaccgagagaaaatccattcaaccctcaccccttgcggaacattcttgtttgctggaagtgaagatggcatcgtctatgtgtggaatccagaaacaggtgagcaggtcgcgatgtactctgatctgccttttaagtcccccatcagagatatctcataccaccctttcgagaacatggtcgcattttgcgcgttcggacaaaatgaacccatcctgctgtacatctacgactttcacgttgcacaacaggaggctgaaatgtttaaacgatacaatgggaccttccctttacctggaatccaccagtctcaggacgctctgtgcacatgtccaaagttaccccatcagggatcttttcagattgacgagttcgtccatactgaatccagcagcactaaaatgcagctggtgaagcagcgcctcgaaaccgtcacagaggtcatccgctcatgcgctgctaaggtgaataagaacctgtctttcacttctcccccggcggtgtcttcccagcagagcaagctgaagcagagcaacatgctgactgcacaagagatcctgcatcagtttggcttcacccaaaccggaattatttccattgagaggaaaccttgtaaccatcaagttgacactgccccaacagtggtggccctctatgattatacagctaatcggtctgatgagcttaccatccacagaggtgacatcatacgagtgttctttaaggataatgaggactggtggtacgggtcgattggcaaaggccaggaaggctatttccccgccaatcatgtggctagtgagaccctttaccaggaacttcctcccgagattaaagagcgctctccacccctatctcccgaagaaaagaccaaaattgaaaaatctcccgcaccacagaaacagagcataaacaagaataagagccaggactttcgcttgggtagcgagagtatgacacacagcgaaatgcgaaaagagcagtcccacgaagaccagggacatattatggacacacgaatgcggaagaataagcaagctggcagaaaggttactctgatcgaatag

SEQ ID NO: 330551 - DNA, 3591 bp, Artificial Sequence
  derived and/or modified sequence
atgcctacagctgagtccgaagcgaaggtgaagactaaggtgcgcttcgaggagttgctgaagacccactcggatctgatgagggagaaaaaaaaactgaagaaaaaactggtgcggtccgaggagaatattagccccgacactattcgctctaacctgcattatatgaaggagaccaccagcgacgacccagataccatccgctcaaacctgcctcacataaaagagactacttccgacgacgtgtccgccgcgaacacaaacaatcttaagaaaagcactagagtgacaaaaaataaattgcggaatacacagctcgcgacagaaaaccctaatggcgatgcgagcgtggaagaggataaacaggggaaacccaacaagaaagttattaaaacagtgccccaattaaccacacaggatctgaagccagagacacccgaaaataaagtcgattccacacatcaaaagacccacacaaaacctcaaccgggtgtggaccatcaaaaatccgagaaggccaacgagggcagggaagagacagacctggaggaggacgaagagctcatgcaagcctatcagtgtcacgtcaccgaggagatggccaaggagataaaacgcaaaattcggaaaaagcttaaggagcagctaacgtatttccccagcgatactctcttccacgacgataagctgagtagcgaaaagagaaagaagaagaaggaggtgcccgttttcagtaaagccgaaacgtctaccctcaccatctcaggcgacaccgtagaaggtgagcaaaaaaaagagtcgtccgtgagaagcgtcagctctgactctcatcaggacgacgagatctcttcaatggagcagagcacagaagacagtatgcaggacgataccaaacccaagccgaagaaaacaaagaagaagactaaggctgttgccgacaataacgaagacgtcgatggagacggcgtgcacgagattacatctagggactcacctgtttatcccaaatgcctactggacgacgacctagtgcttggagtgtacatccaccggacagatagactaaaatccgacttcatgattagccacccaatggtgaagatccacgtggtggatgagcatacaggtcagtacgtaaagaaagatgactctgggagaccggtttccagctactatgaaaaagaaaatgtggactacatcctgcctataatgactcagccatatgatttcaaacagttgaaatcccgcctgcctgaatgggaggaacagattgtctttaacgagaacttcccatacctcctccgtggctctgatgaatcccctaaggtcatactgttctttgagatcctggatttcttgagtgtcgacgagattaaaaacaacagcgaggtgcagaaccaagagtgcggattccgcaagatagcctgggccttcctcaagctcctgggagcaaacggcaatgcgaatataaatagcaaattgcgcctccaattatattaccccccaaccaagccgcgcagccctctgagtgtggtggaagccttcgaatggtggtccaagtgccccagaaatcattacccaagtacgctgtatgttactgtgagaggactgaaggtccctgattgcatcaagccatcgtaccgcagcatgatggcgctgcaagaagagaaaggcaaacctgtccattgtgagagacaccacgaaagttctagtgtagacaccgaaccgggcctggaggagagcaaggaggtgataaagtggaagagactccctggacaggcttgccggattcctaacaagcatttgtttagtctgaacgcaggtgagagagggtgcttctgcctggactttagtcacaatgggcgcatcctggctgccgcgtgcgccagtagggacggttaccccatcatactgtacgagatcccatcaggaaggtttatgagagagctatgcggtcacctgaatatcatttacgatctcagttggtcaaaggacgatcattatatactcacctcctcctcagacggtacagcgcgaatatggaagaacgaaatcaataataccaacacatttagagtcttaccccatccatcctttgtatatactgctaaatttcaccctgctgtccgcgaacttgttgtgaccggatgttacgactccatgattagaatttggaaagttgaaatgagggaggactctgccatattggtaaggcagtttgacgttcacaaatctttcatcaacagcttgtgcttcgacaccgagggccaccatatgtattctggcgactgcaccggcgtgattgtggtgtggaatacctacgtgaaaataaatgatctggaacatagtgttcaccactggaccatcaataaagagataaaagaaacggagttcaagggcattccgatcagctacctcgagattcacccaaatgggaaacgcctgctgattcataccaaggactctactctgcgcataatggaccttagaatccttgtagctaggaagttcgtgggcgccgctaattaccgcgaaaaaattcacagtacgttaaccccctgcggaacgttcctgtttgcgggctctgaggacggcatcgtctatgtgtggaacccagaaactggtgagcaggtggccatgtactctgacttaccctttaaatcacccatcagagatatctcatatcatcctttcgagaatatggttgccttctgtgcctttggccagaacgagcctattctcttgtatatttacgattttcacgttgcccagcaggaggcggaaatgttcaaaaggtataatggcacttttccgctcccaggcatacatcaatcccaggatgccttgtgcacctgtcccaagttgccgcaccaaggttctttccaaattgacgagtttgtgcacactgagagttcctcgacaaaaatgcagctcgtcaagcagcgcctggaaactgtgaccgaggtaatacgctcctgtgcagccaaagttaataagaacttgtctttcacctcaccccccgcggtgtcctctcagcagtccaagttaaaacagagcaacatgctgacagcccaggaaatcctgcaccagttcggcttcacccagaccgggatcattagtattgaacgtaagccttgcaaccaccaggtcgatacggcaccaaccgtggtggctttatatgactataccgccaataggagtgatgagctgacaattcataggggggatatcatccgcgttttttttaaggacaatgaagattggtggtacggaagtattggaaaaggacaggagggttacttccctgctaaccacgtggcaagcgagaccctgtaccaagagttaccaccagaaattaaggagagatcacctccattgagcccagaggaaaaaaccaaaatcgagaagtccccggcccctcagaaacagtcaatcaacaaaaacaagagccaagattttcggctgggcagcgagtccatgactcacagcgagatgcgcaaggagcagtctcacgaggatcagggccatatcatggacacaaggatgaggaaaaacaagcaagctggtcgaaaggtgacattgatcgagtag

SEQ ID NO: 330552 - DNA, 3591 bp, Artificial Sequence
  derived and/or modified sequence
atgcccacagcagagtccgaggccaaggtgaaaacgaaagtgcgtttcgaagaactcctcaagacccatagcgatctaatgagagaaaaaaaaaaactcaagaaaaaactggtgcgaagcgaggagaacatctctcccgacaccatccgcagtaatctccattacatgaaggagacaacgtccgacgaccccgacacaattagatcaaatttgccccacatcaaagagactacatccgatgacgtgagcgctgcaaacacaaataatttaaagaagagtacccgcgtcacgaaaaataaactgcgtaacactcagcttgcaaccgaaaaccctaatggcgacgcctcagtcgaggaggacaagcagggcaaaccgaataaaaaggtgattaagactgtcccccagttaacaacccaggaccttaagcccgaaacccccgagaacaaggtcgactccacccatcaaaaaacccataccaagccccagcccggcgtggaccaccaaaaatctgagaaggccaatgagggtagagaggagaccgatctggaagaagacgaagaactaatgcaggcgtatcagtgccatgtcaccgaggagatggcgaaagagatcaaacgtaagatacggaagaaactgaaggagcagcttacgtacttcccctccgacactctgtttcacgacgacaaattgtcatcagagaaaagaaagaaaaagaaggaggtgccagtgttttctaaagctgaaactagcactttgaccatttctggagacactgtcgagggcgagcagaagaaagaatccagtgtgcggagcgtttcttctgatagccaccaagatgatgagatatccagtatggaacaaagcaccgaggacagcatgcaggacgacaccaaaccaaaaccaaaaaagaccaagaaaaagacgaaggccgtggccgacaacaacgaagacgtggatggggacggtgtgcatgaaattacaagcagagactcacctgtgtatccgaagtgtctcctcgacgatgacctggtcctcggagtctacattcatcggactgacagacttaagagcgactttatgatctctcaccccatggttaagatccacgtggttgacgaacacaccggacagtacgtgaagaaggatgacagtgggagaccagtgtcttcatactatgaaaaagaaaacgttgattatattctgcctattatgactcagccttacgacttcaaacagctgaaatcacggctaccagagtgggaggaacagatcgtgtttaacgagaacttcccgtacctacttcgtggatcagatgaaagccccaaagtcatattgttctttgagattctggattttctctctgtggatgaaattaagaataactcagaggttcagaatcaagagtgcggattccgcaagatcgcctgggcctttttgaagctgctcggcgcaaatggaaacgcaaacatcaatagcaagctccgcttgcagctatactatccaccaacaaaacccaggtctccactcagcgtcgtggaagccttcgagtggtggtctaagtgtcctagaaatcactatcctagcactctgtatgtgaccgttcgtggtctgaaggtccccgactgtatcaagccatcttatcggtccatgatggccctgcaagaagaaaaaggcaagcccgtccactgtgagaggcatcatgagtctagtagtgtggataccgagcccggactcgaggaaagcaaagaggtgattaagtggaaaaggctgcccggccaggcctgtcgcatacctaacaagcatctcttcagccttaacgccggggagcgcggatgtttctgcttggatttctcccacaatggtcgcatccttgccgctgcatgcgccagccgcgatgggtatccaatcatcctgtacgagatccccagcggacgctttatgcgggagctttgcggacacttgaatatcatctacgacctgtcttggagcaaggatgatcactacatacttaccagctcttctgatgggacagcgaggatttggaaaaacgagattaataataccaacacattccgcgttttaccccacccatctttcgtctataccgccaaattccaccctgctgtaagggaactcgtggtaaccggatgttacgactctatgattagaatctggaaagtcgagatgagagaggatagcgccatcttagtaagacagttcgatgttcacaagtcgtttatcaatagtttgtgctttgatactgaaggtcatcatatgtattctggcgactgcactggtgtcattgtagtatggaatacctacgtcaaaataaacgatcttgaacactccgtgcatcattggacgattaacaaggagattaaggagaccgaattcaaaggtatcccaatcagctatctggagattcacccgaatggcaagcgcctcttgatacacactaaggatagtaccctgcgcattatggatctgaggattcttgtggcccgcaagttcgttggcgcagctaactatcgcgaaaaaattcatagcacattgactccttgtgggacattcttattcgccggatctgaggacggtatcgtgtatgtctggaatcccgagacaggcgagcaggttgccatgtattcagacctgcctttcaaaagccccattcgggacattagctatcacccttttgagaacatggtagctttctgtgccttcggacagaacgagcccattctgctctatatttacgatttccatgtggcccagcaggaggccgaaatgtttaagaggtataacgggaccttccccctcccaggaatacaccagagtcaggatgccctctgcacttgtccgaagctacctcaccagggctcgttccagatcgacgagttcgtgcatactgagagttctagcaccaagatgcagctggtgaagcaaaggctggagactgtgaccgaggtgatccggtcctgtgctgcgaaggtgaacaagaatctttcattcacatcgccccccgcagtatcttcgcagcagagtaaactgaaacaaagtaacatgcttacagcccaggagattctgcaccaatttggtttcacacaaacaggaataataagcatcgaacgcaagccctgcaatcatcaggtcgatacggctccgaccgtagtggcgctttatgactatacggctaaccgcagtgatgagcttactatccaccgtggcgatattattagggtctttttcaaagacaatgaagactggtggtatggtagcatcggaaaaggccaggagggttacttccccgcgaaccatgtggcgagtgaaacgttgtatcaggagcttcctccagaaatcaaagagaggtctcccccactgtctcccgaggaaaaaacaaagatcgaaaaatcacccgccccccaaaagcagtctatcaataaaaacaaatcccaggatttcagactgggatcagagtccatgactcattccgaaatgcgtaaggagcagtcccacgaggatcagggccatattatggatacacgcatgcgcaaaaataagcaggccggcaggaaagttacactcattgagtag

SEQ ID NO: 330553 - DNA, 3591 bp, Artificial Sequence
  derived and/or modified sequence
atgcccacagctgagagcgaggccaaggtgaagaccaaggtgcgctttgaggagctgctgaagacccacagcgacctgatgagggagaagaagaagctgaagaagaagctggtgcgctctgaggagaacatcagcccagacaccatccgcagcaacctgcactacatgaaggagaccaccagtgatgatcctgacaccatccgcagcaacctgccccacatcaaggagaccaccagtgatgatgtgtctgctgccaacaccaacaacctgaagaagagcaccagggtgaccaagaacaagctgaggaacacccagctggccacagagaaccccaatggagatgcctctgtggaggaggacaagcagggcaagcccaacaagaaggtgatcaagacagtgccccagctgaccacccaggacctgaagccagagaccccagagaacaaggtggacagcacccaccagaagacccacaccaagccccagcccggggtggaccaccagaagtctgagaaggccaatgaaggccgggaggagacagacctggaggaggatgaggagctgatgcaggcctaccagtgccacgtgacagaggagatggccaaggagatcaagaggaagatcaggaagaagctgaaggagcagctgacctacttccccagcgacaccctcttccatgatgacaagctgagcagcgagaagaggaagaagaagaaggaggtgcctgtgttcagcaaggccgagaccagcaccctgaccatcagcggggacacagtggagggggagcagaagaaggagagctctgtgcgctctgtgtccagtgacagccaccaggatgatgagatcagctccatggagcagagcacagaggacagcatgcaggatgacaccaagcccaagcccaagaagaccaagaagaagaccaaggctgtggccgacaacaatgaagatgtggatggagatggagtgcatgagatcaccagccgggacagccctgtgtaccccaagtgcctgctggatgatgacctggtgctgggcgtgtacatccacaggacagaccggctgaagagtgacttcatgatcagccaccccatggtgaagatccacgtggtggatgagcacacaggccagtatgtgaagaaggatgacagcggccggcctgtgagcagctactatgagaaggaaaatgtggactacatcctgcccatcatgacccagccctatgacttcaagcagctgaagagccggctgcctgagtgggaggagcagatcgtgttcaatgaaaacttcccctacctgctgcggggcagtgatgagagccccaaggtgatcctcttctttgagatcctggacttcctgtctgtggatgagatcaagaacaacagcgaggtgcagaaccaggagtgtggcttcaggaagatcgcctgggccttcctgaagctgctgggcgccaatggaaatgccaacatcaacagcaagctgcggctgcagctgtactacccacccaccaagcccaggagccccctgtctgtggtggaggcctttgagtggtggagcaagtgccccaggaaccactaccccagcaccctgtatgtgacagtgcggggcctgaaggtgcctgactgcatcaagcccagctaccgctccatgatggccctgcaggaggagaagggcaagcctgtgcactgtgagcggcaccacgagagcagctctgtggacacagagcccggcctggaggagagcaaggaggtgatcaagtggaagaggctgcccggccaggcctgccgcatccccaacaagcacctgttcagcctgaatgctggggagcggggctgcttctgcctggacttcagccacaacggccgcatcctggccgccgcctgtgccagcagagatggctaccccatcatcctgtatgagatccccagcggccgcttcatgagggagctgtgtggccacctgaacatcatctatgacctgtcctggagcaaggatgaccactacatcctgaccagcagcagtgatggaacagcccgcatctggaagaatgagatcaacaacaccaacaccttccgggtgctgccccaccccagctttgtgtacacagccaagttccaccctgctgtgcgggagctggtggtgacaggctgctatgacagcatgatccgcatctggaaggtggagatgagagaagattctgccatcctggtgcggcagtttgatgtgcacaagagcttcatcaacagcctgtgctttgacacagagggccaccacatgtacagcggggactgcacaggagtcatcgtggtgtggaacacctacgtgaagatcaatgacctggagcacagcgtgcaccactggaccatcaacaaggagatcaaggagacagagttcaagggcatccccatctcctacctggagatccaccccaacgggaagaggctgctgatccacaccaaggacagcaccctgcgcatcatggacctgcgcatcctggtggccaggaagtttgtgggcgccgccaactaccgggagaagatccacagcaccctgaccccctgtggcaccttcctgtttgctggctctgaagatggcatcgtgtatgtgtggaaccctgagaccggggagcaggtggccatgtacagcgacctgcccttcaagagccccatccgggacatctcctaccacccctttgagaacatggtggccttctgtgccttcggccagaatgagcccatcctgctgtacatctatgacttccacgtggcccagcaggaggccgagatgttcaagcgctacaacggcaccttccccctgcccggcatccaccagagccaggatgccctgtgcacctgccccaagctgccccaccagggcagcttccagattgatgaatttgtgcacacagagagcagcagcaccaagatgcagctggtgaagcagaggctggagaccgtgacagaggtgatccgcagctgtgccgccaaggtgaacaagaacctgtccttcaccagccccccagctgtgagcagccagcagagcaagctgaagcagagcaacatgctgacagcccaggagatcctgcaccagtttggcttcacccagacaggcatcatcagcattgaaaggaagccctgcaaccaccaggtggacacagcccccaccgtggtggccctgtatgactacacagccaacagaagtgatgagctgaccatccacagaggagacatcatccgggtcttcttcaaggacaatgaagactggtggtacggcagcatcggcaagggccaggagggctacttccctgccaaccacgtggccagcgagaccctgtaccaggagctgcccccagagatcaaggagaggagcccccccctgagccctgaggagaagaccaagattgagaagagccctgccccccagaagcagagcatcaacaagaacaagagccaggacttccggctgggcagcgagagcatgacccacagcgagatgaggaaggagcagagccatgaggaccagggccacatcatggacaccaggatgaggaagaacaagcaggccggcaggaaggtgaccctgattgaatag

SEQ ID NO: 330554 - DNA, 3591 bp, Artificial Sequence
  derived and/or modified sequence
atgcccaccgccgagagcgaggccaaggtgaagaccaaggtgcggtttgaggaactcctcaaaacgcattcagacctaatgcgtgaaaagaagaaactcaagaagaaactggtgcgcagtgaagagaacatctcgcccgatacaatacggtcgaacctacactacatgaaggaaacaacttccgacgatcccgataccattcggagtaacctgccccacattaaagagactacgagcgatgatgttagcgccgctaatactaataatctcaaaaagtctaccagagtgaccaaaaacaagctgaggaatacgcagctggctacagaaaatcccaacggagatgcttctgttgaagaggataaacaggggaagcctaataagaaggtaattaagacagtacctcagttaacaactcaggaccttaagcctgagactcccgagaacaaagtggattccactcaccagaagactcacaccaagccgcaaccaggggtagatcaccagaagtccgagaaagccaacgagggcagggaagaaacagacctcgaggaagacgaggaattgatgcaggcatatcaatgccatgtgaccgaggagatggcaaaggagatcaaacggaaaatcaggaaaaagttaaaagagcagctgacctacttcccatcagatactttgttccacgacgacaaactgtcatccgagaagcgaaagaagaaaaaggaagtgccagtcttttccaaggcggagaccagtaccttaaccatttctggggatacagtcgagggcgagcagaagaaggaatctagcgttcgatctgtgagttcagacagccatcaagacgatgaaatctctagtatggaacagagcactgaagatagcatgcaggatgataccaaaccaaagccgaagaagaccaagaagaaaacaaaagccgtcgccgataacaacgaggacgtcgatggcgacggagtgcacgaaattaccagccgagatagccccgtttaccctaaatgcctgcttgacgacgatctggtgcttggcgtctacatccataggactgaccggctgaagtctgactttatgattagccacccaatggtgaagatacacgttgtcgacgaacacacaggtcagtacgtgaagaaagacgattcaggcaggccagtctctagctactacgaaaaggaaaacgtggactatattctgccaattatgactcagccatatgatttcaagcagcttaagtcgcgactccctgaatgggaagaacagatcgtctttaacgagaactttccataccttctgagagggtctgatgagagtcccaaagtgatactgttttttgaaattctggacttccttagcgtcgacgagatcaaaaataactctgaagttcagaaccaagaatgcggattccggaagatcgcttgggcctttttgaaactgctgggagcaaatggaaatgccaacattaattctaagctgaggcttcagttatattaccctccaaccaaacccagatctcccctctccgtcgtcgaagcctttgagtggtggtcgaagtgtcccaggaatcattaccccagcaccctgtatgttaccgtgcgtggcctaaaagtgcctgattgcatcaaacccagttacaggagtatgatggccctgcaggaggagaagggcaaacccgtgcattgcgaacgacaccatgagagctcgtcagtggacaccgaacctggactggaagaatccaaagaagtgatcaagtggaaacggctccctgggcaggcctgtcgaataccaaataagcatctatttagtctcaacgcaggcgagcgcgggtgcttctgtctcgatttcagccacaatggacggatcctggcggctgcgtgtgcttcccgagacggttacccaatcattctatatgaaatcccaagcggaagattcatgcgcgaactctgtggtcacttgaacatcatctatgacctgagctggtctaaggacgaccattatattttgacatcctcaagcgacggcaccgcgcgcatctggaaaaatgaaatcaacaacaccaacacatttagagtgctcccccatccttcattcgtatacacggccaaatttcaccctgcagttagggagctggttgtcacagggtgttacgacagcatgatccggatatggaaggtggagatgcgcgaggacagtgctattctcgtccgccagttcgacgttcacaagtcttttatcaattctctgtgcttcgatacagagggccatcacatgtattccggagactgcaccggcgtcatcgtggtgtggaatacctacgtgaagataaatgatctcgagcatagcgtgcatcattggaccatcaataaggaaatcaaagagacagagtttaaaggtatccctatcagctatctcgagatccatcctaacggaaaaaggctcctgattcacacgaaagattctaccctcagaatcatggatttgagaatccttgtagccagaaagttcgttggtgcagctaattaccgagaaaagatacactctactttgaccccatgtggtacttttctttttgccgggtccgaggacggcattgtgtatgtctggaatcccgagactggcgaacaggtggcgatgtattctgatttacccttcaaaagtcccatccgagatatcagttatcatccattcgagaacatggtggccttctgtgccttcggccagaatgaaccaattctcctctatatatatgactttcatgtagctcagcaggaagctgaaatgtttaaaagatataacggaacctttccgttacccgggattcatcagtcccaggacgcactgtgcacctgtcctaagctaccacatcaggggagcttccagatagatgaatttgttcacacggaatcatcttcgacaaagatgcagttggtgaaacagcggctcgagacagtcacagaggtgataaggagttgtgcggccaaggtgaacaaaaatctatcctttacttcaccaccagctgttagttcccagcagagcaaactcaagcagagcaatatgctcacagctcaagaaatactccaccagttcggctttactcagactggaatcatcagtatcgagcgtaagccttgcaaccaccaggtcgatacagcacccactgtcgtagccctttatgactatacagcgaataggagcgatgagcttaccattcaccgcggggacatcattcgggtcttcttcaaggataatgaggactggtggtacgggtctattggtaaaggccaagaaggatatttccccgcaaaccatgtcgctagtgaaacattgtatcaggagctcccacctgagattaaggagcgctcacccccgctgtctccagaggaaaagaccaagatagagaaaagcccagcaccccagaagcagagtatcaacaaaaacaaatcacaggactttagacttggttccgagagcatgacccactctgaaatgaggaaggaacagagccatgaggatcagggacacataatggacactagaatgaggaagaacaagcaggccggccgaaaggtgaccctgatcgagtag

SEQ ID NO: 330555 - DNA, 3591 bp, Artificial Sequence
  derived and/or modified sequence
atgcccaccgccgagagcgaggccaaggtgaagaccaaggtgcggttcgaagaactactaaagacccacagcgaccttatgcgagagaagaaaaaactcaagaagaagctggttcggtcagaggaaaatattagtcctgatacaattagatccaacttgcactacatgaaggagaccactagtgacgaccctgacacgatccgaagtaatctcccacacattaaagagactacctcagacgatgtgagcgctgcaaatactaacaaccttaagaagagcacacgagtgaccaaaaataaactgaggaatactcagctagcaactgaaaatcccaacggcgacgccagtgtggaagaagataagcaggggaaacctaacaagaaagttatcaaaaccgttccccaactgacgactcaggatttaaaaccggagacacctgagaacaaagtggactcaacccatcagaagacacacaccaagccacagcccggcgtggaccatcagaagtcagagaaggccaacgagggacgggaagaaaccgacctcgaagaggacgaggagctcatgcaggcctatcagtgccacgtgaccgaggagatggctaaagaaataaaaaggaagattaggaaaaagctcaaggaacagctcacgtacttcccatccgataccctctttcacgacgacaagctgtcatccgaaaagcgaaaaaaaaagaaagaggtacctgtgttctctaaggccgaaacttcaactctgacaattagcggagacaccgtggagggggagcaaaagaaagagagttcagtccggtccgtgtctagtgacagccaccaggacgatgaaattagctctatggagcagtcaacggaggactccatgcaagatgatactaagccgaagccaaaaaaaacaaaaaaaaagactaaagcggtggccgacaataatgaggacgtggacggagacggagttcatgaaatcacctcgagggatagtcctgtctatcccaaatgcttactcgatgacgacttggttctgggagtatacattcacagaaccgacagattgaagtcagatttcatgatctcgcaccccatggtgaagattcatgtggtcgacgaacacaccggccaatatgtgaagaaggacgactcaggccgtccggtttctagttattacgagaaagagaacgtagactatattctgcccattatgacccagccctacgactttaagcagctgaagagccgcctgcctgaatgggaggagcaaatcgtgttcaatgagaactttccatacctcctacggggttccgatgagtctccaaaggttatcctgtttttcgagatcctggacttcctctccgttgacgagattaagaacaactccgaggtgcagaatcaggagtgcgggttccgtaaaattgcatgggccttccttaaactgttgggagccaatgggaacgctaacatcaattctaaactcagactgcagctttactacccaccaactaagccacgcagcccactgtccgtggtggaggcattcgagtggtggtctaagtgccctcgaaatcattaccctagcactctttatgtgactgtccggggactcaaggtgccagattgcatcaaaccttcttaccggtccatgatggccctccaagaagagaaggggaaacctgtacattgcgaaagacatcacgaatctagcagtgtcgacaccgagcctggccttgaagagtctaaagaagttattaagtggaaaaggttgcctggacaggcctgccggataccaaataaacatttattctccttgaacgcgggggaaagaggctgtttttgtctcgacttctctcataacggccgaatcttggctgccgcatgcgcttcacgcgacggatatccaattattctctatgagatcccgtccggtagatttatgagggagctgtgtggtcatcttaacataatttatgacctcagctggtctaaggatgatcattacatactgacctctagcagcgatggcacggcaaggatctggaagaatgagattaacaacaccaacacattccgagtgctcccgcacccgtcctttgtctataccgctaagttccaccctgccgtgagagagttagtggtcacaggctgctacgatagcatgatccgcatatggaaagtcgagatgagggaggattccgcaatcttagtcaggcagtttgacgttcacaagagcttcataaacagtctgtgctttgacacggaggggcaccacatgtactcaggcgattgcacaggtgtgattgtcgtatggaacacctacgtaaaaataaacgatctggaacatagcgtacaccactggacaattaacaaggaaatcaaggagaccgagtttaagggcattccaatctcctatcttgaaattcacccaaatggtaaaaggttgcttatccacacgaaggattccaccctaaggatcatggacctgcgtatcctggtggcaaggaaattcgtcggagcggctaactatcgagagaagatccactctaccttgaccccttgcggaacattccttttcgccggcagtgaggatggcatagtctacgtgtggaacccagagactggggaacaggtcgctatgtattctgacttgccgtttaagagcccaattcgagatataagttatcaccctttcgaaaacatggtcgcgttttgcgcctttggccagaatgagcctattctcctctacatttatgacttccacgtggcccagcaggaggctgaaatgttcaaacgctataatggcactttccctctaccaggcatccaccagtctcaggatgctttatgtacctgtcctaagctgccccaccagggtagtttccagatcgacgagttcgtccatacagaaagttctagcactaaaatgcagctcgtgaagcagcggttggagacagtgacagaagtcatccgcagttgtgctgccaaagtgaataagaatctgtcgtttacgagtccacccgcagtgtcgagtcagcagtccaagcttaagcaatcaaacatgctcaccgcccaagagattttacatcagtttggcttcacacagacagggatcatctccatcgagaggaagccttgtaatcaccaggtggataccgcccccacagttgtggccctgtacgattatactgctaatagatctgacgagctaacgatccataggggcgacattattcgcgtgttttttaaggacaatgaggactggtggtacggaagcatagggaaggggcaggagggctatttccctgcaaaccacgtcgcgtctgaaacgctgtaccaggaactgcctcccgaaataaaagaacgaagtcccccccttagtcccgaagaaaaaacaaagatcgagaaatctcccgcccctcagaagcagtctatcaacaagaacaagagtcaagatttcagactgggatccgagtccatgactcattctgaaatgcgaaaagagcagtcccacgaggaccaaggccatataatggatacgaggatgcggaaaaacaagcaggctggcagaaaagtgactttaatcgagtag

SEQ ID NO: 330556 - DNA, 3591 bp, Artificial Sequence
  derived and/or modified sequence
atgcccaccgccgagagcgaggccaaggtgaagaccaaggtgcggtttgaggaattactgaaaactcactccgacctgatgcgggaaaagaaaaaactgaaaaaaaaactggtgaggtcagaagagaacattagcccagatacgatcagatccaacctccattatatgaaggaaaccacatccgatgatcccgacaccatcaggtctaatttaccgcatatcaaagagaccaccagcgacgatgtgtctgctgctaatactaacaacctgaaaaagtctactcgggtaaccaaaaacaagcttaggaatacacagttggcgaccgaaaatcctaatggcgacgcgtctgtcgaggaagataagcagggaaaaccaaataagaaagtcataaagactgtcccgcaactgactacccaggacctcaaaccagaaactcctgagaataaggtcgattccacacaccagaagacacataccaaacctcagccgggggtggatcaccagaaaagcgaaaaggcgaacgagggtagggaagaaacagacctggaagaggacgaagaactgatgcaggcataccagtgtcacgttaccgaagaaatggccaaagaaattaaaagaaaaatccggaagaaactgaaagagcaattaacatattttccttctgacaccctgtttcacgatgataaattatcatcagaaaagaggaagaaaaaaaaagaggttcccgttttttccaaggccgagacaagcactctgacaatctcaggagatacagttgaaggcgaacagaaaaaggagtcatctgtacggtccgtgtccagtgattctcaccaggacgatgagattagcagcatggagcagagcactgaggacagcatgcaagacgacacaaaaccaaaaccaaagaaaactaagaaaaagacaaaagctgtcgcggacaataatgaagatgtcgatggggacggagtacacgaaatcacatctcgggatagtcccgtgtacccaaagtgtcttctggacgacgatctggtgctgggggtttacatacatagaaccgacaggctcaaatctgactttatgatctcgcaccctatggtcaagatccatgtggtggacgagcacactgggcagtatgtcaagaaagatgactctggacgacctgtttcatcttactacgagaaggagaatgttgattatattctgccaatcatgactcaaccatatgattttaagcagttaaaatccaggctgccagagtgggaagaacagatcgtattcaatgagaattttccgtacttgcttcggggaagcgatgaatcacccaaagtcattctcttcttcgaaatactcgactttctgagtgtcgatgaaattaaaaataactccgaagtgcaaaatcaggaatgtggcttcagaaagatagcctgggctttcctcaagctactgggggccaacggcaacgctaatattaactcgaagctgagactccaattgtattacccgccaacgaaacccagaagtcccctgtccgtggtcgaggcctttgagtggtggtctaagtgtccccgcaaccattacccttcaacactgtatgtgaccgtaagaggattaaaagtgcctgattgtatcaaaccatcgtatcgaagcatgatggccctgcaggaggagaagggtaagccagtgcattgtgaacgccaccatgagtcaagttcagtggacactgagcctggtcttgaggaatctaaggaagtgatcaagtggaagaggcttcctgggcaagcttgtaggatcccaaacaaacacttatttagtttaaatgccggggagcgaggctgtttctgcctcgacttcagccataatgggcgtatacttgccgcagcctgtgcttcccgcgatgggtatcccataatcctctacgagatcccatcaggccgattcatgcgggagctctgcggccatcttaatataatctacgatctctcttggtcaaaggacgatcattacatcctgacatcgtcctccgacggcactgctcggatatggaaaaacgagatcaataataccaacaccttccgggtgctgccacaccccagttttgtttatactgccaagttccatccggctgtgagggagctagtggtgaccgggtgctacgactccatgatccgcatctggaaagttgagatgcgcgaagactctgcaatactggtacggcagttcgatgtgcacaagtcctttatcaacagcctatgtttcgatactgaggggcaccacatgtatagcggcgactgtaccggagtgatcgtggtttggaacacctacgtgaaaatcaatgacttagaacacagcgttcaccactggacaattaataaggagatcaaggagactgagttcaagggaatccctatttcctacctcgagatccacccaaacggcaaacgtctgttgattcacacaaaggacagcacgctgcgcatcatggacctgcgcattttggttgcccgcaagttcgtcggggcagcgaattacagggagaaaatacatagtacgctgactccttgcggcaccttcctgtttgccggctcagaagacggtatcgtgtacgtctggaacccagaaacaggcgagcaagtggccatgtatagcgacctgccttttaaatctccaatccgagatatcagctatcacccttttgaaaatatggtggccttctgcgctttcggtcagaatgagcccatattgctgtacatatacgactttcatgtagcccagcaagaggccgaaatgtttaagagatacaatggcaccttccctcttccggggattcatcaaagtcaagatgcattatgtacgtgtccgaaactcccccaccaggggagcttccaaatcgacgagttcgtgcatacagagtcatcttctaccaagatgcagctcgttaagcaaaggctggaaacggtaacagaagtgatccggtcttgtgcagctaaagtaaataaaaacctcagtttcacttcaccccccgctgtatcctcacaacaatccaaactgaaacagtcgaatatgttgactgcccaggagatcctgcaccagttcggattcacacaaactggcattatttcaatcgagaggaaaccttgcaaccaccaggtcgacacagcccctaccgtggtggccctgtacgattacaccgcgaaccggtctgacgaactaaccattcaccgcggggatattatccgggtatttttcaaggataacgaagactggtggtacggcagtattggcaaagggcaggaggggtactttccagccaaccacgtggcatctgagacgttataccaggagcttcctcctgagattaaggagcggagccccccactaagtcccgaagaaaagaccaaaatcgagaaatcccctgcccctcagaaacagagcattaacaaaaataagtctcaagactttcggctgggcagcgagtccatgacgcattctgagatgagaaaggaacagtcgcatgaggaccaggggcatatcatggatacccgcatgcggaaaaataagcaggctggacggaaggtgaccttgattgaatag

SEQ ID NO: 330557 - DNA, 3591 bp, Artificial Sequence
  derived and/or modified sequence
atgcccaccgcggagagcgaggcaaaggttaagacgaaggtgcggtttgaagaactgcttaaaacccacagcgacttaatgcgagagaagaagaagttaaagaagaaactggtgagaagcgaggaaaatatatcccctgacacaataagatcaaatctacactacatgaaggagacaacgtccgatgatccagataccataagatcgaacctcccacatattaaagaaacaacctccgacgacgttagcgccgcaaatacaaataatctaaagaaatccacaagagttaccaagaataagctgcggaacacacagcttgctactgagaatcctaacggcgatgcctcagtagaggaggacaagcagggtaagcccaacaaaaaggtgattaagacagtgccccagcttaccactcaggatctgaaaccagagacacccgaaaataaggtggacagtacacatcagaaaacccatacgaaaccccaaccaggtgtggatcaccagaagtctgaaaaggcgaacgaggggcgagaggaaaccgacctggaggaagacgaagagctgatgcaggcatatcaatgtcacgtcaccgaggaaatggccaaggaaatcaagcgtaagatcagaaaaaagcttaaagaacagctgacttattttccctccgatactctattccacgacgacaagctttccagtgaaaaaaggaagaaaaagaaggaagtgcctgtatttagtaaagctgagactagtactctcacgatatctggggatacagtggaaggggaacaaaagaaagagtcatccgtacggagcgtgtccagcgactctcatcaggacgacgagataagctccatggagcagtctacggaagatagcatgcaggatgacaccaagccaaaacccaaaaagaccaaaaagaaaaccaaggccgtggccgataacaatgaggatgtcgacggtgacggcgtgcatgaaattacttcaagagacagccccgtgtaccccaagtgcctgctcgatgacgacttggtcctgggcgtgtacattcacaggacagatcgactgaagtctgattttatgatctcccacccaatggtaaagatccatgtggtggacgagcataccggacagtacgtaaagaaagatgattcgggcagaccagtctcttcctattatgaaaaggagaatgttgactacattctgccaattatgactcagccctatgattttaaacagctcaagagtagactccccgagtgggaagaacagatcgtctttaacgagaatttcccttacctcctgcgaggtagcgacgagagtcccaaggtgatcctgttcttcgagattcttgatttccttagcgtagacgaaatcaaaaacaattctgaagtgcagaaccaggagtgtggctttagaaagattgcctgggcatttcttaagctgctgggcgctaacggcaatgccaacatcaattcgaaactcagattgcaactctactacccccctactaagcctagatcccctttgtccgtagtcgaagccttcgaatggtggagcaagtgcccacgaaatcactacccaagtacactttacgtgacagttcgaggactcaaggtgcccgactgcatcaagccttcctatcggtccatgatggcacttcaagaagaaaaagggaagcctgtgcattgcgaacggcaccatgagagtagttccgtggatactgagcctggtctggaagagtcgaaggaggtgatcaaatggaagaggctgcccggacaggcctgtcgaatcccgaataagcatctattttctcttaatgccggagaaaggggttgtttctgcttggacttctcccacaacggcaggattctggcagcagcatgtgcatcacgcgatggctacccaatcattctgtatgagattccaagtgggcgttttatgagggagctttgcggccacctcaacattatatacgatctgtcatggtccaaggatgaccattatatcctgacaagcagttctgacgggaccgccagaatctggaagaacgagatcaataacactaatacctttcgagtactcccgcacccatcgttcgtctatactgctaaattccatcctgcagttcgggagcttgtggtcaccggctgctacgacagtatgatccgaatatggaaggtagagatgagagaggattctgccatcctcgtccggcagtttgatgtgcataaaagtttcatcaactcattgtgctttgacaccgagggccatcacatgtactccggagattgtaccggggtgatagtggtctggaacacatatgtcaaaataaatgatcttgagcacagtgtccaccactggaccattaacaaggagatcaaggagactgagttcaagggcattccaatcagctacctggagatccaccccaatgggaagcggttgcttattcacaccaaagactcaaccctccggataatggacctgaggatcttagtggccaggaaatttgtgggcgctgctaattatagagagaagattcacagtacactcactccttgcgggacgttcttgtttgctggttccgaggatggtatcgtttatgtgtggaaccctgagaccggagagcaggtggccatgtactcagacttacccttcaaaagtccaatccgagatattagttatcacccctttgagaacatggtggcattttgcgccttcggccagaatgaacctatcctgctgtacatctacgacttccacgtagcacagcaggaggccgaaatgtttaagcgatataatgggacctttccccttccaggcatccaccagagccaggacgcactgtgtacctgccccaaattacctcatcaggggtcatttcagatagacgagtttgtccatacagagtcttctagcactaagatgcagctggtcaagcaacgccttgaaaccgttactgaagtgatacgctcttgtgcggctaaggttaacaagaacctttctttcactagccctccggcagtgagcagccaacagtcgaagctcaaacagagtaacatgctcaccgcccaagagattcttcaccaattcgggttcacgcaaactggtattatatcgattgagagaaagccgtgtaaccaccaggttgatacggctcccactgttgtggctctgtatgattatacggcgaacagatcagatgagctcaccatccatcggggtgatatcattagggtctttttcaaggacaatgaggattggtggtatggttcaataggaaaaggacaagagggatacttcccagccaaccatgtggcgtcagaaacgctgtaccaggagttacccccagagatcaaggagcggtctccacctttaagccccgaagagaagaccaagatcgaaaaaagtccggctcctcagaagcagtctattaataagaataaatcacaagactttcgattaggttcggaatccatgacgcacagcgagatgagaaaggagcagagccatgaggatcaaggccatattatggacacccgcatgcgcaaaaacaaacaggctggcagaaaagtgactctcattgaatag

SEQ ID NO: 330558 - DNA, 3591 bp, Artificial Sequence
  derived and/or modified sequence
atgcccacagccgagtcggaggccaaagttaagacaaaggtgcgatttgaggaactactgaaaacacactcagatctgatgagggaaaagaaaaagctgaagaaaaagctggtgagatcagaggaaaatatcagtccggatacgattcgttccaacctgcactacatgaaagaaaccacttccgacgatcctgacacaatccgttccaacctacctcatatcaaggaaactacaagcgacgacgtgtctgccgctaacacaaataatctcaaaaagtccactagagtgaccaaaaacaaactacggaacactcaactcgctaccgaaaatccaaacggggacgctagtgttgaagaagataagcaaggcaagcctaacaagaaagttatcaagaccgtacctcagctcacgacacaagatcttaaacccgagacgcctgagaataaagtcgatagcacccatcaaaaaacacacacaaagccccagcccggagtagaccaccagaagtcagagaaggccaacgagggtcgagaggaaaccgatttggaggaggatgaagaacttatgcaggcatatcaatgtcacgtcaccgaggagatggccaaggaaatcaagcgcaagatcaggaagaaactgaaagagcagcttacttatttccctagcgacacccttttccatgacgataagttgagcagtgagaagcggaaaaagaagaaagaggtgccagtgttctcaaaagctgaaacttctacactgacgatcagtggggacacagtagaaggggagcagaagaaggaaagcagtgtcaggtcagtttcatccgattctcaccaagacgacgaaatcagctcgatggagcagagtactgaggacagtatgcaggacgataccaaacccaaacccaaaaaaactaaaaagaaaacgaaggccgtggctgataacaatgaagatgttgacggcgacggggttcatgaaatcacgagcagggactcaccagtctatccaaagtgcctactggacgacgacctggttctgggagtctacatccatcgcaccgatcgtctaaagagtgatttcatgatttcccacccaatggtgaaaatccatgttgtcgacgagcatactggccaatacgtcaagaaagatgattccgggagacctgtatctagctattatgagaaggaaaatgtggactacatcctgccaatcatgactcaaccatacgattttaaacaactgaagtctcggctgcccgagtgggaggaacagattgttttcaatgagaatttcccgtacctgctgcgagggagcgatgaaagccccaaggttatcctgtttttcgaaatcctggattttttaagcgtggacgagataaaaaataacagcgaagtacagaatcaggagtgcggcttccgtaagatcgcctgggccttcctgaagcttcttggagccaatggcaacgcgaatatcaatagcaagttgcgattgcagctgtactaccctccgaccaagccacgatctccactcagcgtagtggaagccttcgagtggtggtccaaatgtcctcgcaatcattatccctctacactttatgtgaccgtccgaggccttaaggtgccagactgtatcaagccgtcttaccggtccatgatggcgctgcaagaggagaaagggaagcctgttcattgtgagaggcaccatgaaagcagctcggtagacacggaaccgggacttgaggagtccaaggaagtgatcaagtggaagcggcttccgggtcaggcatgtcgcatccccaacaaacatctgttcagcctgaatgcaggtgagcgtgggtgtttctgcctggacttttctcacaacggcaggatcctggccgcagcttgtgccagtagagacgggtacccaatcatcctgtacgaaatcccgagcgggcgatttatgagagagctctgcggacatctgaatatcatctacgacctctcatggagtaaggatgaccattacatactgacatcttcgagcgatgggaccgcgagaatatggaagaatgaaattaataacaccaacacatttcgcgtcttacctcaccccagcttcgtctacactgcgaagtttcacccagccgttagggaactggtggtgacgggctgctacgacagtatgatccgcatctggaaagttgagatgcgcgaggactctgcgatcctggtgcgccagtttgatgtacacaaaagttttataaattccttgtgcttcgatacagagggtcaccatatgtattctggcgattgtaccggtgtgatagtggtgtggaacacatacgtgaagatcaacgaccttgagcactctgtccaccactggaccatcaataaggaaattaaggagacggagttcaaaggcatcccaatctcttatctggagatacatcccaacgggaaacgactgctcatccataccaaagattctaccctgagaattatggatctaagaattttagtcgctaggaagttcgtgggagctgctaattacagggaaaagatccattcgacgctgactccctgtggtacattcctgttcgcaggaagcgaggacgggatcgtgtacgtctggaaccctgaaacaggcgagcaagtagcaatgtacagtgatttgccatttaagtcgcccatccgagacatctcttaccaccccttcgagaacatggtcgccttctgcgcttttggacaaaatgaaccgatactcctctacatctacgattttcacgtcgctcagcaagaggctgaaatgtttaagcggtataacggaacgtttcccttacctggaatccaccagtcccaggatgccctctgtacttgtcccaaactgccccatcagggttcatttcagattgatgaattcgtgcacacggaaagttctagtacgaagatgcaattagtgaaacagcgcttagagacagtgaccgaggtcatacggtcctgcgccgctaaggtaaacaagaatctttcatttacttcaccacccgcagtgtcctcacagcagagtaaacttaagcaaagtaatatgcttacagcccaggaaattctgcatcagtttgggtttacgcaaaccggaatcatttccatcgaacggaagccctgcaatcatcaggtcgatactgcacccaccgtagtggcactgtacgactataccgccaaccgttccgacgaactcactatccaccggggtgatattatccgggtcttctttaaagacaacgaggattggtggtacggatcaatcggtaaaggccaggaggggtacttcccagccaatcacgtggctagtgaaactctttatcaggaactgccccctgagattaaggaacgaagcccacctctgtcaccggaagaaaagacaaagatcgagaaatctcccgcaccccaaaagcagtctatcaataagaacaaaagccaagactttagactaggctctgaaagtatgacccacagtgaaatgcggaaggaacaatcacatgaggaccaagggcacataatggacacacgcatgcgcaaaaacaaacaggccggacgtaaggttaccctaatagaatag

SEQ ID NO: 330559 - DNA, 3591 bp, Artificial Sequence
  derived and/or modified sequence
atgcctaccgcagaaagtgaggccaaggtaaaaactaaagtacggttcgaagagctcctgaaaacacattcagacctcatgcgtgagaagaaaaagctaaagaagaaactagtgaggagcgaggagaacatctcgcccgatactattcgcagcaatctccattacatgaaagagactacttctgacgatccagacacaattcgctcaaacctccctcacattaaggaaacgaccagcgacgatgtcagtgctgccaatactaacaatctgaaaaagtctacccgagtgactaagaacaagctacgaaatacccagctggccactgagaaccctaatggggatgcttctgtggaggaggataagcaaggcaaacctaacaaaaaggtcatcaaaaccgtgccgcagctgaccacacaagatctgaagcccgagacccccgagaacaaagtggattccacgcaccagaaaacccataccaagcctcagcccggtgttgaccatcagaagagtgagaaagctaatgaagggcgtgaggagacagatctcgaggaggacgaagaactaatgcaggcataccagtgccatgtgaccgaagaaatggccaaggagatcaaaagaaagatcagaaagaaactgaaagagcaactgacatatttcccaagtgatactttatttcacgatgacaaactgtcctccgagaaaaggaagaaaaaaaaagaggttccggtgttcagcaaagccgagacctctactcttacaatcagcggtgatacagtggaaggggaacaaaagaaggagtcatctgtgcggagtgtgtcctccgattcgcatcaggacgacgaaatcagcagtatggagcagagcactgaggactccatgcaggacgacactaaacccaaaccaaagaagacaaaaaagaagacaaaagcagtcgcagacaataatgaagatgtagacggagatggggtacacgagatcacctctcgggactctccagtgtaccctaaatgccttctggacgacgatctggtgttgggggtctacattcataggaccgaccggctcaagtctgacttcatgataagccatcctatggttaaaatccatgtcgtggatgagcatactggacagtatgtgaaaaaggatgattcaggccgacccgttagttcctattacgagaaagagaatgtggattatatcttgcctatcatgacacagccgtacgactttaaacaactgaaatcccggttaccagaatgggaggaacagattgtgtttaacgagaacttcccgtacctgcttcggggttccgatgaaagtcctaaagtcatccttttctttgaaatcctggactttttgagcgttgacgaaattaagaataatagtgaggtccagaatcaggaatgtgggtttaggaaaatagcttgggcatttctgaagttactgggcgctaacggcaacgcgaatattaactccaagcttaggctgcagctgtactacccaccaacaaaaccacggagtcccctgtctgtcgtcgaggcattcgaatggtggagcaagtgtcccaggaaccactacccaagcaccctatatgttactgttcggggattgaaagtgcctgactgtattaagccgagctatcggtccatgatggccctccaggaggagaaggggaaaccagtccactgtgagagacaccacgagtccagcagtgttgataccgagccgggtctggaagagagtaaagaagtgatcaaatggaagcgccttccaggccaggcatgtaggattccaaataagcacctgttcagcctgaacgctggggagcgcggttgtttttgcctggatttctcccataatggccgtatcctcgctgcagcctgcgccagtagggacggttatcccataatcttgtacgagatcccgtctggacggttcatgcgagaactctgcggccatcttaatattatctacgacttgtcctggagcaaggacgatcattatatactgacaagttcgagcgacgggaccgctcggatctggaagaatgaaattaataatactaacaccttcagagtactcccccacccatctttcgtctataccgcaaaatttcatcctgcggttcgtgagctggtggttacgggttgctacgattccatgatccggatctggaaagtggaaatgagagaagatagtgcaatcctcgtccgacagttcgatgtccataagtctttcataaattccttgtgctttgataccgaagggcatcacatgtacagcggggactgcaccggagtaatcgtggtttggaatacatacgttaagattaatgatctcgaacactccgttcaccattggactatcaacaaggagatcaaggaaaccgaatttaagggaatccccatttcctatctggagatccaccccaacggaaaaaggctgctgatacacaccaaggacagtaccttacgcataatggacctccgtatcttagtggcccgtaagttcgttggcgcagctaactaccgcgaaaaaattcactcaacgctgacgccctgcgggaccttcctcttcgctggcagtgaggacgggattgtgtacgtttggaaccccgagaccggcgagcaggtggctatgtactctgatctgccctttaaaagcccaatccgggacattagctaccatcccttcgaaaacatggtggcgttttgtgcgttcgggcaaaatgagcccattcttctctatatatatgacttccacgttgctcagcaggaagctgaaatgttcaaaagatataacgggacttttccactgcccggaattcaccagtcacaggatgctttgtgcacctgtcccaagctgccacaccaaggcagttttcaaatcgatgaattcgttcatacggagtcctcctctacgaaaatgcagctggtcaaacagcggctggagacagttaccgaagtgatcaggtcctgtgccgcaaaagtcaataagaacctgtcctttacatcacctccggcagtttcatcacagcagagcaaactcaagcaaagtaatatgctgacagctcaagagattctccaccagttcggcttcactcaaaccggcattatctcaatagagcgcaaaccctgtaaccatcaggtggatactgcccctaccgtagttgcactttatgattacaccgccaatcgttctgatgagctcacgatccacaggggtgatattatcagggtctttttcaaggacaacgaagattggtggtacggttctattggcaaaggccaggaaggatactttccagctaatcatgttgcatcagagactttgtaccaggaactgccacctgagatcaaagaacggtcaccccctttgtcccctgaagagaaaacaaagattgagaagagtccagcgcctcaaaaacaatctattaacaagaacaagtcgcaggatttcaggttggggtctgaatccatgacgcattcggagatgaggaaagaacaatctcacgaggatcaggggcacattatggatactcggatgcgcaaaaacaaacaggcaggccgaaaagtcacacttatcgaatag

SEQ ID NO: 330560 - DNA, 4335 bp, Artificial Sequence
  derived and/or modified sequence
tgacgtcagcaggcggcgcgctgtccgcactgcggcacagagccgcggcttgctttcaggacacgggtcgctggcgggttaggtggctgcgtggccgcctcacttcgcgcacgcgccgctaggctgggggagttgatttgcactgctccgggtgtcggctccggcgggacgggcggttctgcgtacccctctccagtgtcaacctggggctgaatcttcaacctgtcaaagccttcttaattatgtctgagaaaagtactaaaataggtgccattttaaattcccagacaaggaaaaaccaaggattagaaattaagtagcttgcccaaggccacacatcagatcctgattgagtcaatgctttgcattctcagtcctctgcataaagctgagagatgcctacagctgagagtgaagcaaaagtaaaaaccaaagttcgctttgaagaattgcttaagacccacagtgatctaatgcgtgaaaagaaaaaactgaagaaaaaacttgtcaggtctgaagaaaacatctcacctgacactattagaagcaatcttcactatatgaaagaaactacaagtgatgatcccgacactattagaagcaatcttccccatattaaagaaactacaagtgatgatgtaagtgctgctaacactaacaacctgaagaagagcacgagagtcactaaaaacaaattgaggaacacacagttagcaactgaaaatcctaatggtgatgctagtgtagaggaagacaaacaaggaaagccaaataaaaaggtgataaagacggtgccccagttgactacacaagacctgaaaccggaaactcctgagaataaggttgattctacacaccagaaaacacatacaaagccacagccaggcgttgatcatcagaaaagtgagaaggcaaatgagggaagagaagagactgatttagaagaggatgaagaattgatgcaagcatatcagtgccatgtaactgaagaaatggcaaaggagattaagaggaaaataagaaagaaactgaaagaacagttgacttactttccctcagatactttattccatgatgacaaactaagcagtgaaaaaaggaaaaagaaaaaggaagttccagtcttctctaaagctgaaacaagtacattgaccatctctggtgacacagttgaaggtgaacaaaagaaagaatcttcagttagatcagtttcttcagattctcatcaagatgatgaaataagctcaatggaacaaagcacagaagacagcatgcaagatgatacaaaacctaaaccaaaaaaaacaaaaaagaagactaaagcagttgcagataataatgaagatgttgatggtgatggtgttcatgaaataacaagccgagatagcccggtttatcccaaatgtttgcttgatgatgaccttgtcttgggagtttacattcaccgaactgatagacttaagtcagattttatgatttctcacccaatggtaaaaattcatgtggttgatgagcatactggtcaatatgtcaagaaagatgatagtggacggcctgtttcatcttactatgaaaaagagaatgtggattatattcttcctattatgacccagccatatgattttaaacagttaaaatcaagacttccagagtgggaagaacaaattgtatttaatgaaaattttccctatttgcttcgaggctctgatgagagtcctaaagtcatcctgttctttgagattcttgatttcttaagcgtggatgaaattaagaataattctgaggttcaaaaccaagaatgtggctttcggaaaattgcctgggcatttcttaagcttctgggagccaatggaaatgcaaacatcaactcaaaacttcgcttgcagctatattacccacctactaagcctcgatccccattaagtgttgttgaggcatttgaatggtggtcaaaatgtccaagaaatcattacccatcaacactgtacgtaactgtaagaggactgaaagttccagactgtataaagccatcttaccgctctatgatggctcttcaggaggaaaaaggtaaaccagtgcattgtgaacgtcaccatgagtcaagctcagtagacacagaacctggattagaagagtcaaaggaagtaataaagtggaaacgactccctgggcaggcttgccgtatcccaaacaaacacctcttctcactaaatgcaggagaacgaggatgtttttgtcttgatttctcccacaatggaagaatattagcagcagcttgtgccagccgggatggatatccaattattttatatgaaattccttctggacgtttcatgagagaattgtgtggccacctcaatatcatttatgatctttcctggtcaaaagatgatcactacatccttacttcatcatctgatggcactgccaggatatggaaaaatgaaataaacaatacaaatactttcagagttttacctcatccttcttttgtttacacggctaaattccatccagctgtaagagagctagtagttacaggatgctatgattccatgatacggatatggaaagttgagatgagagaagattctgccatattggtccgacagtttgatgttcacaaaagttttatcaactcactttgttttgatactgaaggtcatcatatgtattcaggagattgtacaggggtgattgttgtttggaatacctatgtcaagattaatgatttggaacattcagtgcaccactggactataaataaggaaattaaagaaactgagtttaagggaattccaataagttatttggagattcatcccaatggaaaacgtttgttaatccataccaaagacagtactttgagaattatggatctccggatattagtagcaaggaagtttgtaggagcagcaaattatcgggagaagattcatagtactttgactccatgtgggacttttctgtttgctggaagtgaggatggtatagtgtatgtttggaacccagaaacaggagaacaagtagccatgtattctgacttgccattcaagtcacccattcgagacatttcttatcatccatttgaaaatatggttgcattctgtgcatttgggcaaaatgagccaattcttctgtatatttacgatttccatgttgcccagcaggaggctgaaatgttcaaacgctacaatggaacatttccattacctggaatacaccaaagtcaagatgccctatgtacctgtccaaaactaccccatcaaggctcttttcagattgatgaatttgtccacactgaaagttcttcaacgaagatgcagctagtaaaacagaggcttgaaactgtcacagaggtgatacgttcctgtgctgcaaaagtcaacaaaaatctctcatttacttcaccaccagcagtttcctcacaacagtctaagttaaagcagtcaaacatgctgaccgctcaagagattctacatcagtttggtttcactcagaccgggattatcagcatagaaagaaagccttgtaaccatcaggtagatacagcaccaacggtagtggctctttatgactacacagcgaatcgatcagatgaactaaccatccatcgcggagacattatccgagtgtttttcaaagataatgaagactggtggtatggcagcataggaaagggacaggaaggttattttccagctaatcatgtggctagtgaaacactgtatcaagaactgcctcctgagataaaggagcgatcccctcctttaagccctgaggaaaaaactaaaatagaaaaatctccagctcctcaaaagcaatcaatcaataagaacaagtcccaggacttcagactaggctcagaatctatgacacattctgaaatgagaaaagaacagagccatgaggaccaaggacacataatggatacacggatgaggaagaacaagcaagcaggcagaaaagtcactctaatagagtaaagaattgaagaaaagttaagagctgccgaaatgcacagaggtgaaaatgacaaaccaaatggaatttctcttcagagttcagaattttcagatactaaggaggaagaaaggatccactacttcttgttcttatgaatgactctagaaaaatcagaatcaagttgtgggtggaaaaatcaacgtggcctttgagttcagttgttataaaccattgtgactattgttggtcaaagtattggtacttatattgttagtaattgcatcataattacattaccagtgttggaaaactaatgaagaaaacactgtaattgctactcagcaaatgtgaataaaaggtgtttgcgtt

SEQ ID NO: 330561 - DNA, 5921 bp, Artificial Sequence
  derived and/or modified sequence
gcggcacagagccgcggcttgctttcaggacacgggtcgctggcgggttaggtggctgcgtggccgcctcacttcgcgcacgcgccgctaggctgggggagttgatttgcactgctccgggtgtcggctccggcgggacgggcggttctgcgtacccctctccgatcctgattgagtcaatgctttgcattctcagtcctctgcataaagctgagagatgcctacagctgagagtgaagcaaaagtaaaaaccaaagttcgctttgaagaattgcttaagacccacagtgatctaatgcgtgaaaagaaaaaactgaagaaaaaacttgtcaggtctgaagaaaacatctcacctgacactattagaagcaatcttcactatatgaaagaaactacaagtgatgatcccgacactattagaagcaatcttccccatattaaagaaactacaagtgatgatgtaagtgctgctaacactaacaacctgaagaagagcacgagagtcactaaaaacaaattgaggaacacacagttagcaactgaaaatcctaatggtgatgctagtgtagaggaagacaaacaaggaaagccaaataaaaaggtgataaagacggtgccccagttgactacacaagacctgaaaccggaaactcctgagaataaggttgattctacacaccagaaaacacatacaaagccacagccaggcgttgatcatcagaaaagtgagaaggcaaatgagggaagagaagagactgatttagaagaggatgaagaattgatgcaagcatatcagtgccatgtaactgaagaaatggcaaaggagattaagaggaaaataagaaagaaactgaaagaacagttgacttactttccctcagatactttattccatgatgacaaactaagcagtgaaaaaaggaaaaagaaaaaggaagttccagtcttctctaaagctgaaacaagtacattgaccatctctggtgacacagttgaaggtgaacaaaagaaagaatcttcagttagatcagtttcttcagattctcatcaagatgatgaaataagctcaatggaacaaagcacagaagacagcatgcaagatgatacaaaacctaaaccaaaaaaaacaaaaaagaagactaaagcagttgcagataataatgaagatgttgatggtgatggtgttcatgaaataacaagccgagatagcccggtttatcccaaatgtttgcttgatgatgaccttgtcttgggagtttacattcaccgaactgatagacttaagtcagattttatgatttctcacccaatggtaaaaattcatgtggttgatgagcatactggtcaatatgtcaagaaagatgatagtggacggcctgtttcatcttactatgaaaaagagaatgtggattatattcttcctattatgacccagccatatgattttaaacagttaaaatcaagacttccagagtgggaagaacaaattgtatttaatgaaaattttccctatttgcttcgaggctctgatgagagtcctaaagtcatcctgttctttgagattcttgatttcttaagcgtggatgaaattaagaataattctgaggttcaaaaccaagaatgtggctttcggaaaattgcctgggcatttcttaagcttctgggagccaatggaaatgcaaacatcaactcaaaacttcgcttgcagctatattacccacctactaagcctcgatccccattaagtgttgttgaggcatttgaatggtggtcaaaatgtccaagaaatcattacccatcaacactgtacgtaactgtaagaggactgaaagttccagactgtataaagccatcttaccgctctatgatggctcttcaggaggaaaaaggtaaaccagtgcattgtgaacgtcaccatgagtcaagctcagtagacacagaacctggattagaagagtcaaaggaagtaataaagtggaaacgactccctgggcaggcttgccgtatcccaaacaaacacctcttctcactaaatgcaggagaacgaggatgtttttgtcttgatttctcccacaatggaagaatattagcagcagcttgtgccagccgggatggatatccaattattttatatgaaattccttctggacgtttcatgagagaattgtgtggccacctcaatatcatttatgatctttcctggtcaaaagatgatcactacatccttacttcatcatctgatggcactgccaggatatggaaaaatgaaataaacaatacaaatactttcagagttttacctcatccttcttttgtttacacggctaaattccatccagctgtaagagagctagtagttacaggatgctatgattccatgatacggatatggaaagttgagatgagagaagattctgccatattggtccgacagtttgatgttcacaaaagttttatcaactcactttgttttgatactgaaggtcatcatatgtattcaggagattgtacaggggtgattgttgtttggaatacctatgtcaagattaatgatttggaacattcagtgcaccactggactataaataaggaaattaaagaaactgagtttaagggaattccaataagttatttggagattcatcccaatggaaaacgtttgttaatccataccaaagacagtactttgagaattatggatctccggatattagtagcaaggaagtttgtaggagcagcaaattatcgggagaagattcatagtactttgactccatgtgggacttttctgtttgctggaagtgaggatggtatagtgtatgtttggaacccagaaacaggagaacaagtagccatgtattctgacttgccattcaagtcacccattcgagacatttcttatcatccatttgaaaatatggttgcattctgtgcatttgggcaaaatgagccaattcttctgtatatttacgatttccatgttgcccagcaggaggctgaaatgttcaaacgctacaatggaacatttccattacctggaatacaccaaagtcaagatgccctatgtacctgtccaaaactaccccatcaaggctcttttcagattgatgaatttgtccacactgaaagttcttcaacgaagatgcagctagtaaaacagaggcttgaaactgtcacagaggtgatacgttcctgtgctgcaaaagtcaacaaaaatctctcatttacttcaccaccagcagtttcctcacaacagtctaagttaaagcagtcaaacatgctgaccgctcaagagattctacatcagtttggtttcactcagaccgggattatcagcatagaaagaaagccttgtaaccatcaggtagatacagcaccaacggtagtggctctttatgactacacagcgaatcgatcagatgaactaaccatccatcgcggagacattatccgagtgtttttcaaagataatgaagactggtggtatggcagcataggaaagggacaggaaggttattttccagctaatcatgtggctagtgaaacactgtatcaagaactgcctcctgagataaaggagcgatcccctcctttaagccctgaggaaaaaactaaaatagaaaaatctccagctcctcaaaagcaatcaatcaataagaacaagtcccaggacttcagactaggctcagaatctatgacacattctgaaatgagaaaagaacagagccatgaggaccaaggacacataatggatacacggatgaggaagaacaagcaagcaggcagaaaagtcactctaatagagtaaagaattgaagaaaagttaagagctgccgaaatgcacagaggtgaaaatgacaaaccaaatggaatttctcttcagagttcagaattttcagatactaaggaggaagaaaggatccactacttcttgttcttatgaatgactctagaaaaatcagaatcaagttgtgggtggaaaaatcaacgtggcctttgagttcagttgttataaaccattgtgactattgttggtcaaagtattggtacttatattgttagtaattgcatcataattacattaccagtgttggaaaactaatgaagaaaacactgtaattgctactcagcaaatgtgaataaaaggtgtttgcgttattaggatgtctgttaagtaatcatttaatattattatattggtaatggttgtatgtgtgatgctatgcccagaatatgaagtatctgtttttgaaattcactttatttaaaagataagcagctgactgggcacggtgcctcatgcctgtaatcctagcaccttgggaggctgaggcaggtggatcacctaaggtcaggagttcaacaacaccagcctgaccaacatggtgaaaccccatctctactaaaaatacaaaaatcagccgggtctcatggcaggcacctgtaatcccatctactgaggcaggagaattgcttgacccaggaggcagaggttgcagtgagccaagatcacgccattgcactccagcctgggggacagagcaagactctatctccaaaaaacaaaaaagataagcagctttagaatatggcgcattcaaaacagtctcagtaacaaagacattaaaagaaaacaatttactttctaattaaaattttgtgtttcttaagatcaaatcatataggtaacttcatagacctaaattaaaagtgatttttggctggactggcaacaatgttcccaatgtctttactttttaaaaaaggcttttcatatttaagcacatacctattttgtagacttacattgtttaatatttattttaatcttaatatttttacattattatattgcattatttattttttctaagttccagaataatagtgtcattattatagactatatgttttgaagtttgatattataatgggatattcattttttgttcttttcttgactcctttctcaagtgtgtgataaggtctgctgataaaatatttaaccccaagaaagtgaaaactaatataaaattagaaagacctatccaaattagacagtcaattccattaaaataagaagtgagaaaaacaatgttgggcattgaggtgtaaattttgcccagatgtatacccagtgtgaaatatcttctaataaaaatatatttggctcttatccctgcacatgtagaggcataaaaattggtaaacatgtcccgctgtgtagaactttaaaaaaaaggcatttttgaaagtgttgagtggcactgataactggtgaagcctacagccatccgcccaaaagtctgttctgatggcactgagttttcattgttctggatgtataagtctgtgtgtcaggtacagctgggcccagccagcttgagtcactcttgtacaagcttgtttttttctgtcttgtgaatgcacttgataatttaaaaataaaaatatctgtttctctgcagtttcagctaataattttgagatatgtgttgattttctgattgaatcaccaagaatttcaacaagtttagaaataatttaagatgaatgaaaaatatgtcagggggagctaagcatttgctaagctcttgatgtttatatgaaaaataaagggttgtttttatattgcaactactaaagagaaaaatagcagttgaagcaaacaccaggaaaatttggctctactgaaagcccagtccttttcccctttgtctcgctgacaaagtaagactagggttatgttcatgaatagattaataaaagatgtttctttaccacacaatctgagatgagatggggtgggggagatcatgacagtgccctccaagcaatagatccagctgataatcaagcagaaaatcagacaccagaatccatttgatgatgtacggcattaaacatttccttataacaaa

SEQ ID NO: 330562 - DNA, 5549 bp, Artificial Sequence
  derived and/or modified sequence
ggcggcgcgctgtccgcactgcggcacagagccgcggcttgctttcaggacacgggtcgctggcgggttaggtggctgcgtggccgcctcacttcgcgcacgcgccgctaggctgggggagttgatttgcactgctccgggtgtcggctccggcgggacgggcggttctgcgtacccctctccagtgtcaacctggggctgaatcttcaacctgtcaaagccttcttaattatgtctgagaaaaggatcctgattgagtcaatgctttgcattctcagtcctctgcataaagctgagagatgcctacagctgagagtgaagcaaaagtaaaaaccaaagttcgctttgaagaattgcttaagacccacagtgatctaatgcgtgaaaagaaaaaactgaagaaaaaacttgtcaggtctgaagaaaacatctcacctgacactattagaagcaatcttcactatatgaaagaaactacaagtgatgatcccgacactattagaagcaatcttccccatattaaagaaactacaagtgatgatgtaagtgctgctaacactaacaacctgaagaagagcacgagagtcactaaaaacaaattgaggaacacacagttagcaactgaaaatcctaatggtgatgctagtgtagaggaagacaaacaaggaaagccaaataaaaaggtgataaagacggtgccccagttgactacacaagacctgaaaccggaaactcctgagaataaggttgattctacacaccagaaaacacatacaaagccacagccaggcgttgatcatcagaaaagtgagaaggcaaatgagggaagagaagagactgatttagaagaggatgaagaattgatgcaagcatatcagtgccatgtaactgaagaaatggcaaaggagattaagaggaaaataagaaagaaactgaaagaacagttgacttactttccctcagatactttattccatgatgacaaactaagcagtgaaaaaaggaaaaagaaaaaggaagttccagtcttctctaaagctgaaacaagtacattgaccatctctggtgacacagttgaaggtgaacaaaagaaagaatcttcagttagatcagtttcttcagattctcatcaagatgatgaaataagctcaatggaacaaagcacagaagacagcatgcaagatgatacaaaacctaaaccaaaaaaaacaaaaaagaagactaaagcagttgcagataataatgaagatgttgatggtgatggtgttcatgaaataacaagccgagatagcccggtttatcccaaatgtttgcttgatgatgaccttgtcttgggagtttacattcaccgaactgatagacttaagtcagattttatgatttctcacccaatggtaaaaattcatgtggttgatgagcatactggtcaatatgtcaagaaagatgatagtggacggcctgtttcatcttactatgaaaaagagaatgtggattatattcttcctattatgacccagccatatgattttaaacagttaaaatcaagacttccagagtgggaagaacaaattgtatttaatgaaaattttccctatttgcttcgaggctctgatgagagtcctaaagtcatcctgttctttgagattcttgatttcttaagcgtggatgaaattaagaataattctgaggttcaaaaccaagaatgtggctttcggaaaattgcctgggcatttcttaagcttctgggagccaatggaaatgcaaacatcaactcaaaacttcgcttgcagctatattacccacctactaagcctcgatccccattaagtgttgttgaggcatttgaatggtggtcaaaatgtccaagaaatcattacccatcaacactgtacgtaactgtaagaggactgaaagttccagactgtataaagccatcttaccgctctatgatggctcttcaggaggaaaaaggtaaaccagtgcattgtgaacgtcaccatgagtcaagctcagtagacacagaacctggattagaagagtcaaaggaagtaataaagtggaaacgactccctgggcaggcttgccgtatcccaaacaaacacctcttctcactaaatgcaggagaacgaggatgtttttgtcttgatttctcccacaatggaagaatattagcagcagcttgtgccagccgggatggatatccaattattttatatgaaattccttctggacgtttcatgagagaattgtgtggccacctcaatatcatttatgatctttcctggtcaaaagatgatcactacatccttacttcatcatctgatggcactgccaggatatggaaaaatgaaataaacaatacaaatactttcagagttttacctcatccttcttttgtttacacggctaaattccatccagctgtaagagagctagtagttacaggatgctatgattccatgatacggatatggaaagttgagatgagagaagattctgccatattggtccgacagtttgatgttcacaaaagttttatcaactcactttgttttgatactgaaggtcatcatatgtattcaggagattgtacaggggtgattgttgtttggaatacctatgtcaagattaatgatttggaacattcagtgcaccactggactataaataaggaaattaaagaaactgagtttaagggaattccaataagttatttggagattcatcccaatggaaaacgtttgttaatccataccaaagacagtactttgagaattatggatctccggatattagtagcaaggaagtttgtaggagcagcaaattatcgggagaagattcatagtactttgactccatgtgggacttttctgtttgctggaagtgaggatggtatagtgtatgtttggaacccagaaacaggagaacaagtagccatgtattctgacttgccattcaagtcacccattcgagacatttcttatcatccatttgaaaatatggttgcattctgtgcatttgggcaaaatgagccaattcttctgtatatttacgatttccatgttgcccagcaggaggctgaaatgttcaaacgctacaatggaacatttccattacctggaatacaccaaagtcaagatgccctatgtacctgtccaaaactaccccatcaaggctcttttcagattgatgaatttgtccacactgaaagttcttcaacgaagatgcagctagtaaaacagaggcttgaaactgtcacagaggtgatacgttcctgtgctgcaaaagtcaacaaaaatctctcatttacttcaccaccagcagtttcctcacaacagtctaagttaaagcagtcaaacatgctgaccgctcaagagattctacatcagtttggtttcactcagaccgggattatcagcatagaaagaaagccttgtaaccatcaggtagatacagcaccaacggtagtggctctttatgactacacagcgaatcgatcagatgaactaaccatccatcgcggagacattatccgagtgtttttcaaagataatgaagactggtggtatggcagcataggaaagggacaggaaggttattttccagctaatcatgtggctagtgaaacactgtatcaagaactgcctcctgagataaaggagcgatcccctcctttaagccctgaggaaaaaactaaaatagaaaaatctccagctcctcaaaagcaatcaatcaataagaacaagtcccaggacttcagactaggctcagaatctatgacacattctgaaatgagaaaagaacagagccatgaggaccaaggacacataatggatacacggatgaggaagaacaagcaagcaggcagaaaagtcactctaatagagtaaagaattgaagaaaagttaagagctgccgaaatgcacagaggtgaaaatgacaaaccaaatggaatttctcttcagagttcagaattttcagatactaaggaggaagaaaggatccactacttcttgttcttatgaatgactctagaaaaatcagaatcaagttgtgggtggaaaaatcaacgtggcctttgagttcagttgttataaaccattgtgactattgttggtcaaagtattggtacttatattgttagtaattgcatcataattacattaccagtgttggaaaactaatgaagaaaacactgtaattgctactcagcaaatgtgaataaaaggtgtttgcgttattaggatgtctgttaagtaatcatttaatattattatattggtaatggttgtatgtgtgatgctatgcccagaatatgaagtatctgtttttgaaattcactttatttaaaagataagcagctgactgggcacggtgcctcatgcctgtaatcctagcaccttgggaggctgaggcaggtggatcacctaaggtcaggagttcaacaacaccagcctgaccaacatggtgaaaccccatctctactaaaaatacaaaaatcagccgggtctcatggcaggcacctgtaatcccatctactgaggcaggagaattgcttgacccaggaggcagaggttgcagtgagccaagatcacgccattgcactccagcctgggggacagagcaagactctatctccaaaaaacaaaaaagataagcagctttagaatatggcgcattcaaaacagtctcagtaacaaagacattaaaagaaaacaatttactttctaattaaaattttgtgtttcttaagatcaaatcatataggtaacttcatagacctaaattaaaagtgatttttggctggactggcaacaatgttcccaatgtctttactttttaaaaaaggcttttcatatttaagcacatacctattttgtagacttacattgtttaatatttattttaatcttaatatttttacattattatattgcattatttattttttctaagttccagaataatagtgtcattattatagactatatgttttgaagtttgatattataatgggatattcattttttgttcttttcttgactcctttctcaagtgtgtgataaggtctgctgataaaatatttaaccccaagaaagtgaaaactaatataaaattagaaagacctatccaaattagacagtcaattccattaaaataagaagtgagaaaaacaatgttgggcattgaggtgtaaattttgcccagatgtatacccagtgtgaaatatcttctaataaaaatatatttggctcttatccctgcacatgtagaggcataaaaattggtaaacatgtcccgctgtgtagaactttaaaaaaaaggcatttttgaaagtgttgagtggcactgataactggtgaagcctacagccatccgcccaaaagtctgttctgatggcactgagttttcattgttctggatgtataagtctgtgtgtcaggtacagctgggcccagccagcttgagtcactcttgtacaagcttgtttttttctgtcttgtgaatgcacttgataatttaaaaataaaaatatctgtttctctgca

SEQ ID NO: 330563 - DNA, 3591 bp, Artificial Sequence
  derived and/or modified sequence
atgcccaccgccgagagcgaggccaaggtgaagaccaaggtgagattcgaggagctgctgaagacccacagcgacctgatgagagagaagaagaagctgaagaagaagctggtgagaagcgaggagaacatcagccccgacaccatcagaagcaacctgcactacatgaaggagaccaccagcgacgaccccgacaccatcagaagcaacctgccccacatcaaggagaccaccagcgacgacgtgagcgccgccaacaccaacaacctgaagaagagcaccagagtgaccaagaacaagctgagaaacacccagctggccaccgagaaccccaacggcgacgccagcgtggaggaggacaagcagggcaagcccaacaagaaggtgatcaagaccgtgccccagctgaccacccaggacctgaagcccgagacccccgagaacaaggtggacagcacccaccagaagacccacaccaagccccagcccggcgtggaccaccagaagagcgagaaggccaacgagggcagagaggagaccgacctggaggaggacgaggagctgatgcaggcctaccagtgccacgtgaccgaggagatggccaaggagatcaagagaaagatcagaaagaagctgaaggagcagctgacctacttccccagcgacaccctgttccacgacgacaagctgagcagcgagaagagaaagaagaagaaggaggtgcccgtgttcagcaaggccgagaccagcaccctgaccatcagcggcgacaccgtggagggcgagcagaagaaggagagcagcgtgagaagcgtgagcagcgacagccaccaggacgacgagatcagcagcatggagcagagcaccgaggacagcatgcaggacgacaccaagcccaagcccaagaagaccaagaagaagaccaaggccgtggccgacaacaacgaggacgtggacggcgacggcgtgcacgagatcaccagcagagacagccccgtgtaccccaagtgcctgctggacgacgacctggtgctgggcgtgtacatccacagaaccgacagactgaagagcgacttcatgatcagccaccccatggtgaagatccacgtggtggacgagcacaccggccagtacgtgaagaaggacgacagcggcagacccgtgagcagctactacgagaaggagaacgtggactacatcctgcccatcatgacccagccctacgacttcaagcagctgaagagcagactgcccgagtgggaggagcagatcgtgttcaacgagaacttcccctacctgctgagaggcagcgacgagagccccaaggtgatcctgttcttcgagatcctggacttcctgagcgtggacgagatcaagaacaacagcgaggtgcagaaccaggagtgcggcttcagaaagatcgcctgggccttcctgaagctgctgggcgccaacggcaacgccaacatcaacagcaagctgagactgcagctgtactacccccccaccaagcccagaagccccctgagcgtggtggaggccttcgagtggtggagcaagtgccccagaaaccactaccccagcaccctgtacgtgaccgtgagaggcctgaaggtgcccgactgcatcaagcccagctacagaagcatgatggccctgcaggaggagaagggcaagcccgtgcactgcgagagacaccacgagagcagcagcgtggacaccgagcccggcctggaggagagcaaggaggtgatcaagtggaagagactgcccggccaggcctgcagaatccccaacaagcacctgttcagcctgaacgccggcgagagaggctgcttctgcctggacttcagccacaacggcagaatcctggccgccgcctgcgccagcagagacggctaccccatcatcctgtacgagatccccagcggcagattcatgagagagctgtgcggccacctgaacatcatctacgacctgagctggagcaaggacgaccactacatcctgaccagcagcagcgacggcaccgccagaatctggaagaacgagatcaacaacaccaacaccttcagagtgctgccccaccccagcttcgtgtacaccgccaagttccaccccgccgtgagagagctggtggtgaccggctgctacgacagcatgatcagaatctggaaggtggagatgagagaggacagcgccatcctggtgagacagttcgacgtgcacaagagcttcatcaacagcctgtgcttcgacaccgagggccaccacatgtacagcggcgactgcaccggcgtgatcgtggtgtggaacacctacgtgaagatcaacgacctggagcacagcgtgcaccactggaccatcaacaaggagatcaaggagaccgagttcaagggcatccccatcagctacctggagatccaccccaacggcaagagactgctgatccacaccaaggacagcaccctgagaatcatggacctgagaatcctggtggccagaaagttcgtgggcgccgccaactacagagagaagatccacagcaccctgaccccctgcggcaccttcctgttcgccggcagcgaggacggcatcgtgtacgtgtggaaccccgagaccggcgagcaggtggccatgtacagcgacctgcccttcaagagccccatcagagacatcagctaccaccccttcgagaacatggtggccttctgcgccttcggccagaacgagcccatcctgctgtacatctacgacttccacgtggcccagcaggaggccgagatgttcaagagatacaacggcaccttccccctgcccggcatccaccagagccaggacgccctgtgcacctgccccaagctgccccaccagggcagcttccagatcgacgagttcgtgcacaccgagagcagcagcaccaagatgcagctggtgaagcagagactggagaccgtgaccgaggtgatcagaagctgcgccgccaaggtgaacaagaacctgagcttcaccagcccccccgccgtgagcagccagcagagcaagctgaagcagagcaacatgctgaccgcccaggagatcctgcaccagttcggcttcacccagaccggcatcatcagcatcgagagaaagccctgcaaccaccaggtggacaccgcccccaccgtggtggccctgtacgactacaccgccaacagaagcgacgagctgaccatccacagaggcgacatcatcagagtgttcttcaaggacaacgaggactggtggtacggcagcatcggcaagggccaggagggctacttccccgccaaccacgtggccagcgagaccctgtaccaggagctgccccccgagatcaaggagagaagcccccccctgagccccgaggagaagaccaagatcgagaagagccccgccccccagaagcagagcatcaacaagaacaagagccaggacttcagactgggcagcgagagcatgacccacagcgagatgagaaaggagcagagccacgaggaccagggccacatcatggacaccagaatgagaaagaacaagcaggccggcagaaaggtgaccctgatcgagtag

SEQ ID NO: 330564 - DNA, 1497 bp, Artificial Sequence
  derived and/or modified sequence
atgagagaactgtgtggccacctgaacattatctatgacctgagttggtccaaggacgaccattacatcctgacatcatcatcagacggaacggcccgtatatggaaaaacgagatcaacaataccaacactttccgggtgctgccgcacccttccttcgtgtacaccgctaaattccaccctgccgtaagggaacttgtcgtgactgggtgttacgattctatgattcggatctggaaggtcgaaatgcgggaagatagtgctatactcgtgcgtcagttcgacgtgcacaaaagctttattaactccctgtgtttcgatacagaaggccaccatatgtacagcggtgattgtaccggcgtaatagtggtttggaatacctacgtgaaaatcaacgacttggaacactctgttcaccattggactattaataaagagatcaaagagacggaattcaaggggattccaataagttatcttgagatccaccccaacggcaagaggctgctcatccacacaaaggactctaccctcaggatcatggatctgcgcattttagtcgctcgcaagtttgtgggagccgccaactacagggagaaaattcactctactctgactccctgcggcacttttctctttgccggctctgaggatggcattgtgtacgtttggaatcccgagaccggcgagcaggttgccatgtactccgacctgcccttcaagtcgcccataagggacattagttaccatcctttcgaaaatatggttgccttctgcgcattcgggcagaacgagcccatccttctgtatatctacgatttccatgtggcacagcaggaagctgaaatgttcaagcgctacaatggtacattccccctgcctggaattcaccagtcccaggacgcactgtgcacctgccccaaactgccacatcagggaagctttcaaatcgatgagtttgttcatacagagtcatcaagtacaaagatgcagcttgttaaacagcggctggagactgtgactgaggtgattcgctcatgtgccgcaaaggttaataaaaacttgtcatttacgtctccccctgccgtgtcatctcagcagtctaagctgaagcagtcaaacatgttaaccgctcaggagattctccatcagtttggattcacacagacaggcataatctccatcgaaaggaagccctgcaaccaccaagtcgatacggcaccaacagtggtcgctttgtacgactatactgccaatcgaagtgacgagctgacaatacatcggggcgatataatccgcgtgttctttaaggataacgaggactggtggtacggctcaataggaaagggacaggaaggctatttcccagcaaaccatgtggctagtgaaacactttaccaggagttgccacccgaaattaaagagaggagcccgccattatcaccggaagaaaaaaccaaaatcgaaaagtctcccgccccacagaaagtaaaatag

SEQ ID NO: 330565 - DNA, 1497 bp, Artificial Sequence
  derived and/or modified sequence
atgagggagctgtgtggccacctgaacatcatctatgacctgtcctggagcaaggatgaccactacatcctgaccagcagcagtgatggaacagcccgcatctggaagaatgagatcaacaacaccaacaccttccgggtgctgccccaccccagctttgtgtacacagccaagttccaccctgctgtgcgggagctggtggtgacaggctgctatgacagcatgatccgcatctggaaggtggagatgagagaagattctgccatcctggtgcggcagtttgatgtgcacaagagcttcatcaacagcctgtgctttgacacagagggccaccacatgtacagcggggactgcacaggagtcatcgtggtgtggaacacctacgtgaagatcaatgacctggagcacagcgtgcaccactggaccatcaacaaggagatcaaggagacagagttcaagggcatccccatctcctacctggagatccaccccaacgggaagaggctgctgatccacaccaaggacagcaccctgcgcatcatggacctgcgcatcctggtggccaggaagtttgtgggcgccgccaactaccgggagaagatccacagcaccctgaccccctgtggcaccttcctgtttgctggctctgaagatggcatcgtgtatgtgtggaaccctgagaccggggagcaggtggccatgtacagcgacctgcccttcaagagccccatccgggacatctcctaccacccctttgagaacatggtggccttctgtgccttcggccagaatgagcccatcctgctgtacatctatgacttccacgtggcccagcaggaggccgagatgttcaagcgctacaacggcaccttccccctgcccggcatccaccagagccaggatgccctgtgcacctgccccaagctgccccaccagggcagcttccagattgatgaatttgtgcacacagagagcagcagcaccaagatgcagctggtgaagcagaggctggagaccgtgacagaggtgatccgcagctgtgccgccaaggtgaacaagaacctgtccttcaccagccccccagctgtgagcagccagcagagcaagctgaagcagagcaacatgctgacagcccaggagatcctgcaccagtttggcttcacccagacaggcatcatcagcattgaaaggaagccctgcaaccaccaggtggacacagcccccaccgtggtggccctgtatgactacacagccaacagaagtgatgagctgaccatccacagaggagacatcatccgggtcttcttcaaggacaatgaagactggtggtacggcagcatcggcaagggccaggagggctacttccctgccaaccacgtggccagcgagaccctgtaccaggagctgcccccagagatcaaggagaggagcccccccctgagccctgaggagaagaccaagattgagaagagccctgccccccagaaggtgaagtag

SEQ ID NO: 330566 - DNA, 1497 bp, Artificial Sequence
  derived and/or modified sequence
atgcgggagctgtgcggccacctgaacatcatctacgacctgagctggagcaaggacgatcactacattcttaccagttccagcgacggcaccgctagaatttggaaaaatgaaattaataacacgaacacctttcgtgtgctgccacatcccagcttcgtctacacagcaaagttccatccggccgtccgggaactagtagttacagggtgctacgacagcatgataagaatttggaaggtcgagatgcgcgaggattcagccatcctcgtgcggcagtttgacgttcacaaatcattcatcaattccttatgctttgacactgaagggcaccatatgtactctggggattgtaccggtgttatagtggtgtggaacacctatgtcaagatcaacgatcttgagcactctgtacatcattggactatcaataaggagatcaaagagactgagtttaaggggatccctatatcctacctggaaattcaccctaacggcaagagactgctgattcacaccaaagactcgactctaagaatcatggacctgcgtatactagtagcaagaaaatttgtgggggcggctaactatagggagaagatccactcaactctgactccctgtggaacctttctattcgctgggagtgaagacggaattgtctacgtctggaaccccgaaaccggggagcaggttgccatgtacagtgatctccccttcaagtcccccattagagatatctcctaccatccattcgaaaatatggtggcattctgcgccttcggacagaacgagccaatcctcctgtatatttacgacttccacgtggcgcaacaggaggcggagatgtttaaaagatataacgggaccttcccactccccggcatccaccagagtcaagatgctctgtgcacctgtccaaagcttccacatcagggatcttttcagattgatgaattcgtgcacactgagagctcctcaaccaagatgcaactggtcaaacaacgattggagactgtaactgaagtcatccgcagctgtgcagcaaaagttaacaagaatctgagctttactagcccgcctgcagtgtcctcacagcagtctaagctgaaacaatccaacatgcttacagctcaggaaatcctacatcagttcggctttacacaaacaggcatcatctcaattgagcggaagccatgcaatcatcaggttgacaccgcacccacggtagtagctctctacgactataccgccaaccgatcggatgaattgaccatccatcggggggatatcatcagggtgttcttcaaggacaatgaggactggtggtatggatcaatagggaagggtcaagagggctatttcccagcgaatcatgtcgcatcagagaccctctatcaggaactgccgccagaaattaaagaaaggagtccaccattgtctccagaggaaaaaactaaaatcgaaaaatccccagcacctcaaaaggttaaatag

SEQ ID NO: 330567 - DNA, 1497 bp, Artificial Sequence
  derived and/or modified sequence
atgagagaactctgcggccatctcaacattatctatgacctgagctggtctaaagacgatcactacatactcacaagttcctctgatggtacagcacgcatctggaaaaatgagattaataatactaatacatttcgcgtgctgcctcacccttcctttgtgtacacagctaaattccatccagcagtaagagagctggtggttaccggttgttacgatagcatgatcaggatctggaaagtggaaatgcgggaggattccgcaatactcgtgaggcagtttgacgtgcacaaatccttcattaattctctgtgcttcgacactgagggccaccacatgtactctggcgactgtaccggagtaatcgtcgtgtggaacacctacgtaaaaatcaatgatctggaacactctgtacatcactggacaatcaataaggagatcaaagaaacagagtttaagggcatacccatttcttacttagaaatacatccaaacggaaagagactgctgatccataccaaggactccaccctgaggattatggacctccgaatccttgtcgctcgcaaattcgtgggggcagccaactatagagagaaaatccatagtactttgaccccttgcgggacctttctctttgcaggatcggaagatggcatcgtctatgtctggaaccctgaaaccggcgagcaggtggctatgtactctgatctgccttttaagtctcccatcagagacatttcataccacccgtttgagaatatggtggccttttgcgcgttcggtcaaaacgagcccattttactgtacatctacgactttcatgtggcccaacaggaagcagagatgttcaaacgctacaatggcacctttcctcttccagggatccatcagagccaggacgctttatgtacttgcccaaagctcccacaccagggcagtttccagattgatgagttcgtccataccgagagctcttcgactaaaatgcagcttgttaaacagcgcctggagaccgtcaccgaggtcattaggagctgtgctgcaaaggtaaataaaaatttaagtttcactagtccgccagccgtgagttcccaacagtcaaagctaaagcagtcaaatatgctgacggcccaggaaattctgcatcagtttggcttcacacagacaggcatcatatccatcgagaggaaaccatgtaaccatcaagtcgacactgcccctactgtcgtggcactctacgactataccgccaaccgcagcgacgagctgactattcataggggagacataataagggtgtttttcaaggacaacgaggattggtggtacggatcaatcggaaaggggcaggaaggctactttcccgctaatcacgtcgccagtgagaccctctaccaagagctgcccccagagatcaaagagcgctccccccctctttccccagaagagaaaaccaaaattgagaaatcacccgcacctcagaaagtgaaatag

SEQ ID NO: 330568 - DNA, 1497 bp, Artificial Sequence
  derived and/or modified sequence
atgagagagctgtgcggccacctgaacatcatctacgacctgagctggagcaaggacgaccactacatcctgaccagcagcagcgacggcaccgccagaatctggaagaacgagatcaacaacaccaacaccttcagagtgctgccccaccccagcttcgtgtacaccgccaagttccaccccgccgtgagagagctggtggtgaccggctgctacgacagcatgatcagaatctggaaggtggagatgagagaggacagcgccatcctggtgagacagttcgacgtgcacaagagcttcatcaacagcctgtgcttcgacaccgagggccaccacatgtacagcggcgactgcaccggcgtgatcgtggtgtggaacacctacgtgaagatcaacgacctggagcacagcgtgcaccactggaccatcaacaaggagatcaaggagaccgagttcaagggcatccccatcagctacctggagatccaccccaacggcaagagactgctgatccacaccaaggacagcaccctgagaatcatggacctgagaatcctggtggccagaaagttcgtgggcgccgccaactacagagagaagatccacagcaccctgaccccctgcggcaccttcctgttcgccggcagcgaggacggcatcgtgtacgtgtggaaccccgagaccggcgagcaggtggccatgtacagcgacctgcccttcaagagccccatcagagacatcagctaccaccccttcgagaacatggtggccttctgcgccttcggccagaacgagcccatcctgctgtacatctacgacttccacgtggcccagcaggaggccgagatgttcaagagatacaacggcaccttccccctgcccggcatccaccagagccaggacgccctgtgcacctgccccaagctgccccaccagggcagcttccagatcgacgagttcgtgcacaccgagagcagcagcaccaagatgcagctggtgaagcagagactggagaccgtgaccgaggtgatcagaagctgcgccgccaaggtgaacaagaacctgagcttcaccagcccccccgccgtgagcagccagcagagcaagctgaagcagagcaacatgctgaccgcccaggagatcctgcaccagttcggcttcacccagaccggcatcatcagcatcgagagaaagccctgcaaccaccaggtggacaccgcccccaccgtggtggccctgtacgactacaccgccaacagaagcgacgagctgaccatccacagaggcgacatcatcagagtgttcttcaaggacaacgaggactggtggtacggcagcatcggcaagggccaggagggctacttccccgccaaccacgtggccagcgagaccctgtaccaggagctgccccccgagatcaaggagagaagcccccccctgagccccgaggagaagaccaagatcgagaagagccccgccccccagaaggtgaagtag

SEQ ID NO: 330569 - DNA, 2920 bp, Artificial Sequence
  derived and/or modified sequence
ctcactaaatgcaggagaacgaggatgtttttgtcttgatttctcccacaatggaagaatattagcagcagcttgtgccagccgggatggatatccaattattttatatgaaattccttctggacgtttcatgagagaattgtgtggccacctcaatatcatttatgatctttcctggtcaaaagatgatcactacatccttacttcatcatctgatggcactgccaggatatggaaaaatgaaataaacaatacaaatactttcagagttttacctcatccttcttttgtttacacggctaaattccatccagctgtaagagagctagtagttacaggatgctatgattccatgatacggatatggaaagttgagatgagagaagattctgccatattggtccgacagtttgatgttcacaaaagttttatcaactcactttgttttgatactgaaggtcatcatatgtattcaggagattgtacaggggtgattgttgtttggaatacctatgtcaagattaatgatttggaacattcagtgcaccactggactataaataaggaaattaaagaaactgagtttaagggaattccaataagttatttggagattcatcccaatggaaaacgtttgttaatccataccaaagacagtactttgagaattatggatctccggatattagtagcaaggaagtttgtaggagcagcaaattatcgggagaagattcatagtactttgactccatgtgggacttttctgtttgctggaagtgaggatggtatagtgtatgtttggaacccagaaacaggagaacaagtagccatgtattctgacttgccattcaagtcacccattcgagacatttcttatcatccatttgaaaatatggttgcattctgtgcatttgggcaaaatgagccaattcttctgtatatttacgatttccatgttgcccagcaggaggctgaaatgttcaaacgctacaatggaacatttccattacctggaatacaccaaagtcaagatgccctatgtacctgtccaaaactaccccatcaaggctcttttcagattgatgaatttgtccacactgaaagttcttcaacgaagatgcagctagtaaaacagaggcttgaaactgtcacagaggtgatacgttcctgtgctgcaaaagtcaacaaaaatctctcatttacttcaccaccagcagtttcctcacaacagtctaagttaaagcagtcaaacatgctgaccgctcaagagattctacatcagtttggtttcactcagaccgggattatcagcatagaaagaaagccttgtaaccatcaggtagatacagcaccaacggtagtggctctttatgactacacagcgaatcgatcagatgaactaaccatccatcgcggagacattatccgagtgtttttcaaagataatgaagactggtggtatggcagcataggaaagggacaggaaggttattttccagctaatcatgtggctagtgaaacactgtatcaagaactgcctcctgagataaaggagcgatcccctcctttaagccctgaggaaaaaactaaaatagaaaaatctccagctcctcaaaaggtaaaataaaacaaaacagctcacagagacacctccttcttccccctgcttctgcctccatgagtaactacctatatgacgtgctgctgctgagaccaaggaatgaatagtgccaaatcttgctgaagaatgatcttgcagaaatctgattgtgaagaaggaaatctaaaaaggccaaacaagcttcagtagagataacaccaggaaagcagttactcaaacaagactgaaagagaagcaatcaatcaataagaacaagtcccaggacttcagactaggctcagaatctatgacacattctgaaatgagaaaagaacagagccatgaggaccaaggacacataatggatacacggatgaggaagaacaagcaagcaggcagaaaagtcactctaatagagtgtgccagctgtcacttttctcaggagtggtcgatggagttgactgctaccttaaccagatttgccatcgttctgaaactgccgtgtgttttctaaggacaaccaggtgttaagcctttctctttagaagaaggacagtaacctttctgttaaagaattgaagaaaagttaagagctgccgaaatgcacagaggtgaaaatgacaaaccaaatggaatttctcttcagagttcagaattttcagatactaaggaggaagaaaggatccactacttcttgttcttatgaatgactctagaaaaatcagaatcaagttgtgggtggaaaaatcaacgtggcctttgagttcagttgttataaaccattgtgactattgttggtcaaagtattggtacttatattgttagtaattgcatcataattacattaccagtgttggaaaactaatgaagaaaacactgtaattgctactcagcaaatgtgaataaaaggtgtttgcgttattaggatgtctgttaagtaatcatttaatattattatattggtaatggttgtatgtgtgatgctatgcccagaatatgaagtatctgtttttgaaattcactttatttaaaagataagcagctgactgggcacggtgcctcatgcctgtaatcctagcaccttgggaggctgaggcaggtggatcacctaaggtcaggagttcaacaacaccagcctgaccaacatggtgaaaccccatctctactaaaaatacaaaaatcagccgggtctcatggcaggcacctgtaatcccatctactgaggcaggagaattgcttgacccaggaggcagaggttgcagtgagccaagatcacgccattgcactccagcctgggggacagagcaagactctatctcc

SEQ ID NO: 330570 - protein, 54 aa, Artificial Sequence
  derived and/or modified sequence
MPTAESEAKVKTKVRFEELLKTHSDLMREKKKLKKKLVRSEENISNQEKSMAVW

SEQ ID NO: 330571 - protein, 398 aa, Artificial Sequence
  derived and/or modified sequence
MKKKVLSDSEDEEKDADVPGTSTRKRKDHQPRRRLRNRAQSYDIQAWKKQCEELLNLIFQCEDSEPFRQPVDLLEYPDYRDIIDTPMDFATVRETLEAGNYESPMELCKDVRLIFSNSKAYTPSKRSRIYSMSLRLSAFFEEHISSVLSDYKSALRFHKRNTITKRRKKRNRSSSVSSSAASSPERKKRILKPQLKSESSTSAFSTPTRSIPPRHNAAQINGKTESSSVVRTRSNRVVVDPVVTEQPSTSSAAKTFITKANASAIPGKTILENSVKHSKALNTLSSPGQSSFSHGTRNNSAKENMEKEKPVKRKMKSSVLPKASTLSKSSAVIEQGDCKNNALVPGTIQVNGHGGQPSKLVKRGPGRKPKVEVNIVVKLYTRKGVESPKSYSMQSQKI

SEQ ID NO: 330572 - DNA, 1197 bp, Artificial Sequence
  derived and/or modified sequence
atgaagaagaaggtgctgtctgattcagaagatgaagagaaggacgccgacgtgccagggaccagcacgaggaaacgaaaggatcaccagccccgccgtcgattgagaaaccgcgcgcagtcctacgatatccaggcctggaaaaagcagtgtgaggagcttctgaatttaatattccagtgcgaagactctgagccattccgtcaacccgtggacctgctggagtatcctgattatcgagacattattgacacccctatggacttcgccaccgtgagagaaacactcgaagccggcaactatgaatctcccatggaactctgtaaggatgtgaggttaattttctcgaacagtaaggcatacaccccaagcaaacggagtcggatctattcgatgtccctgcgcctctcagcatttttcgaggaacatatttctagcgtattatctgactacaagtcagccctgcgtttccataagcggaacaccatcaccaagaggcgtaagaaacgcaataggagtagtagcgtcagctcttcagccgcctcctcccctgaacgtaaaaagcggatactgaagcctcagctcaaaagcgagtcttccacgtccgcgtttagtacacctactagatccatcccgcctcggcacaatgcagcgcaaatcaacggcaaaacggagagtagctccgtggtgcggacgcgatctaaccgggtggttgtggatcctgttgttactgagcagccgtccacctcctcagcggccaaaactttcataacaaaggctaatgcaagcgctatacccggcaagacaatcctggagaacagcgttaagcacagtaaagccctgaatactttgtcaagtcctggccagtctagtttctcgcatggcaccagaaacaatagcgcaaaggagaacatggagaaagaaaagcccgttaaacgtaaaatgaaatcgtctgtgcttccaaaagcttccactctgagtaaaagctcagccgtgatcgagcagggggattgtaagaataacgcactggtgcccggcaccatccaggtcaatggacatggcggccaaccaagtaagctcgtcaagaggggacctggaagaaagccaaaggtggaggtcaatattgtcgtgaagctctacacacgcaaaggggtggagagtcccaagtcttactccatgcagagtcagaagatctag

SEQ ID NO: 330573 - DNA, 1197 bp, Artificial Sequence
  derived and/or modified sequence
atgaagaagaaggtgctgagtgacagtgaagatgaggagaaggatgctgatgtgcccggcaccagcaccaggaagaggaaggaccaccagccccggcggcggctgaggaacagagcccagagctatgacatccaggcctggaagaagcagtgtgaggagctgctgaacctgatcttccagtgtgaggacagcgagcccttccggcagcctgtggacctgctggagtacccagactacagagacatcatcgacacccccatggactttgccaccgtgcgggagaccctggaggccggcaactatgagagccccatggagctgtgcaaggatgtgcggctcatcttcagcaacagcaaggcctacacccccagcaagaggagccgcatctacagcatgagcctgcggctgagcgccttctttgaggagcacatcagctctgtgctgagtgactacaagagcgccctgcgcttccacaagaggaacaccatcaccaagaggaggaagaagaggaacagaagcagctctgtgagcagcagcgctgccagcagccctgagaggaagaagaggatcctgaagccccagctgaagtctgagagcagcaccagcgccttcagcacccccaccaggagcatcccccccaggcacaatgctgcccagatcaatggcaagacagagagcagctctgtggtgaggaccaggagcaacagagtggtggtggaccctgtggtgacagagcagcccagcaccagcagcgctgccaagaccttcatcaccaaggccaatgccagcgccatccctgggaagaccatcctggagaacagcgtgaagcacagcaaggccctgaacaccctgagcagccctggccagagcagcttcagccacggcaccaggaacaacagcgccaaggagaacatggagaaggagaagcctgtgaagaggaagatgaagagctctgtgctgcccaaggccagcaccctgagcaagagcagcgctgtgattgagcagggcgactgcaagaacaatgccctggtgcccggcaccatccaggtgaatggacatggaggccagcccagcaagctggtgaagaggggccctggcaggaagcccaaggtggaggtgaacatcgtggtgaagctgtacaccaggaaaggagtggagagccccaagagctacagcatgcagagccagaagatctag

SEQ ID NO: 330574 - DNA, 1197 bp, Artificial Sequence
  derived and/or modified sequence
atgaagaagaaggtgctgagcgacagcgaggacgaggagaaggacgcagacgtgcccgggacgagcacgaggaagaggaaagaccaccagccaaggagacggctcagaaatcgcgcgcagtcctatgatattcaagcctggaaaaaacagtgtgaggaattgctcaacctgatcttccagtgcgaggacagcgagccctttcgacaaccagtagatcttttggagtatcccgactaccgagatatcatcgacaccccgatggactttgccacggtccgcgagactttggaggctggcaattatgaatccccaatggaactctgtaaggacgtccgactgatattttctaattctaaggcatacaccccgagtaaacgcagtaggatttatagtatgagccttcgtctgtccgcattttttgaagagcacatcagttccgttctctccgattataagagcgcactacggtttcataaacgaaacacgattaccaaaaggaggaagaaacgcaacaggagcagctcagtgagctcatctgctgccagctcacctgaacggaagaagaggatcctgaaacctcagctgaaatctgaaagctccactagcgcctttagcacccctacgcgctctattccgcctcggcataatgcagctcaaataaatggaaagactgaaagctcttcagtggttaggacacgttcaaatagggtggtggtcgatccggtagtgacagaacagcctagcacatcctcagcggccaagaccttcatcacgaaggcgaatgctagcgcaatccccggcaaaactatactggaaaattcagtgaagcatagtaaggccttaaatactctgtcgtctccaggacagtcctccttcagccatgggactcgcaacaattccgcaaaggagaatatggaaaaagagaagcctgtgaaaagaaaaatgaagtcttctgtcctgcccaaagccagcaccctgagcaaatcgtctgccgtcatagagcagggagattgcaagaataatgccctggtgccagggacaatccaggtgaatggccatggaggccagcccagcaagctggttaaaaggggccccgggagaaaacctaaagtggaagtgaatatagtggtgaaattgtatactcgtaagggagtcgaaagtcctaagagttattccatgcagtctcagaaaatctag

SEQ ID NO: 330575 - DNA, 1197 bp, Artificial Sequence
  derived and/or modified sequence
atgaagaagaaggtgttgtctgactctgaggatgaagagaaggacgcggacgttcctggcacatctacccggaagaggaaagaccaccagccgcgtcgacgactcagaaatcgcgctcagtcatacgacatccaggcctggaagaaacagtgtgaagaacttttgaatctgatttttcagtgtgaggacagcgagcctttccgacagcccgttgatctcctggaataccctgactaccgcgatattattgatacgcccatggactttgcaaccgtacgggaaaccctggaagctggaaattacgagtcccccatggagttgtgtaaggatgttcggcttattttcagcaactccaaagcctataccccctcgaagcgctctcggatttattctatgtcgctgagactttcagcctttttcgaagagcatatcagtagcgttctgtctgactacaagagcgcccttcggtttcacaagcgcaatacgataacgaagcgcagaaagaagcggaataggagttcatctgtctcatcttcagctgccagctcgcctgagcggaagaaaaggattcttaaaccccagcttaagagcgagagcagcacaagcgcattcagtactccaacccggtctatcccccctcgccacaatgcagcacagatcaacggcaagaccgagtcctcttcagtggtgcggacacggtccaatagggtggtagtggatccagtcgtgacagagcagcccagcaccagctccgcagcaaaaacttttattactaaggcgaatgcctcagctatcccaggcaaaacaattctcgagaacagtgttaagcacagtaaggccctgaatacactgagttcacctggtcaatcatccttcagccacgggacgagaaataactcagccaaggagaacatggagaaagaaaaacccgttaagcgcaaaatgaaaagtagtgtgctgcctaaagccagtacactgtcaaagagctccgctgtaattgagcagggcgattgtaaaaataatgctctggtgcccggaacaattcaggtgaatgggcacggtggacaaccatccaagttagttaagagggggccaggaaggaagcctaaggtggaagtgaatatcgtggtcaaactgtataccaggaagggagtcgaatccccaaagagctactcaatgcaatcacaaaagatctag

SEQ ID NO: 330576 - DNA, 1197 bp, Artificial Sequence
  derived and/or modified sequence
atgaagaagaaggtgctgagcgacagcgaggacgaggagaaggacgccgacgtgcccggcaccagcaccagaaagagaaaggaccaccagcccagaagaagactgagaaacagagcccagagctacgacatccaggcctggaagaagcagtgcgaggagctgctgaacctgatcttccagtgcgaggacagcgagcccttcagacagcccgtggacctgctggagtaccccgactacagagacatcatcgacacccccatggacttcgccaccgtgagagagaccctggaggccggcaactacgagagccccatggagctgtgcaaggacgtgagactgatcttcagcaacagcaaggcctacacccccagcaagagaagcagaatctacagcatgagcctgagactgagcgccttcttcgaggagcacatcagcagcgtgctgagcgactacaagagcgccctgagattccacaagagaaacaccatcaccaagagaagaaagaagagaaacagaagcagcagcgtgagcagcagcgccgccagcagccccgagagaaagaagagaatcctgaagccccagctgaagagcgagagcagcaccagcgccttcagcacccccaccagaagcatcccccccagacacaacgccgcccagatcaacggcaagaccgagagcagcagcgtggtgagaaccagaagcaacagagtggtggtggaccccgtggtgaccgagcagcccagcaccagcagcgccgccaagaccttcatcaccaaggccaacgccagcgccatccccggcaagaccatcctggagaacagcgtgaagcacagcaaggccctgaacaccctgagcagccccggccagagcagcttcagccacggcaccagaaacaacagcgccaaggagaacatggagaaggagaagcccgtgaagagaaagatgaagagcagcgtgctgcccaaggccagcaccctgagcaagagcagcgccgtgatcgagcagggcgactgcaagaacaacgccctggtgcccggcaccatccaggtgaacggccacggcggccagcccagcaagctggtgaagagaggccccggcagaaagcccaaggtggaggtgaacatcgtggtgaagctgtacaccagaaagggcgtggagagccccaagagctacagcatgcagagccagaagatctag

SEQ ID NO: 330577 - protein, 268 aa, Artificial Sequence
  derived and/or modified sequence
MQQIRPPFIRGPPHHASNPNSPLSNPMLPGIGPPPGGPRNLGPTSSPMHRPMLSPHIHPPSTPTMPGNPPGLLPPPPPGAPLPSLPFPPVSMMPNGPMPVPQMMNFGLPSLAPLVPPPTLLVPYPVIVPLPVPIPIPIPIPHVSDSKPPKKLLSPEEPAVSELESVKENNCASNCHLDGEAAKKLMGEEALAGGDKSDPNLNNPADEDHAYALRMLPKTGCVIQPVPKPAEKAAMAPCIISSPMLSAGPEDLEPPLKRRCLRIRNQNK

SEQ ID NO: 330578 - DNA, 807 bp, Artificial Sequence
  derived and/or modified sequence
atgcagcagatcagaccccccttcatcagaggccccccccaccacgccagcaaccccaacagccccctgagcaaccccatgctgcccggcatcggccccccccccggcggccccagaaacctgggccccaccagcagccccatgcacagacccatgctgagcccccacatccacccccccagcacccccaccatgcccggcaacccccccggcctgctgcccccccccccccccggcgcccccctgcccagcctgcccttcccccccgtgagcatgatgcccaacggccccatgcccgtgccccagatgatgaacttcggcctgcccagcctggcccccctggtgcccccccccaccctgctggtgccctaccccgtgatcgtgcccctgcccgtgcccatccccatccccatccccatcccccacgtgagcgacagcaagccccccaagaagctgctgagccccgaggagcccgccgtgagcgagctggagagcgtgaaggagaacaactgcgccagcaactgccacctggacggcgaggccgccaagaagctgatgggcgaggaggccctggccggcggcgacaagagcgaccccaacctgaacaaccccgccgacgaggaccacgcctacgccctgagaatgctgcccaagaccggctgcgtgatccagcccgtgcccaagcccgccgagaaggccgccatggccccctgcatcatcagcagccccatgctgagcgccggccccgaggacctggagccccccctgaagagaagatgcctgagaatcagaaaccagaacaagtag

SEQ ID NO: 330579 - DNA, 807 bp, Artificial Sequence
  derived and/or modified sequence
atgcaacagattagacctccatttattcgggggcctcctcatcacgcgtccaaccctaattcccccctatctaatcctatgctgccaggcatcggtcccccgcccggagggcccaggaatctgggccctacgtcatcgcctatgcacagacccatgctgtcccctcatattcatcctccctcaacccctacaatgcctggcaacccccctggactccttcccccacccccgcccggggcccctttaccttccctccctttccccccagtttccatgatgcctaatgggcccatgcccgttccacagatgatgaactttggactgcccagcttggcccccctggtccccccacccactcttctggtgccctatcccgtcatcgtgcctctgcctgtgcctatccccataccaatccccatccctcatgtctcggattcaaaacctcctaagaagctacttagccccgaagagccagctgtctcagagctggagagcgtcaaggaaaacaactgcgcttctaattgtcacctagacggcgaggccgctaagaagctcatgggtgaggaggccctggctggaggtgataagtccgacccaaacttgaataatccagctgacgaggaccacgcatacgctttgaggatgctgcccaagaccggctgcgtcatccagcccgtcccaaagccagctgaaaaagcagcaatggccccttgcattatctcctcgcctatgctaagcgccggacctgaggacctcgagccaccactgaagcggaggtgtttaagaatacgcaatcaaaacaaatag

SEQ ID NO: 330580 - DNA, 807 bp, Artificial Sequence
  derived and/or modified sequence
atgcagcagatccggccccccttcatccggggccccccccaccacgccagcaaccccaacagccccctgagcaaccccatgctgcccggcatcggccccccacctgggggccccaggaacctgggccccaccagcagccccatgcaccggcccatgctgagcccccacatccacccccccagcacccccaccatgcctggcaaccccccaggcctgctgcccccacctcctcctggggcccccctgcccagcctgcccttcccccctgtgtccatgatgcccaacggccccatgcctgtgccccagatgatgaactttggcctgcccagcctggcccccctggtgcccccacccaccctgctggtgccctaccctgtgattgtgcccctgcctgtgcccatccccatccccatccccatcccccacgtgtctgacagcaagccacccaagaagctgctgagccctgaggagcctgctgtgtctgagctggagagcgtgaaggagaacaactgtgccagcaactgccacctggatggagaggccgccaagaagctgatgggagaggaggccctggccggcggggacaagagtgaccccaacctgaacaacccagcagatgaagatcatgcctatgccctgaggatgctgcccaagacaggctgtgtgatccagcctgtgcccaagccagctgagaaggccgccatggccccctgcatcatcagcagccccatgctgtctgctggccctgaggacctggagccccccctgaagaggcgctgcctgcgcatccggaaccagaacaagtag

SEQ ID NO: 330581 - DNA, 807 bp, Artificial Sequence
  derived and/or modified sequence
atgcagcagatccggccccccttcatccggggccccccccaccacgcttctaaccctaactctccgctgtcaaatcccatgttacccgggatcgggccacccccaggaggaccccgtaacctaggccccaccagctctccgatgcaccggcccatgctcagtcctcacatccaccccccctctacacctacaatgcctgggaatcctcctggcctgctgccgccacctccccctggcgccccgctaccaagtctgcccttccctccagtgagcatgatgccgaacgggccaatgcccgtgcctcagatgatgaacttcggcctgccctcgctggcccctcttgtgcccccgcctacactgctggttccttatcctgtgatcgtcccacttcccgttcctatcccgattcccattcctatccctcacgtcagcgattctaagccacctaaaaagctgctaagtccagaagaaccggctgttagcgaactggagtccgttaaggaaaataattgtgcctcaaactgtcacctggatggtgaagcggcgaaaaagctcatgggggaggaagcccttgccgggggagataaaagcgatcccaatctcaataatcctgctgatgaagaccatgcgtacgccctgagaatgttacccaaaacaggatgtgttatccaaccagtgccaaagcctgcggagaaagcagcaatggccccatgcatcataagctctcccatgctatcagcgggacctgaggatctggaaccaccattaaaacgcagatgtctgaggatccggaaccaaaacaagtag

SEQ ID NO: 330582 - DNA, 807 bp, Artificial Sequence
  derived and/or modified sequence
atgcagcagattcgccctcctttcattcggggtccccctcaccatgcatcgaatcctaactccccactgtccaatccaatgttacctggtattggcccacccccaggtggtccgaggaatctggggccaacgtccagtccaatgcatagacccatgctttctcctcacatccatcctccttcaacgccaactatgcctgggaatcctccaggactgcttccacccccacccccaggcgctcccctgcccagtctcccttttcctccggtaagtatgatgccgaacggcccaatgccggtcccacagatgatgaacttcgggctcccatcccttgccccactggtcccaccaccaactctccttgtgccctaccccgttattgtgcctctgcctgttcccattcccatcccaattccaattcctcatgtgagtgattcaaagccacccaagaagctgttgtcccccgaggagcctgcagtgtctgagttggaatccgtcaaggagaataattgcgcatccaattgccatctcgatggggaggccgcaaagaagctcatgggcgaggaggccctggccggtggagacaaaagtgatccaaatcttaacaacccggcagacgaggatcacgcctatgccttaagaatgctcccgaagacgggttgcgtcatacagccggtccctaaacctgccgaaaaggcagcaatggcgccttgtatcatcagctcccccatgctgagcgctgggcctgaagacttagagccccctctgaaacggaggtgcttacggattaggaaccagaataagtag

SEQ ID NO: 330583 - DNA, 2071 bp, Artificial Sequence
  derived and/or modified sequence
atgcagcagatccgcccgcccttcatccgcgggcctccgcaccatgcctccaaccccaacagccccctgtccaaccccatgcttcccggcatcgggcccccgcccggtggccccagaaacctgggccccacttccagccccatgcaccggcccatgctatcgccccacatccaccccccgagcacccccaccatgcccgggaaccccccaggcctgctgcccccgccgcctccgggcgccccgctgccgagtcttcccttcccgccagtgagcatgatgccaaatggcccgatgccggtgccccagatgatgaatttcgggctgccgtcgcttgccccgctggtgccgcccccgaccctgctcgtgccgtaccccgtgatcgtgcccctaccggtgcccatccccatccccatccctatccctcacgtcagcgactccaagccccccaagaagctgctgtcgcctgaggaaccggcggtgagcgagctagagtcggtcaaggagaataactgtgcttccaactgccacctggacggggaggcggccaaaaagctgatgggcgaggaggccctggcggggggcgacaagtcagacccgaaccttaataaccccgcggacgaggaccatgcctatgctctgcggatgctgcccaagaccggctgcgtgatccagcctgtgccaaaacccgcggagaaggctgccatggcaccgtgcatcatctcctcgcccatgctcagcgccgggcctgaggacctggagccgccgctcaaaaggaggtgcctccgaattagaaatcagaataagtaaaaggaacgttcactcacagggtacgctcatggagagagggcgcagagcaaaccatgtcacgccatccaatgacaccagctggtcagctcaccaccccctctggctaaaactcaagcaaataaagccgcttcctgtcattaagcatctcagaggaagcagccctccctcgatggcctctagcccagagaagcccgcgcatcttggacccaccaagcaggcccagccttcctgctgccaccatctctgcttctccccagaggaacttagggatttcacccctggcttttaaaaaaaacgaaataccgacaagccacaaggaccaatgtaggtattctccccgccccatcttcaaggctcagcgactgaggctggaagatgatatggattggaacacaaaaaatctttttttaatctttttaaaaactgctgtggttttgctgctacactaagaattgtgatttgcattgtacggttttggacctatattgttcacgttttgatggcggagaggggtggtcctggaggcccaatgcttcagagtcatctctgtcctgcccgggatgcacttttaaatgaagagttagaatattttattggctaatatacttttcttgttatttttacaaaggccacctttatcctttttgatgccatattttcagtgttacacttttatggcttttaattttcgatttgacagatgtaagaagcagcatgaatagtttatactgtggtttttcagagactgaatgccaagagaactcggtaaatgtttattcttctcagctttctctttaaattcccctaaatagcgccccatttgggaacagagcaagagtgttgaactgaagaccaaaatgccctcaaggtgtaaaataatccgagggggaatatttgctgggcgtcaggaaagactcagatgaaatttcaaccctgatggttttcggtgatccaggaagtcagtgagacaatctctctatatgcagagccctttcatgataattagaatggtatggacaaaccaatgaaaacaagagggaaagtgagaaagatcacccatgattctgtttcactgtttgctttctcctgtcatggttaagagaaatgtgcaattcgatcctcaatcagtgggtggaggataacagggtagattcacttgtgtgcacttgtacagttgtagctgcgagtccagaagtcctctagagcatgtgtactggcactgagttggtgagacagttgtggagtatcccattctgatgagtac

SEQ ID NO: 330584 - protein, 326 aa, Artificial Sequence
  derived and/or modified sequence
MEFLWDFLNHQEGPRIRDHLSHGEINLHEFSKETTNQLLAFSLVLLLRFVDDCLLSVFKEKSAVELLISLAEGYSSRCHPVFQLKKQVLSCEESIRVWALLPFPEELTRQAVRLEDNSETNACHSLITKMTDELYHHMPENRCVLKDLDRLPTETWPQLLRELCSTPVPTLFCPRIVLEVLVVLRSISEQCRRVSSQVTVASELRHRQWVERTLRSRQRQNYLRMWSSIRLLSPVLSLILLLIALELVNIHAVCGKNAHEYQQYLKFVKSILQYTENLVAYTSYEKNKWNETINLTHTALLKMWTFSEKKQMLIHLAKKSTSKVLL

SEQ ID NO: 330585 - protein, 552 aa, Artificial Sequence
  derived and/or modified sequence
MKLTSCLERALGDVFLLIGKECPFLLRDLLSSEELAQVFSQSVMNVLKVFVGSPCGLNLRNVLWHGFASPEEIPPKYCSMMILLTAGLGQLLKSYLQNTKLTLAHRSFISLTNLEDLIVFPDVTYEVLSVLEEVMMKSAFILKIMLPYWEVALVKFKSHRFADCAILLLTQLETGLRNVFATLNRCPKRLLTAESTALYTTFDQILAKHLNDGKINQLPLFLGEPAMEFLWDFLNHQEGPRIRDHLSHGEINLHEFSKETTNQLLAFSLVLLLRFVDDCLLSVFKEKSAVELLISLAEGYSSRCHPVFQLKKQVLSCEESIRVWALLPFPEELTRQAVRLEDNSETNACHSLITKMTDELYHHMPENRCVLKDLDRLPTETWPQLLRELCSTPVPTLFCPRIVLEVLVVLRSISEQCRRVSSQVTVASELRHRQWVERTLRSRQRQNYLRMWSSIRLLSPVLSLILLLIALELVNIHAVCGKNAHEYQQYLKFVKSILQYTENLVAYTSYEKNKWNETINLTHTALLKMWTFSEKKQMLIHLAKKSTSKVLL

SEQ ID NO: 330586 - DNA, 2206 bp, Artificial Sequence
  derived and/or modified sequence
attgattcatttaatctgcatgttggcggtgtgaatagtagaaaactcacagttgaaaatgcctcttgtcagccacggagcgcacaggcatttgtgtgcgtaaccccgggtagcgttcatgtgcacctaaagtgtgacgacagcctatgggaaaccaagggaagggtcacctgtagaggtccggacattcggttttgcctttaagacaactattagatcctaagcgactgtgttgtggctgagttaaaaatgtgcctgtttacttgcagagcttcttccattaggtgaacaatctgttgtgattttaatgtgtaagacctttggtaatgtgaggaattgattagatagtgcagcccagtctctagaggatcagatctgtgggattggttggggtggttgggcaaagtccatggtgagttaagaaatgactttggaagtgactctaatgtgtacacaaacaacacacatgcacacaccacacatacatacacacacgaacacatacctccatgctgcatatacacacacaggcatacacacactctaatgtgtacacaaacacacatgcacataccacacatacacacacacacatgaacacatacctccatgccacacagacacacacaggcatacacatactctaatgtgtacacaacacacatgcacacaccacacacgaactcacacatccatgccacatatacacacacaggcatacacacatgcaggcacatacactacacacacacacacacacacacacaggcacagttgcatataaacacacaaatgtacacacccccacaccacatatgcacatacacatatacacaccacacatattcatagtcacatacacaaacacacatgtgtatacaattattaatatagtcttaaagtcattctgttggttaagaaaatatttcctgaacacctgtttgctgaattttaaagactgtccatttaatttgcttagaccttagataacaagttaggctaaaagtactatatccatcaactctgaaagttctgtatgtttatgtatggggaccagttaaccaatgtatttatttttgatgttttagatattggcaaaacacttgaatgatggtaaaatcaatcagcttcctcttttccttggagagcctgctatggaatttctctgggatttcctgaaccatcaggagggtccccgcataagagatcatttaagccacggggagatcaacttacatgaattttcaaaagaaacaactaatcagttgcttgcattttctcttgtactgctactcagattcgttgatgactgtctgctatcagtttttaaggaaaaatcagccgtagaattgttgattagtcttgcagaaggctatagttctcgctgtcatccggtttttcagcttaaaaaacaggtgctgagctgtgaggagagcatcagggtttgggctctgctgcctttccccgaagaactcactcggcaagccgtcagattagaagataattctgaaacaaatgcctgccactctttgattacaaaaatgacggatgagctgtatcaccatatgcctgagaatcgttgtgtgttaaaggacttggatcgtcttcctactgagacgtggccccagcttctccgtgagctctgcagcacacctgttcccaccctgttctgccccaggattgtgctggaagtgctggttgtgctccgaagcatcagcgaacagtgccgccgtgtgtccagccaggtcaccgttgcctcagagctgagacacaggcagtgggtggaaaggacgctgcggtctcgccagcggcagaactacctgcgtatgtggagtagtatcagactactgtcccctgtgctcagcctgatactgttactcattgcgctggagttggtcaacattcatgctgtttgtgggaagaatgcgcatgagtatcagcagtacctaaagtttgtaaagtcgatcttgcagtacacggagaacctggtggcttacaccagttacgaaaagaacaagtggaatgaaactatcaatcttacacatacagctttgttgaaaatgtggacttttagtgagaagaaacaaatgttaatacatttagccaagaaatccacaagtaaagtactcttatgaaaacttgtaagtcaggatgcttttaattttaacagattttaacagcgtgtaaattaaaaacccaaagacag

SEQ ID NO: 330587 - DNA, 981 bp, Artificial Sequence
  derived and/or modified sequence
atggagttcctgtgggacttcctgaaccaccaggagggccccagaatcagagaccacctgagccacggcgagatcaacctgcacgagttcagcaaggagaccaccaaccagctgctggccttcagcctggtgctgctgctgagattcgtggacgactgcctgctgagcgtgttcaaggagaagagcgccgtggagctgctgatcagcctggccgagggctacagcagcagatgccaccccgtgttccagctgaagaagcaggtgctgagctgcgaggagagcatcagagtgtgggccctgctgcccttccccgaggagctgaccagacaggccgtgagactggaggacaacagcgagaccaacgcctgccacagcctgatcaccaagatgaccgacgagctgtaccaccacatgcccgagaacagatgcgtgctgaaggacctggacagactgcccaccgagacctggccccagctgctgagagagctgtgcagcacccccgtgcccaccctgttctgccccagaatcgtgctggaggtgctggtggtgctgagaagcatcagcgagcagtgcagaagagtgagcagccaggtgaccgtggccagcgagctgagacacagacagtgggtggagagaaccctgagaagcagacagagacagaactacctgagaatgtggagcagcatcagactgctgagccccgtgctgagcctgatcctgctgctgatcgccctggagctggtgaacatccacgccgtgtgcggcaagaacgcccacgagtaccagcagtacctgaagttcgtgaagagcatcctgcagtacaccgagaacctggtggcctacaccagctacgagaagaacaagtggaacgagaccatcaacctgacccacaccgccctgctgaagatgtggaccttcagcgagaagaagcagatgctgatccacctggccaagaagagcaccagcaaggtgctgctgtag

SEQ ID NO: 330588 - DNA, 1659 bp, Artificial Sequence
  derived and/or modified sequence
atgaagctgaccagctgcctggagagagccctgggcgacgtgttcctgctgatcggcaaggagtgccccttcctgctgagagacctgctgagcagcgaggagctggcccaggtgttcagccagagcgtgatgaacgtgctgaaggtgttcgtgggcagcccctgcggcctgaacctgagaaacgtgctgtggcacggcttcgccagccccgaggagatcccccccaagtactgcagcatgatgatcctgctgaccgccggcctgggccagctgctgaagagctacctgcagaacaccaagctgaccctggcccacagaagcttcatcagcctgaccaacctggaggacctgatcgtgttccccgacgtgacctacgaggtgctgagcgtgctggaggaggtgatgatgaagagcgccttcatcctgaagatcatgctgccctactgggaggtggccctggtgaagttcaagagccacagattcgccgactgcgccatcctgctgctgacccagctggagaccggcctgagaaacgtgttcgccaccctgaacagatgccccaagagactgctgaccgccgagagcaccgccctgtacaccaccttcgaccagatcctggccaagcacctgaacgacggcaagatcaaccagctgcccctgttcctgggcgagcccgccatggagttcctgtgggacttcctgaaccaccaggagggccccagaatcagagaccacctgagccacggcgagatcaacctgcacgagttcagcaaggagaccaccaaccagctgctggccttcagcctggtgctgctgctgagattcgtggacgactgcctgctgagcgtgttcaaggagaagagcgccgtggagctgctgatcagcctggccgagggctacagcagcagatgccaccccgtgttccagctgaagaagcaggtgctgagctgcgaggagagcatcagagtgtgggccctgctgcccttccccgaggagctgaccagacaggccgtgagactggaggacaacagcgagaccaacgcctgccacagcctgatcaccaagatgaccgacgagctgtaccaccacatgcccgagaacagatgcgtgctgaaggacctggacagactgcccaccgagacctggccccagctgctgagagagctgtgcagcacccccgtgcccaccctgttctgccccagaatcgtgctggaggtgctggtggtgctgagaagcatcagcgagcagtgcagaagagtgagcagccaggtgaccgtggccagcgagctgagacacagacagtgggtggagagaaccctgagaagcagacagagacagaactacctgagaatgtggagcagcatcagactgctgagccccgtgctgagcctgatcctgctgctgatcgccctggagctggtgaacatccacgccgtgtgcggcaagaacgcccacgagtaccagcagtacctgaagttcgtgaagagcatcctgcagtacaccgagaacctggtggcctacaccagctacgagaagaacaagtggaacgagaccatcaacctgacccacaccgccctgctgaagatgtggaccttcagcgagaagaagcagatgctgatccacctggccaagaagagcaccagcaaggtgctgctgtag

SEQ ID NO: 330589 - DNA, 981 bp, Artificial Sequence
  derived and/or modified sequence
atggaatttctctgggatttcttgaatcaccaggaggggccaagaattagagaccacttgagccatggcgaaatcaatctgcatgagttctcaaaagagactacaaaccaactgcttgcttttagccttgtgctccttcttaggtttgtcgacgactgcctgctttctgtcttcaaggagaaaagcgccgtagaactcctgattagcttggctgaaggatactcttcgcgctgtcatcctgtattccagctaaaaaagcaagtgttgagttgtgaagagagtatccgggtgtgggctcttctgccatttccggaagaattgactcgacaagccgtacgcttagaggataatagcgaaaccaatgcctgccactcgctgatcacgaagatgactgacgaactgtatcaccacatgccagagaatcgctgcgtgttaaaggacctggatagactccccaccgaaacctggccacaactactacgggagctttgcagcacacctgttccaaccctgttttgcccccgtatcgtactggaagtgctcgtggttctgcgcagcattagcgaacagtgtagaagagtcagcagccaagtgactgtagcctctgaacttagacaccgacagtgggttgaacgaacgcttcggagtcgtcagaggcagaactacctgcggatgtggagctctatacggctgctgagcccagttttgtcgctgatcttgctgttaatcgctctagaactcgtgaacattcacgccgtgtgcgggaagaacgcccacgagtatcagcaatatctgaagtttgttaaatccattctacaatatacagaaaacctcgtagcttacacatcttatgagaagaataagtggaacgagaccatcaacctgactcatacagccctactcaagatgtggacttttagcgagaagaagcagatgcttattcatttagcaaaaaagtctacaagtaaggtgctgctttag

SEQ ID NO: 330590 - DNA, 1659 bp, Artificial Sequence
  derived and/or modified sequence
atgaagctgaccagttgcctcgaacgagccctgggggatgtattcctcttgataggcaaggaatgtcctttcctcctgagagacctgctgtcatcggaggagctggcccaggtcttttcacagagcgtgatgaacgtgctgaaggttttcgtgggatctccctgtggacttaacctaaggaatgtcttgtggcacggctttgctagccctgaggagataccgccaaagtactgcagcatgatgatcttgttaaccgcgggactggggcaacttctgaagtcgtacctgcagaacactaaattgacactcgcccaccgatcatttataagtctgactaaccttgaagatctaatcgtcttccccgacgtcacctacgaggtcctctccgtgttagaggaggtgatgatgaaatccgcctttattttaaaaatcatgctgccttattgggaagtggccctggtcaaatttaagtctcatagattcgcagactgcgctattttgttgttgactcaactggagactggactacggaacgtctttgcaaccttaaaccggtgcccaaagaggcttctgaccgcggaaagcactgccctgtacaccacatttgaccagattctggctaaacacctaaatgacggaaaaattaaccagctgccattgttcctgggtgaaccagctatggagtttttatgggactttttgaaccatcaagaaggcccccgcatcagagaccatctcagtcatggcgaaataaacctccacgaattctcaaaagagacaacaaatcagctcttggcattcagccttgtcctcttgctgcggtttgtggatgattgtctccttagcgtgttcaaggaaaagtctgccgtggaactgctcatcagccttgctgagggttatagctccagatgccaccccgtgtttcagctaaaaaagcaagttctaagttgtgaggagtcgataagagtctgggctctcctcccatttcccgaggagctgacaaggcaggctgtccgcctcgaggacaatagcgaaactaacgcatgccattcactgattactaagatgactgatgagctgtaccatcacatgccagagaatcgctgcgttctgaaagaccttgaccgcctccccacagagacctggccccaattactccgtgaactatgttctaccccagtccccacattgttctgcccacgaatcgtgctggaagtgctggtggttctacgttctataagtgaacagtgccggcgtgtgtcctctcaagttacggtcgcttcagaacttaggcatcggcagtgggtggaaaggacactgagatccaggcagcgacagaattacctaaggatgtggtcctctattcgcttgctctctcctgtgctgagtctgatccttctgcttatcgccctcgaactcgttaacatccatgctgtgtgtggtaagaacgcacacgagtaccagcagtacttgaagttcgtcaagtctattctccagtacaccgagaacctcgtagcatacacctcctacgagaagaacaagtggaacgagaccatcaacctgacacatactgcattgctcaagatgtggaccttctccgagaagaagcaaatgctcatccatctcgctaagaagagcactagcaaggtactcttatag

SEQ ID NO: 330591 - DNA, 981 bp, Artificial Sequence
  derived and/or modified sequence
atggagttcctgtgggacttcctgaaccaccaggagggcccccgcatccgggaccacctgagccacggggagatcaacctgcacgagttcagcaaggagaccaccaaccagctgctggccttcagcctggtgctgctgctgcgctttgtggatgactgcctgctgagcgtcttcaaggagaagtctgctgtggagctgctgatcagcctggccgagggctacagcagccgctgccaccctgtgttccagctgaagaagcaggtgctgagctgtgaggagagcatccgggtgtgggccctgctgcccttccctgaggagctgacccggcaggccgtgcggctggaggacaacagcgagaccaatgcctgccacagcctcatcaccaagatgacagatgagctgtaccaccacatgcctgagaacagatgtgtgctgaaggacctggaccggctgcccacagagacctggccccagctgctgcgggagctgtgcagcacccctgtgcccaccctcttctgcccccgcatcgtgctggaggtgctggtggtgctgcggagcatcagcgagcagtgccggcgggtgagcagccaggtgacagtggccagcgagctgcggcaccggcagtgggtggagaggaccctgcggagccggcagaggcagaactacctgaggatgtggagcagcatccggctgctgagccctgtgctgagcctcatcctgctgctgattgccctggagctggtgaacatccatgctgtgtgtgggaagaatgcccacgagtaccagcagtacctgaagtttgtgaagagcatcctgcagtacacagagaacctggtggcctacaccagctatgagaagaacaagtggaatgagaccatcaacctgacccacacagccctgctgaagatgtggaccttcagcgagaagaagcagatgctgatccacctggccaagaagagcaccagcaaggtgctgctgtag

SEQ ID NO: 330592 - DNA, 1659 bp, Artificial Sequence
  derived and/or modified sequence
atgaagctgaccagctgcctggagcgggccctgggagatgtgttcctgctgattggcaaggaatgtcccttcctgctgcgggacctgctgagcagcgaggagctggcccaggtgttcagccagagcgtgatgaatgtgctgaaggtgtttgtgggcagcccctgtggcctgaacctgagaaatgtgctgtggcacggctttgccagccctgaggagatcccccccaagtactgcagcatgatgatcctgctgacagctggcctgggccagctgctgaagagctacctgcagaacaccaagctgaccctggcccaccgctccttcatcagcctgaccaacctggaggacctgattgtgtttcctgatgtgacctatgaggtgctgtctgtgctggaggaggtgatgatgaagagcgccttcatcctgaagatcatgctgccctactgggaggtggccctggtgaagttcaagagccacagatttgctgactgtgccatcctgctgctgacccagctggagaccggcctgagaaatgtgtttgccaccctgaaccgctgccccaagaggctgctgacagctgagagcacagccctgtacaccacctttgaccagatcctggccaagcacctgaatgatggcaagatcaaccagctgcccctcttcctgggggagcccgccatggagttcctgtgggacttcctgaaccaccaggagggcccccgcatccgggaccacctgagccacggggagatcaacctgcacgagttcagcaaggagaccaccaaccagctgctggccttcagcctggtgctgctgctgcgctttgtggatgactgcctgctgagcgtcttcaaggagaagtctgctgtggagctgctgatcagcctggccgagggctacagcagccgctgccaccctgtgttccagctgaagaagcaggtgctgagctgtgaggagagcatccgggtgtgggccctgctgcccttccctgaggagctgacccggcaggccgtgcggctggaggacaacagcgagaccaatgcctgccacagcctcatcaccaagatgacagatgagctgtaccaccacatgcctgagaacagatgtgtgctgaaggacctggaccggctgcccacagagacctggccccagctgctgcgggagctgtgcagcacccctgtgcccaccctcttctgcccccgcatcgtgctggaggtgctggtggtgctgcggagcatcagcgagcagtgccggcgggtgagcagccaggtgacagtggccagcgagctgcggcaccggcagtgggtggagaggaccctgcggagccggcagaggcagaactacctgaggatgtggagcagcatccggctgctgagccctgtgctgagcctcatcctgctgctgattgccctggagctggtgaacatccatgctgtgtgtgggaagaatgcccacgagtaccagcagtacctgaagtttgtgaagagcatcctgcagtacacagagaacctggtggcctacaccagctatgagaagaacaagtggaatgagaccatcaacctgacccacacagccctgctgaagatgtggaccttcagcgagaagaagcagatgctgatccacctggccaagaagagcaccagcaaggtgctgctgtag

SEQ ID NO: 330593 - DNA, 981 bp, Artificial Sequence
  derived and/or modified sequence
atggagttcctgtgggacttcctgaaccaccaggagggcccccggatacgggatcacctttctcatggcgagattaacctgcatgagttcagtaaagaaaccaccaaccaactactggccttctcattggtccttcttctgcgttttgtcgatgactgtctgttgtcagtgtttaaggagaagtcagccgtggagctactcatttccctcgcggaagggtatagcagtagatgtcaccccgtgttccagctgaagaagcaagtattgtcttgcgaggagtctatacgggtctgggctctcttgccatttcccgaggaattgacaagacaagccgtccgcttagaagataatagcgaaacgaacgcgtgtcactccctcatcactaaaatgacagatgaactataccaccatatgccggagaataggtgtgttctgaaggacctggataggctgcctaccgaaacgtggccacagttattgagagagctctgctcaaccccagtgcccacactcttctgtccccggatcgtgctcgaagtgttggtcgttcttagatctattagcgaacagtgccggcgcgtgtccagccaggtgaccgttgccagcgagctccgccaccggcagtgggtggaaaggacactcagatcacgacaacgacagaattacctgcgtatgtggtccagcatcaggctgctgagtccagttctgagtctgattttgctactgatcgcattagaactggtgaacattcatgctgtctgcggcaaaaatgcacacgagtatcagcaatacctcaaattcgtgaaatcaattctacaatacaccgaaaacttagtggcatacacctcttacgaaaaaaacaagtggaatgagaccattaacctaacccacaccgcgctgttgaagatgtggacgttctctgaaaagaaacaaatgctgatccacctcgctaaaaaatccacctctaaggtcctcttgtag

SEQ ID NO: 330594 - DNA, 1659 bp, Artificial Sequence
  derived and/or modified sequence
atgaagctgaccagctgcctggagcgggccctgggcgacgtgttcctcctcattggaaaagagtgcccttttttgttacgggaccttctctcctcagaggaactagcacaggtctttagccaatctgtaatgaacgtgctcaaagtgttcgtgggctccccctgcggactgaacttgagaaacgttttgtggcacgggttcgctagccctgaggagatccctcccaaatattgctcaatgatgatcttgctaactgctgggctcggacagcttcttaaaagctacctacaaaataccaagctgacactcgctcacagaagcttcatttctcttacgaacttagaagacctgattgtttttcccgatgtgacctacgaggtgctctccgtcctggaggaggtgatgatgaagagtgccttcatactgaaaattatgctcccttattgggaggtggccctggtcaagttcaaatctcacagatttgctgactgcgccatcttgctattgacccagctggaaaccggcttgaggaatgtcttcgccacactcaacagatgtcctaagcgcctgctgactgccgagagtacagcattatacaccacttttgaccagatcctggcgaaacatttgaacgatggtaaaatcaatcaactgcccctgttccttggcgagcctgcaatggagtttctctgggatttccttaatcaccaagaaggcccgcggataagggatcacttgtcacacggggagatcaatcttcacgagtttagcaaggagacaacaaatcaattactggccttcagtttagtgctcttgttgagatttgtcgacgattgcctgcttagcgtgtttaaggagaaatcagcagtggagttgcttatttctttggccgagggctacagttcccggtgccatcccgtttttcagctgaaaaagcaggtgctatcttgcgaggagtcaattagagtgtgggcactgcttccattcccagaagagctcacaaggcaggccgtgcgtctggaggataattccgagaccaatgcatgtcattctctgattacgaaaatgacagatgagctgtatcaccacatgcctgaaaacaggtgcgtgcttaaagacttggatcgtctgcccacggagacctggccccagctcctgcgcgaactttgctcaacgcctgtccccactctgttctgtccccgtatagttctcgaggttttggtagtgcttagatccatctctgagcagtgtcgcagggtgtccagccaggtcactgtcgcgtccgaattacgtcaccgccagtgggttgagcgcactctacgatctaggcaacggcagaactacctccggatgtggagctctattcggctcctgtcccccgtgctgtctctgattctcttgctcatcgccctggagctggtgaatatccacgccgtgtgtggcaagaacgcccacgaataccagcagtacttaaagtttgtcaagtccatcctccagtatactgagaatttggtggcctacacatcgtacgagaagaacaagtggaacgagaccataaatctcactcacacagcccttctcaaaatgtggacattttcagaaaagaaacagatgctaatccacttggcgaagaagagcactagcaaggtactgctgtag

SEQ ID NO: 330595 - DNA, 981 bp, Artificial Sequence
  derived and/or modified sequence
atggagttcctctgggacttcctgaaccaccaggaaggtcctaggataagggaccacctgagccacggtgagattaatctgcatgagttttcaaaggagactaccaatcagctcttagccttttctttggtgctgctcctaaggtttgtcgacgattgtctcttgagtgtgttcaaggagaaaagcgccgtcgagctcctgatatcactcgccgaaggctacagtagcagatgtcatcccgtttttcagctcaagaagcaggtgctgtcatgcgaggagtccatccgggtgtgggccctcctgccgtttcctgaggagctcacgagacaggcggtgcggctggaagacaattcagaaaccaacgcttgccactcgcttattaccaagatgactgatgagttatatcaccacatgcccgaaaaccgctgcgtgctgaaggacctagacaggcttcccactgaaacctggccccagctacttagagaactgtgcagcacacctgttcccactttattttgtccacggattgtcctggaagtgctggttgtccttcgttccattagcgaacagtgccggagagtatcaagccaggtgaccgtggcgtctgagttgcggcaccggcaatgggtcgaaagaactctccgctcaaggcaaagacaaaactatctacgcatgtggtctagtattcggttactgtccccagtcctcagcctgatcctcctgctgattgctctggaattagtgaacattcacgcagtctgtggcaagaacgcgcacgaataccagcagtaccttaagtttgttaaatcaattttacagtataccgaaaatctcgtcgcctacacttcatatgaaaaaaataaatggaatgaaacgatcaacctcacacacactgcacttctaaaaatgtggaccttctctgagaaaaaacagatgcttatccatttggcaaagaagtctactagcaaagtgctgctgtag

SEQ ID NO: 330596 - DNA, 1659 bp, Artificial Sequence
  derived and/or modified sequence
atgaagctgaccagctgtctagaacgggcattaggtgatgtttttctactgataggaaaagaatgccccttcttacttcgggacttgttgtcctccgaggagctagcccaggtcttcagtcaaagcgtgatgaatgtgctgaaggtcttcgtcggctctccttgcggcctgaatctgcgaaatgtcctttggcacggctttgctagccctgaagagatccctccgaagtattgtagtatgatgattctcctgactgcaggactgggccagctgctcaagtcctacctgcaaaataccaagcttaccctcgcacaccgttcgtttatttcattgacaaacctggaggacctgatcgttttccccgatgtgacctacgaagtactgtccgtgcttgaagaggtaatgatgaagagtgcttttatcctgaaaattatgctgccttactgggaagtggcgttggtcaagtttaagagtcaccggtttgcagattgtgccattttattgctgacccaactagagaccggactcaggaacgtgttcgccacgctgaataggtgcccaaagagactactgacagccgagtcgaccgcgctctatacaaccttcgaccagattctcgccaagcatctgaacgatggaaagatcaatcaattaccgttattcctcggagagccggctatggagtttttgtgggattttctcaaccatcaggagggccctagaattagggatcacctatcacacggcgagatcaacctccacgaattctctaaggaaactacgaatcagctgctggctttcagtctggtattattgctgcgctttgtcgacgactgtctcctgagcgtgttcaaagagaaaagcgcagtggagttactgataagtttagctgaaggctactcatccagatgtcatccagtgttccagctgaagaaacaggtgttatcatgcgaggagtccatccgcgtctgggctctgctacccttcccggaggaactcacgagacaggcggttaggctcgaagacaatagcgaaacaaacgcatgccactccctgatcaccaaaatgaccgacgagctataccatcatatgccagaaaatcgatgtgttctcaaagatctggacagattgccaactgagacctggcctcaactgttgcgagagctctgcagcacaccagtcccgactctgttttgtccgaggatagtactagaggttctggtggtactgagatctatctcagagcaatgcagacgggtgtcttctcaggttacggtcgcttccgagcttcgacatcgccagtgggtggaacgaacattgaggtcccgacagcgccaaaactatctcagaatgtggagcagcattcgcttgctctcccctgttctctcactgattctgttgttaattgcgctggagctggttaacattcatgcggtttgtgggaagaatgcacacgaataccaacagtatcttaagttcgtgaaatcgatcttgcagtacactgagaacctggttgcctataccagctatgaaaagaataaatggaacgagacaataaatctgacacacaccgcccttctcaagatgtggaccttcagtgagaagaagcagatgctcatccatctggcaaagaagagcaccagcaaggtactcctatag

SEQ ID NO: 330597 - DNA, 1404 bp, Artificial Sequence
  derived and/or modified sequence
atgaaaaatcaaaatggaaccttcaaagactgggcgaatgccaacgtgtcccgccagattgaggatactgtcctatatggatattataccctctactctgtgatcctgttctgcgtgtttttctggattccatttgtgtatttctactacgaggaaaaggacgacgacgacacatccaaatgcactcaaataaaaaccgctcttaaatacactctagggtttgtagtgatatgtgccctgctgctgctcgtaggcgcatttgtgccattgaacgtgcctaataacaagaattccaccgaatgggagaaggtgaagagcctgttcgaagaactaggatccagccacggcttggccgcgctatccttctcaatttcttctcttaccctgattggaatgctggccgcgatcacctatacagcttacggtatgtctgcgctaccactgaatctgatcaaaggtacgcggtctgcagcatacgagcgactggaaaatacggaggacatagaagaagtggagcagcacattcagacgattaagtccaaaagtaaagacggacgcccgctccccgccagagacaagagagcccttaagcagttcgaagaacggctgcgcacgcttaaaaagcgcgaaagacacctggagtttattgaaaacagctggtggaccaaattttgtggggcactaaggcctcttaagatcgtgtgggggatcttcttcattctggttgccctcctgtttgttatcagcctctttctgtccaaccttgacaaagccctccactctgcaggaatcgatagcggcttcattattttcggtgccaatctttccaatccattaaacatgctccttccgctcctgcaaactgtgttcccactggactatattctgattacaatcatcattatgtatttcatattcacttccatggccggaataagaaacataggaatttggttcttctggatacgactttataagattcgaagagggcgaaccaggcctcaggcccttttatttctatgcatgatactgcttctgatcgttctgcacacatcctacatgatctattctcttgccccccagtacgtaatgtacgggtcacagaactatctcatcgaaaccaatattacgtcagacaaccataaggggaactccacgcttagcgtcccgaaaagatgtgacgcggatgctcccgaagatcagtgtacggttacaaggacttacctgtttctgcacaaattctggtttttcagcgccgcatactacttcgggaattgggctttcctgggggttttcctcataggccttattgtgtcttgttgtaaggggaaaaagtcagtaattgaaggggtggacgaggattcagatattagtgacgacgagccttctgtttattctgcttag

SEQ ID NO: 330598 - DNA, 1404 bp, Artificial Sequence
  derived and/or modified sequence
atgaagaaccagaatggcaccttcaaggactgggccaatgccaacgtgtcccggcagattgaagatactgtgctgtatggctactacaccctgtacagcgtcatcctcttctgtgtgttcttctggatcccctttgtgtacttctactatgaggagaaggatgatgatgacaccagcaagtgcacccagatcaagacagccctgaagtacaccctgggctttgtggtgatctgtgccctgctgctgctggtgggcgcctttgtgcccctgaatgtgcccaacaacaagaacagcacagagtgggagaaggtgaagagcctgtttgaggagctgggcagcagccacggcctggccgccctgtccttcagcatcagcagcctgaccctcatcggcatgctggccgccatcacctacacagcctacggcatgtctgccctgcccctgaacctgatcaagggcaccaggtctgctgcctatgagcggctggagaacacagaggacatcgaggaggtggagcagcacatccagaccatcaagagcaagagcaaggatggccggcccctgcctgcccgggacaagagggccctgaagcagtttgaggagcggctgcggaccctgaagaagcgggagcggcacctggagttcattgaaaattcctggtggaccaagttctgtggggccctgcggcccctgaagatcgtgtggggcatcttcttcatcctggtggccctgctcttcgtcatcagcctcttcctgagcaacctggacaaggccctgcacagcgctggcatcgacagcggcttcatcatctttggagccaacctgagcaaccccctgaacatgctgctgcccctgctgcagaccgtcttccccctggactacatcctgatcaccatcatcatcatgtacttcatcttcacctccatggccggcatcagaaatattggcatctggttcttctggatccggctgtacaagatccggcggggccgcacccggccccaggccctgctcttcctgtgcatgatcctgctgctgattgtgctgcacaccagctacatgatctacagcctggccccccagtatgtgatgtatggcagccagaactacctgattgagaccaacatcaccagtgacaaccacaagggcaacagcaccctgtctgtgcccaagagatgtgatgctgatgcccctgaggaccagtgcaccgtgaccaggacctacctgttcctgcacaagttctggttcttctctgctgcctactactttggaaactgggccttcctgggcgtcttcctgattggcctgattgtgtcctgctgcaagggcaagaagagcgtcatcgagggcgtggatgaagattctgacatcagtgatgatgagcccagcgtgtacagcgcctag

SEQ ID NO: 330599 - DNA, 1404 bp, Artificial Sequence
  derived and/or modified sequence
atgaagaaccagaacggcaccttcaaggactgggccaacgccaacgtgtcccgccaaatagaggatactgtgctgtacggctactatacattgtacagcgtgattctcttctgtgtgttcttttggattcccttcgtttacttctactatgaggagaaggatgacgatgacacttccaaatgcacacaaatcaaaaccgccctcaaatataccttaggcttcgttgtgatctgtgctctcttgcttctcgtgggtgccttcgtacccctgaacgtgccaaataataagaatagtacagaatgggaaaaagtcaaaagcctgtttgaggagctcggatctagccatgggctggccgcgctaagtttttcgatctcctctctaacactcattgggatgttggccgcgattacctataccgcatatggcatgtctgctctgcccctgaatctgattaaggggactaggtctgccgcctatgaacggctggaaaacactgaagatattgaagaggttgaacagcatattcaaacaatcaaatctaaatcgaaggatggccgccctttaccggcacgagacaagagagctttgaagcagtttgaggagagattacggaccctgaaaaagcgagagaggcacctggagtttatcgagaactcgtggtggactaaattttgtggggctctcaggccactcaagattgtttggggtatcttctttatcctggtggctctgttattcgtgatctccctgtttctctccaatctagacaaggctctgcacagtgctggcatcgactcgggctttattatcttcggagcaaatctctctaaccctctgaacatgctgctccctctactgcagacagtgttcccgctagattatatcctcatcaccatcattatcatgtatttcatttttacaagtatggcaggcataaggaacataggcatttggttcttctggattcgtttatataaaattagaaggggaaggacccggccgcaggcactgctgtttctatgcatgatcctcctgttaatcgtcctccacacatcttatatgatatatagccttgccccgcagtatgtgatgtacgggtctcagaactatttaattgaaaccaacattaccagcgacaaccataaggggaactctactttgtcagtgcctaagcgctgcgacgcagatgctcctgaggaccagtgcacggtgacccgcacctacctgttcctacataaattttggtttttctccgctgcctactattttggcaattgggcctttctgggcgtgttcctgattggtttgatcgtcagctgttgcaagggaaaaaagtccgtaattgaaggagttgatgaggatagcgatatatccgacgatgagccgtcggtatactccgcatag

SEQ ID NO: 330600 - DNA, 1404 bp, Artificial Sequence
  derived and/or modified sequence
atgaaaaatcagaacggcaccttcaaggactgggctaatgccaatgtatcaaggcaaatcgaagacacagtgttgtacggatactatacgctttactccgtgatcctgttctgcgtgttcttttggatcccttttgtatatttttactacgaggagaaagacgatgacgacacttctaagtgcacccagatcaaaaccgccctgaagtatactctgggcttcgtggtgatttgtgcacttctcctcttagttggcgctttcgtccctttaaatgtgcccaataacaagaactcgaccgaatgggagaaggtcaagtccttgtttgaggagctggggagctcacacggcctggccgctctatcttttagcatctccagcctgacacttatcgggatgctggctgctatcacatacactgcttacggtatgtcagccctcccgctaaacctcatcaaaggcacccgctccgccgcatacgagcgtctagaaaacactgaggacatcgaggaagtagagcagcatattcagaccataaaaagcaagagcaaggacggcagacctctccccgcacgagataagagggcgctaaaacagttcgaagagcgcctcagaactcttaaaaagcgggagagacatctggagttcatcgaaaattcttggtggacgaaattctgtggggcactgcgccctctcaagatcgtctggggcattttttttatactagtggctcttttgtttgtaatttccctcttcctgtcaaatttagacaaagctctacactccgccggaatcgattctggcttcataattttcggtgccaatctgtccaacccactgaacatgctcctgccactgctccagactgtgttcccactggactacattctcatcactatcataattatgtatttcatatttacatctatggctggcatccggaatattgggatctggtttttttggattaggctctacaagataaggaggggacgaactcggccacaagcgctgctgtttctgtgcatgattttgctcctaatagtcctgcatacgagctacatgatttacagcctcgccccacaatacgtgatgtacgggagccagaactatctgatcgagactaacatcacatcagacaatcataaaggcaattcaacactgtcggttccaaagcgctgcgacgccgatgccccagaagatcagtgtactgtcactcggacttaccttttcttgcataaattttggttttttagcgcagcttactatttcgggaattgggcttttctgggcgttttcctcatcggtctaattgtttcctgctgcaaggggaaaaagagtgtaattgagggggttgatgaggatagtgacatttcagatgacgagcccagtgtgtactctgcctag

SEQ ID NO: 330601 - DNA, 1404 bp, Artificial Sequence
  derived and/or modified sequence
atgaagaaccagaacggcaccttcaaggactgggccaacgccaacgtgagcagacagatcgaggacaccgtgctgtacggctactacaccctgtacagcgtgatcctgttctgcgtgttcttctggatccccttcgtgtacttctactacgaggagaaggacgacgacgacaccagcaagtgcacccagatcaagaccgccctgaagtacaccctgggcttcgtggtgatctgcgccctgctgctgctggtgggcgccttcgtgcccctgaacgtgcccaacaacaagaacagcaccgagtgggagaaggtgaagagcctgttcgaggagctgggcagcagccacggcctggccgccctgagcttcagcatcagcagcctgaccctgatcggcatgctggccgccatcacctacaccgcctacggcatgagcgccctgcccctgaacctgatcaagggcaccagaagcgccgcctacgagagactggagaacaccgaggacatcgaggaggtggagcagcacatccagaccatcaagagcaagagcaaggacggcagacccctgcccgccagagacaagagagccctgaagcagttcgaggagagactgagaaccctgaagaagagagagagacacctggagttcatcgagaacagctggtggaccaagttctgcggcgccctgagacccctgaagatcgtgtggggcatcttcttcatcctggtggccctgctgttcgtgatcagcctgttcctgagcaacctggacaaggccctgcacagcgccggcatcgacagcggcttcatcatcttcggcgccaacctgagcaaccccctgaacatgctgctgcccctgctgcagaccgtgttccccctggactacatcctgatcaccatcatcatcatgtacttcatcttcaccagcatggccggcatcagaaacatcggcatctggttcttctggatcagactgtacaagatcagaagaggcagaaccagaccccaggccctgctgttcctgtgcatgatcctgctgctgatcgtgctgcacaccagctacatgatctacagcctggccccccagtacgtgatgtacggcagccagaactacctgatcgagaccaacatcaccagcgacaaccacaagggcaacagcaccctgagcgtgcccaagagatgcgacgccgacgcccccgaggaccagtgcaccgtgaccagaacctacctgttcctgcacaagttctggttcttcagcgccgcctactacttcggcaactgggccttcctgggcgtgttcctgatcggcctgatcgtgagctgctgcaagggcaagaagagcgtgatcgagggcgtggacgaggacagcgacatcagcgacgacgagcccagcgtgtacagcgcctag

SEQ ID NO: 330602 - protein, 135 aa, Artificial Sequence
  derived and/or modified sequence
MAKSLLKTASLSGRTKLLHQTGLSLYSTSHGFYEEEVKKTLQQFPGGSIDLQKEDNGIGILTLNNPSRMNAFSGVMMLQLLEKVIELENWTEGKGLIVRGAKNTFSSGSDLNAVKSLGTPEDGMAVCMFMQNTLT

SEQ ID NO: 330603 - DNA, 408 bp, Artificial Sequence
  derived and/or modified sequence
atggccaagtctcttctgaagacagcatctctctcaggtcggactaagctcctgcatcagaccgggctgagcttatattcgaccagccacggattctacgaggaggaggtaaagaagactctccagcaattcccaggagggtcaattgatcttcaaaaagaggacaatggcattggcattctcacactgaataacccaagccggatgaacgcattttctggagttatgatgttgcagctgctggagaaggtgatagaacttgagaattggactgaaggaaaggggctgattgttcggggagctaaaaacactttttcctccggaagtgatcttaacgccgtcaagagtctcgggactccagaggacggcatggcagtttgcatgttcatgcagaataccctgacatag

SEQ ID NO: 330604 - DNA, 408 bp, Artificial Sequence
  derived and/or modified sequence
atggccaagagcctgctgaagacagccagcctgagcggccgcaccaagctgctgcaccagacaggcctgagcctgtacagcaccagccacggcttctatgaggaggaggtgaagaagaccctgcagcagtttcctgggggcagcattgacctgcagaaggaggacaatggcatcggcatcctgaccctgaacaaccccagcaggatgaatgccttctctggagtgatgatgctgcagctgctggagaaggtgattgagctggagaactggacagagggcaagggcctgattgtgcggggggccaagaacaccttcagcagcggcagtgacctgaatgctgtgaagagcctgggcaccccagaagatggcatggctgtgtgcatgttcatgcagaacaccctgacctag

SEQ ID NO: 330605 - DNA, 408 bp, Artificial Sequence
  derived and/or modified sequence
atggccaagagcctgctgaagaccgccagcctgagcggccggaccaaactactgcaccagacaggactctctctctattccacttctcatggcttctatgaggaagaagtgaagaagaccctccaacagtttcctggggggagtattgatctgcagaaagaagacaatggtatcggcatcctgactctcaacaacccctcgcgaatgaatgccttcagcggcgtcatgatgctccaactcctcgagaaagtgattgaattggagaattggactgagggaaaggggctaatcgtaagaggcgctaaaaatactttctcctctggctccgacctgaacgcagtcaaatcattaggcactcccgaggacggcatggcagtatgcatgtttatgcagaacactcttacctag

SEQ ID NO: 330606 - DNA, 408 bp, Artificial Sequence
  derived and/or modified sequence
atggctaagagtctcttgaaaacggcttccttgtcaggtagaactaagctgctacaccagacagggttatccctgtattccaccagtcatgggttttacgaagaggaggtgaaaaagactctgcagcagtttccaggcggatccatcgatctgcaaaaagaagacaacggaatagggattctgactctgaataacccatcaagaatgaatgcatttagcggtgtaatgatgctccagctgctggagaaggtgatagaactggagaattggaccgaaggcaagggccttattgtgcgcggtgccaagaatacgttttcttcaggcagcgatcttaatgccgtcaagtccttggggacccccgaggatggcatggcagtgtgcatgttcatgcagaacaccctgacgtag

SEQ ID NO: 330607 - DNA, 408 bp, Artificial Sequence
  derived and/or modified sequence
atggccaagagcctgctgaagaccgccagcctgagcggcagaaccaagctgctgcaccagaccggcctgagcctgtacagcaccagccacggcttctacgaggaggaggtgaagaagaccctgcagcagttccccggcggcagcatcgacctgcagaaggaggacaacggcatcggcatcctgaccctgaacaaccccagcagaatgaacgccttcagcggcgtgatgatgctgcagctgctggagaaggtgatcgagctggagaactggaccgagggcaagggcctgatcgtgagaggcgccaagaacaccttcagcagcggcagcgacctgaacgccgtgaagagcctgggcacccccgaggacggcatggccgtgtgcatgttcatgcagaacaccctgacctag

SEQ ID NO: 330608 - DNA, 531 bp, Artificial Sequence
  derived and/or modified sequence
aacattccaggaagggaagccagcctgtgaagaagcatggcattgaaacaggtggcttggtagtgagcttgttcagctccactgaatcttctttgtggtggggctgcaagacatcctgcatgaaatggcgaaaagtcttttgaagacagcctctctgtctggaaggacaaaattgctacatcaaacaggattgtcactttatagtacatcccatggattttatgaggaagaagtgaaaaaaacacttcagcagtttcctggtggatccattgaccttcagaaggaagacaatggcattggcattcttactctgaacaatccaagtagaatgaatgccttttcaggtgttatgatgctacaacttctggaaaaagtaattgaattggaaaattggacagaggggaaaggcctcattgtccgtggggcaaaaaatactttctcttcaggatctgatctgaatgctgtgaaatcactaggaactccagaggatggaatggccgtatgcatgttcatgcaaaacaccttaacaag

SEQ ID NO: 330609 - DNA, 618 bp, Artificial Sequence
  derived and/or modified sequence
ttccagagcgtggagtcctctacccgcaagttagatcacatcaatatctgctcaagcaacttccccaagaggagtttcgcactcgttacccaggcgggggttcaatggcacaacctggactctcttcagtcccccccccccgggttcaagcggtttccatgcctaagtctcccatcctcttgggactgcagagaagtcgctgacttccagctgagcgtggactcattacttgagaaggataacgatcattccagacccgatattcaggtgcaagctaagagactggcagaaaagctccgctgtgatacggtggtctcagaaatcagtaccggacagcggaccgttaactttaaaataaatagggagttactgaccaaaaccgtgctgcagcaggtgattgaagacggcagcaaatatggtctgaagtccgagctattctctggactgccgcagaagaagattgtggtggagtttagctcccccaacgtggcgaagaagtttcacgtcggccatttgcggtccaccatcatcggtaacttcatagctaacctgaaagaagctctcggacatcaggtgatacggataaactatctgggcgattggggcatgcagttctag

SEQ ID NO: 330610 - DNA, 621 bp, Artificial Sequence
  derived and/or modified sequence
taatttcagagtgtcgaaagctcaactaggaagctggaccacataaacatctgcagctctaacttcccaaaacgctccttcgccctggtgacacaggcaggtgtccagtggcataatctggattccttgcagtcgccacctccaggatttaagcggtttccttgcctgtctttaccaagctcttgggactgcagggaggttgccgatttccagctgtctgtggacagcttgttagaaaaagataacgatcactctaggcccgatattcaggtgcaggcaaaacggctggcagagaaactgagatgtgacaccgtcgtgagtgaaatcagcacaggccagcggaccgtcaactttaagatcaacagagagttactgactaagaccgtgttgcagcaggtcatagaggatgggtccaagtatggcctgaagtctgaactcttcagcgggctgccacaaaaaaaaatcgtggtggaattctctagccctaatgtggcaaaaaagttccatgtcggccacctgcgatctaccataataggcaactttatagccaatcttaaggaagccctggggcatcaggttatcaggattaactatttgggtgattggggcatgcagttttag

SEQ ID NO: 330611 - DNA, 618 bp, Artificial Sequence
  derived and/or modified sequence
ttccagagcgtggagagcagcaccaggaagctggaccacatcaacatctgcagcagcaacttccccaagaggagctttgccctggtgacccaggccggcgtgcagtggcacaacctggacagcctgcagagccccccacctggcttcaagcgcttcccctgcctgagcctgcccagctcctgggactgccgggaggtggccgacttccagctgtctgtggacagcctgctggagaaggacaatgaccacagcaggccagacatccaggtgcaggccaagaggctggccgagaagctgcgctgtgacacagtggtgtctgagatcagcacaggccagaggacagtgaacttcaagatcaaccgggagctgctgaccaagacagtgctgcagcaggtgattgaagatggcagcaaatatggcctgaagtctgagctgttcagcggcctgccccagaagaagatcgtggtggagttcagcagccccaacgtggccaagaagttccacgtgggccacctgcggagcaccatcatcggcaacttcatcgccaacctgaaggaggccctgggccaccaggtgatccgcatcaactacctgggggactggggcatgcagttctag

SEQ ID NO: 330612 - DNA, 621 bp, Artificial Sequence
  derived and/or modified sequence
tgattccagagcgtggagagcagcaccaggaagctggaccacatcaacatctgcagcagcaacttccccaagaggagctttgccctggtgacccaggccggcgtgcagtggcacaacctggacagcctgcagagccccccacctggcttcaagcgcttcccctgcctgagcctgcccagctcctgggactgccgggaggtggccgacttccagctgtctgtggacagcctgctggagaaggacaatgaccacagcaggccagacatccaggtgcaggccaagaggctggccgagaagctgcgctgtgacacagtggtgtctgagatcagcacaggccagaggacagtgaacttcaagatcaaccgggagctgctgaccaagacagtgctgcagcaggtgattgaagatggcagcaaatatggcctgaagtctgagctgttcagcggcctgccccagaagaagatcgtggtggagttcagcagccccaacgtggccaagaagttccacgtgggccacctgcggagcaccatcatcggcaacttcatcgccaacctgaaggaggccctgggccaccaggtgatccgcatcaactacctgggggactggggcatgcagttctag

SEQ ID NO: 330613 - DNA, 618 bp, Artificial Sequence
  derived and/or modified sequence
ttccagagcgtggagagcagcacccggaagctggaccacatcaacatatgctcaagcaatttcccgaaaaggtctttcgccttggttactcaggccggtgtgcaatggcacaatctcgactccttgcagtccccacctcctggatttaagagatttccttgtttgtctctgcctagttcttgggactgccgtgaagtggccgacttccagttgtcagtcgatagcctgctggagaaggacaatgaccacagcaggccagatattcaggtgcaggccaagaggttggcagagaagctgcgatgcgatacggttgtatctgagatttcgaccggtcagagaacagtgaattttaagataaatcgcgaattgcttaccaaaacagtgttgcagcaagtcatagaggatggatcaaagtacggtctcaaatctgaactctttagcggattgccgcagaaaaagatcgtggtggaattttcgtcacctaacgtggctaaaaagttccatgtcggccatcttcgttctacaatcatcgggaatttcattgccaatctgaaggaggccctcggacaccaggtaatccgcatcaactatttaggggattggggtatgcagttttag

SEQ ID NO: 330614 - DNA, 621 bp, Artificial Sequence
  derived and/or modified sequence
tgattccagagcgtggagagcagcacccggaagctggaccacatcaatatctgcagctccaatttccctaagcgatccttcgcactggtaacacaagccggcgtccagtggcataacctggatagcctgcaatctccccccccaggtttcaaacggttcccgtgcctgtcactcccttcctcctgggattgccgtgaggtcgccgacttccagctgagtgtagatagcctgctcgagaaagacaacgatcattcccgaccagatatccaggtgcaagccaaacgcctggccgagaaactgagatgcgacacagtagtttctgaaataagcacggggcagcgaacagtgaactttaagattaacagggagctcttgaccaaaactgtgttacagcaggtgatcgaggatggatctaagtatggccttaaaagtgagctgttttctggacttcctcagaaaaaaatcgtcgtggaattcagcagtcccaacgtggcgaagaagttccacgtcggccacttgaggtccacaattattggaaacttcatcgccaacttaaaggaagcactcggtcaccaagtgattaggatcaactaccttggagactgggggatgcaattttag

SEQ ID NO: 330615 - DNA, 618 bp, Artificial Sequence
  derived and/or modified sequence
tttcaaagtgttgagtcttccactagaaaactggaccatatcaacatctgttctagtaatttccccaagcgcagttttgctctcgtgacgcaagccggagtgcagtggcataatctagattccctgcagagccctccaccgggatttaagcgtttcccatgtctgtctctgccctcctcgtgggactgcagggaagttgcagatttccaactatcagtagatagtctgctcgagaaagacaacgatcattctcggccagacattcaagtgcaggcaaaacgccttgccgagaaattaagatgcgatacggtggtctccgaaatctcgacgggacaaaggacagtgaactttaagattaatcgcgagctgctgactaaaacagtgctgcagcaggtcatagaagacggttccaagtacgggctgaaaagcgagctcttttccggcctccctcagaagaagatcgtagtagagtttagctcccctaatgtcgccaaaaagttccatgtgggccacctgcggtccaccattataggaaattttatcgcgaacctgaaggaagccttgggccatcaggtgatcaggattaactatctgggcgactgggggatgcagttttag

SEQ ID NO: 330616 - DNA, 621 bp, Artificial Sequence
  derived and/or modified sequence
tagttccagtcagtggagtcgtctacccggaagctggatcatatcaacatctgctcttccaatttcccgaaacggtcattcgccctcgtcacacaggcaggcgtacagtggcacaacttggatagcctccagagtccgccaccaggatttaagagattcccttgcctgtccctgccatcttcttgggattgccgcgaggttgccgacttccagctttctgtcgattccctgctggagaaagacaacgaccactcccggccagacattcaggtccaggcaaagcgactggctgagaagcttcggtgcgacaccgtggtgtccgaaatctctacaggacaacggaccgtgaacttcaaaattaatagggagctcctaaccaagaccgtcctgcagcaagttatagaggacggcagtaagtacggtctcaagtccgagctgttcagcgggctgccacaaaagaagatcgtggtagagttcagctcacccaatgtggcaaagaaatttcatgtaggtcacctgcgctcgacaatcatcggcaatttcatcgccaacctaaaggaggctcttgggcatcaggtaattaggatcaattatctgggcgactgggggatgcaattctag

SEQ ID NO: 330617 - DNA, 618 bp, Artificial Sequence
  derived and/or modified sequence
ctttccagagtgttgaatcttccaccagaaaacttgatcacatcaatatctgcagttccaatttcccaaaaagaagtttcgctcttgtcacccaggctggagtgcagtggcacaatcttgactcgctgcagtctccacctccaggattcaagcgattcccctgcctcagtctcccaagcagctgggattgtagagaagtagctgattttcagctttctgtggattctttattggaaaaagacaatgaccattcaagaccagatattcaagttcaagccaagagactagcagagaagctaagatgtgatacagtggtgagtgaaatcagtactggtcaaaggactgtaaatttcaaaataaacagagagctcttaacaaagacagtgctacaacaagtaattgaagatggctcaaaatatggattaaaaagtgaacttttctctggacttccccagaagaagattgtggttgaattcagttcacctaatgttgccaaaaaatttcatgttggacatttgcgttctaccatcataggaaattttatagcaaatctcaaagaagctttaggacatcaagtaataagaataaattaccttggcgattggggcatgcagtttg

SEQ ID NO: 330618 - DNA, 618 bp, Artificial Sequence
  derived and/or modified sequence
ttccagagcgtggagagcagcaccagaaagctggaccacatcaacatctgcagcagcaacttccccaagagaagcttcgccctggtgacccaggccggcgtgcagtggcacaacctggacagcctgcagagccccccccccggcttcaagagattcccctgcctgagcctgcccagcagctgggactgcagagaggtggccgacttccagctgagcgtggacagcctgctggagaaggacaacgaccacagcagacccgacatccaggtgcaggccaagagactggccgagaagctgagatgcgacaccgtggtgagcgagatcagcaccggccagagaaccgtgaacttcaagatcaacagagagctgctgaccaagaccgtgctgcagcaggtgatcgaggacggcagcaagtacggcctgaagagcgagctgttcagcggcctgccccagaagaagatcgtggtggagttcagcagccccaacgtggccaagaagttccacgtgggccacctgagaagcaccatcatcggcaacttcatcgccaacctgaaggaggccctgggccaccaggtgatcagaatcaactacctgggcgactggggcatgcagttctag

SEQ ID NO: 330619 - DNA, 621 bp, Artificial Sequence
  derived and/or modified sequence
tgattccagagcgtggagagcagcaccagaaagctggaccacatcaacatctgcagcagcaacttccccaagagaagcttcgccctggtgacccaggccggcgtgcagtggcacaacctggacagcctgcagagccccccccccggcttcaagagattcccctgcctgagcctgcccagcagctgggactgcagagaggtggccgacttccagctgagcgtggacagcctgctggagaaggacaacgaccacagcagacccgacatccaggtgcaggccaagagactggccgagaagctgagatgcgacaccgtggtgagcgagatcagcaccggccagagaaccgtgaacttcaagatcaacagagagctgctgaccaagaccgtgctgcagcaggtgatcgaggacggcagcaagtacggcctgaagagcgagctgttcagcggcctgccccagaagaagatcgtggtggagttcagcagccccaacgtggccaagaagttccacgtgggccacctgagaagcaccatcatcggcaacttcatcgccaacctgaaggaggccctgggccaccaggtgatcagaatcaactacctgggcgactggggcatgcagttctag

SEQ ID NO: 330620 - protein, 297 aa, Artificial Sequence
  derived and/or modified sequence
MNFRQLLLHLPRYLGASGSPRRLWWSPSLDTISSVGSWRGRSSKSPAHWNQVVSEAEKIVGYPTSFMSLRCLLSDELSNIAMQVRKLVGTQHPLLTTARGLVHDSWNSLQLRGLVVLLISKAAGPSSVNTSCQNYDMVSGIYSCQRSLAEITELIHIALLVHRGIVNLNELQSSDGPLKDMQFGNKIAILSGDFLLANACNGLALLQNTKVVELLASALMDLVQGVYHENSTSKAQEKGRLDYAKLRERIKAGKGVTSAIDLCRYHGNKALEALESFPPSEARSALENIVFAVTRFS

SEQ ID NO: 330621 - DNA, 894 bp, Artificial Sequence
  derived and/or modified sequence
atgaattttcggcagctcttgttgcaccttccccgatatcttggggcatcaggttccccaagacggctgtggtggagcccaagcctagacaccatcagctctgtgggatcgtggagaggtaggagctccaagagccctgctcactggaaccaagtggtgagcgaggctgaaaaaatcgtggggtatccaactagctttatgtctcttcgttgcttgctgtcagatgaactgtctaatattgccatgcaagtccggaaactcgtgggaacacagcatccactgttgacaactgcccgcggattggtgcatgacagttggaattccctccagctgaggggtctggtggtccttttaatatcgaaggccgccggaccaagctcggtcaacacaagttgtcagaactacgatatggtgagcggtatctattcctgccaaagaagcctggccgagattacggagcttattcacatcgccctcttagtgcataggggaatagtaaatctaaacgagctgcaatccagcgatggccctctgaaggatatgcaattcggcaacaagatcgcaatcctgtcaggagatttccttctggccaacgcttgcaacggccttgctctgttgcagaatacaaaagtagtcgagctgctcgccagcgccctcatggatcttgtccagggagtataccacgaaaattctactagcaaagcacaagagaaaggaaggttagactatgcaaagttgcgcgagcgaatcaaagcgggaaagggcgtaacatccgccatcgacctgtgtcgttaccacgggaacaaggccctggaggctctagagtcatttccaccgagcgaagctcgctcggctttagagaacatcgtgttcgctgtcacgaggttctcctag

SEQ ID NO: 330622 - DNA, 894 bp, Artificial Sequence
  derived and/or modified sequence
atgaacttccggcagctgctgctgcacctgccccgctacctgggcgccagcggcagcccccggcggctgtggtggagccccagcctggacaccatcagctctgtgggctcctggaggggccgcagcagcaagagccctgcccactggaaccaggtggtgtctgaggccgagaagatcgtgggctaccccaccagcttcatgagcctgcgctgcctgctgagtgatgagctgagcaacatcgccatgcaggtgaggaagctggtgggcacccagcaccccctgctgaccacagcccggggcctggtgcatgacagctggaacagcctgcagctgcggggcctggtggtgctgctgatcagcaaggctgctggccccagctctgtgaacaccagctgccagaactatgacatggtgtctggcatctacagctgccagaggagcctggccgagatcacagagctgatccacatcgccctgctggtgcaccggggcatcgtgaacctgaatgagctgcagagcagtgatggccccctgaaggacatgcagtttggaaacaagatcgccatcctgagcggggacttcctgctggccaatgcctgcaatggcctggccctgctgcagaacaccaaggtggtggagctgctggccagcgccctgatggacctggtgcagggcgtgtaccacgagaacagcaccagcaaggcccaggagaagggccgcctggactatgccaagctgcgggagcgcatcaaggccggcaagggcgtgaccagcgccatcgacctgtgccgctaccacggcaacaaggccctggaggccctggagagcttcccccccagcgaggcccggagcgccctggagaacatcgtgtttgctgtgacccgcttctcctag

SEQ ID NO: 330623 - DNA, 894 bp, Artificial Sequence
  derived and/or modified sequence
atgaacttccggcagctgctgctgcacctgccccggtacctgggcgcttccggttcaccacggcgcctgtggtggtcaccctccctcgacacaatcagttctgtggggagttggcggggaagatcttccaagtcccctgcccattggaaccaggttgtgtctgaggccgagaagattgttggttatccaactagctttatgtcactgcgctgcttgctctccgatgaactgtctaatatagcaatgcaggtgagaaagttggtgggaacacagcaccctcttttaaccaccgcacgtggcttggtccacgacagctggaactcactgcagctgcgcggactcgtggtcttactgatttccaaagctgccggacctagcagcgtgaacacttcttgccagaactacgatatggtgagtggaatttacagctgtcagagatcactggctgaaatcacagagctgattcacatagccttgctggtgcacagaggaatcgtaaacttgaatgagctccaaagctctgatgggccactcaaagacatgcaatttggcaacaagattgccattctgtctggtgacttcttgcttgccaatgcctgcaacggcctcgcacttctgcagaacaccaaagttgtcgagctcctggcctctgctcttatggatttggtgcagggcgtatatcatgagaacagcaccagcaaggcccaagagaaaggccgactggactacgccaaacttcgtgaacggataaaagctgggaagggtgtcacaagcgcaattgatctgtgtcggtaccacggcaataaagccctcgaggcactggagagctttccccccagcgaagctagaagcgcccttgagaacattgtgttcgccgttactcgattttcctag

SEQ ID NO: 330624 - DNA, 1338 bp, Artificial Sequence
  derived and/or modified sequence
aatatggcgtcctccacataggcagtggctgtggtttctaccccgggtggccgggggcagtgctgagctgggactgttgtttgcccagcctgggctgcagaaagcagcagttaaagttcgtttctggtcactgctccaggaagccaccttactctgagggtcaagaattgccgcttccttttagttactgtaagttcctcctctgcccctggtttgtttcccgcggcacttctggatacccccaggtcccagacccttccagactcaaaccatgaactttcggcagctgctgttgcacttgccacgttatcttggagcctcgggttccccgcgtcgcctgtggtggtccccgtccctcgacaccatctcctcggtgggctcttggcgtggtcggtcctccaagtccccggcccactggaatcaggtagtgtcagaggcggagaagatcgtggggtaccccacgtccttcatgagccttcgctgcctgctgagcgacgagctcagcaacatcgctatgcaggtgcggaagctggtgggcactcagcaccctctgcttaccacagccagggggcttgtacatgacagctggaatagcctccagttgaggggcttggtggtgctccttatctctaaagcagctgggcccagcagcgtgaacacttcatgtcagaactatgacatggtcagtgggatctactcatgtcaaagaagtttggcagagatcacggagctaattcatattgctctccttgtacatcgtgggatagtaaatttaaatgagttgcaatcatctgatggtccactgaaagacatgcaatttggaaataaaattgctatcctgagtggagactttcttctagcaaatgcctgcaatggactagctctgctacagaacaccaaggttgtggaacttttagcaagtgctcttatggacttggtacaaggagtatatcatgaaaattctacttcaaaggctcaagaaaaaggaagattggactatgctaagttgcgagaaagaatcaaagctggcaaaggtgtgacttcagctattgacctgtgtcgttaccatggaaacaaggcactggaggccctggagagctttcctccctcggaggccagatctgctttagaaaacattgtgtttgctgtgaccagattttcatgacatcaaattaaaaagacactattgttagttagctgaaaatcctagggaatgaggttgattgggagcgctttcacgatgcgttaatgacttttaaaacatatgcatttttccttccttttatcacattgctaaatgagttctgctttctttttggaactgctacaaacaaaatt

SEQ ID NO: 330625 - DNA, 894 bp, Artificial Sequence
  derived and/or modified sequence
atgaactttcgccagctgctcctccatctgccaagatacctaggggcatcaggctcaccgcgacggctatggtggtcaccgtctctggataccatctcctcagttgggtcctggcgaggtcgcagcagtaagtcccctgcacactggaatcaagtggtgtcagaggccgagaaaatagtgggatacccaacctcgttcatgtccctgcggtgtctgctgagcgatgaactgagcaacatcgcaatgcaagtacgaaagctcgttggcacccagcacccccttctgacaaccgccagaggcctggtgcatgacagttggaactcccttcaacttcggggactggttgtgttgttgatcagcaaagcagctggaccgtccagcgtgaacaccagctgccaaaactacgatatggtgagtgggatctacagctgccagagatctttggccgaaataacagagctaatacacattgcccttctcgttcacagggggatcgttaatctgaatgagctgcagtcctctgacgggcctctgaaggatatgcagttcggtaataaaatcgctatcctgtccggtgattttctcctggcaaacgcttgcaacgggctggcccttctacaaaacactaaagtggtggagctattagcatctgctctgatggacctcgttcaaggtgtctaccatgagaactcgacctctaaagcgcaggagaagggcagacttgactatgctaagctgcgcgagaggattaaggccggaaagggagttactagcgccatcgatctatgccgttaccacggtaataaggcacttgaagctttagaatcctttccaccaagtgaagccaggagcgctttagagaatattgtgttcgcagttactcggttttcctag

SEQ ID NO: 330626 - DNA, 894 bp, Artificial Sequence
  derived and/or modified sequence
atgaacttcagacagctgctgctgcacctgcccagatacctgggcgccagcggcagccccagaagactgtggtggagccccagcctggacaccatcagcagcgtgggcagctggagaggcagaagcagcaagagccccgcccactggaaccaggtggtgagcgaggccgagaagatcgtgggctaccccaccagcttcatgagcctgagatgcctgctgagcgacgagctgagcaacatcgccatgcaggtgagaaagctggtgggcacccagcaccccctgctgaccaccgccagaggcctggtgcacgacagctggaacagcctgcagctgagaggcctggtggtgctgctgatcagcaaggccgccggccccagcagcgtgaacaccagctgccagaactacgacatggtgagcggcatctacagctgccagagaagcctggccgagatcaccgagctgatccacatcgccctgctggtgcacagaggcatcgtgaacctgaacgagctgcagagcagcgacggccccctgaaggacatgcagttcggcaacaagatcgccatcctgagcggcgacttcctgctggccaacgcctgcaacggcctggccctgctgcagaacaccaaggtggtggagctgctggccagcgccctgatggacctggtgcagggcgtgtaccacgagaacagcaccagcaaggcccaggagaagggcagactggactacgccaagctgagagagagaatcaaggccggcaagggcgtgaccagcgccatcgacctgtgcagataccacggcaacaaggccctggaggccctggagagcttcccccccagcgaggccagaagcgccctggagaacatcgtgttcgccgtgaccagattcagctag

SEQ ID NO: 330627 - protein, 89 aa, Artificial Sequence
  derived and/or modified sequence
MELAKHDAEVQNMAFQYGKHMAMSHKINSDVQPFIKEKTSDSMTFNLNSAPVVLHQEFLGRDLWIKQIGESSSTEVQLSNFQQMLLSTL

SEQ ID NO: 330628 - protein, 80 aa, Artificial Sequence
  derived and/or modified sequence
VQNMAFQYGKHMAMSHKINSDVQPFIKEKTSDSMTFNLNSAPVVLHQEFLGRDLWIKQIGESSSTEVQLSNFQQMLLSTL

SEQ ID NO: 330629 - DNA, 270 bp, Artificial Sequence
  derived and/or modified sequence
atggagttggcaaagcatgatgccgaagtccagaacatggcgttccaatatggcaagcatatggcaatgtcacataaaatcaatagcgatgtgcagccattcatcaaggagaaaacatctgattccatgacgtttaacctgaattctgcccctgtcgtcttgcatcaggaattccttggccgtgatctgtggattaagcagataggggagagcagctctacagaagttcaactcagtaatttccagcaaatgctgctcagcacactgtag

SEQ ID NO: 330630 - DNA, 243 bp, Artificial Sequence
  derived and/or modified sequence
gtccagaatatggcctttcagtacggaaaacatatggcaatgagccacaagattaacagcgacgtgcagcccttcattaaggagaaaacaagtgacagtatgacctttaacctgaactcggcacctgttgttctacaccaggagttccttggcagggatctgtggatcaagcagataggtgagtcttcatccactgaggtacaactctcaaacttccaacagatgctcttgtccactctgtag

SEQ ID NO: 330631 - DNA, 270 bp, Artificial Sequence
  derived and/or modified sequence
atggagctggccaagcatgatgctgaggtgcagaacatggccttccagtatggcaagcacatggccatgagccacaagatcaacagtgatgtgcagcccttcatcaaggagaagaccagtgacagcatgaccttcaacctgaacagcgcccctgtggtgctgcaccaggagttcctgggccgggacctgtggatcaagcagatcggggagagcagcagcacagaggtgcagctgagcaacttccagcagatgctgctgagcaccctgtag

SEQ ID NO: 330632 - DNA, 243 bp, Artificial Sequence
  derived and/or modified sequence
gtgcagaacatggccttccagtatggcaagcacatggccatgagccacaagatcaacagtgatgtgcagcccttcatcaaggagaagaccagtgacagcatgaccttcaacctgaacagcgcccctgtggtgctgcaccaggagttcctgggccgggacctgtggatcaagcagattggagagagcagcagcacagaggtgcagctgagcaacttccagcagatgctgctgagcaccctgtag

SEQ ID NO: 330633 - DNA, 270 bp, Artificial Sequence
  derived and/or modified sequence
atggagctggccaagcacgacgccgaggtgcagaacatggccttccagtacggtaagcacatggctatgtcacacaaaatcaactccgacgtgcagcccttcatcaaggaaaaaaccagtgactctatgaccttcaacttgaacagcgcacccgtggtcctccaccaggagttcctggggagagacctctggattaagcagataggcgagtcaagcagtacagaagtccaactgagtaatttccagcagatgctgcttagtaccctgtag

SEQ ID NO: 330634 - DNA, 243 bp, Artificial Sequence
  derived and/or modified sequence
gtgcagaacatggccttccagtacggcaagcacatggccatgagccataaaattaattcggacgtgcagcctttcataaaggaaaagacgtctgacagcatgacattcaacctaaactccgcccctgtcgttctgcaccaggagtttctggggagggacctgtggatcaagcaaattggtgagtcctctagtacagaggttcagctgtccaatttccaacagatgcttctgtctacactgtag

SEQ ID NO: 330635 - DNA, 241 bp, Artificial Sequence
  derived and/or modified sequence
gttcagaatatggcatttcagtatgggaagcacatggccatgagtcataagataaattctgatgtccagccttttattaaagaaaagaccagtgactccatgacttttaatctaaactcagctcctgtagtcttacatcaggaatttcttggaagagatttgtggattaaacagatcggagagtcttcaagtacagaagttcaactttctaactttcaacaaatgctactttcaacactct

SEQ ID NO: 330636 - DNA, 270 bp, Artificial Sequence
  derived and/or modified sequence
atggaacttgccaaacacgatgcggaggttcaaaatatggcctttcaatacggaaagcatatggctatgtcccacaaaataaactcggacgtgcagccatttattaaggaaaaaacatcagacagcatgactttcaacctgaattccgcacctgtggtgctccaccaggaattcctcgggagggatctttggattaaacagatcggggaaagctcctcaaccgaagtgcaacttagcaacttccagcagatgctgctgtcaacactgtag

SEQ ID NO: 330637 - DNA, 243 bp, Artificial Sequence
  derived and/or modified sequence
gtgcagaacatggcattccagtacggcaaacatatggccatgtcccacaaaattaattctgatgtccagcccttcatcaaagagaaaaccagtgattccatgacttttaacctaaacagtgccccagtagtgttgcatcaggaatttttggggagggacctctggataaaacagattggtgaaagctctagtactgaggtgcagctttctaactttcagcagatgttactctccacactgtag

SEQ ID NO: 330638 - DNA, 270 bp, Artificial Sequence
  derived and/or modified sequence
atggagctggccaagcacgacgccgaggtgcagaacatggccttccagtacggcaagcacatggccatgagccacaagatcaacagcgacgtgcagcccttcatcaaggagaagaccagcgacagcatgaccttcaacctgaacagcgcccccgtggtgctgcaccaggagttcctgggcagagacctgtggatcaagcagatcggcgagagcagcagcaccgaggtgcagctgagcaacttccagcagatgctgctgagcaccctgtag

SEQ ID NO: 330639 - DNA, 243 bp, Artificial Sequence
  derived and/or modified sequence
gtgcagaacatggccttccagtacggcaagcacatggccatgagccacaagatcaacagcgacgtgcagcccttcatcaaggagaagaccagcgacagcatgaccttcaacctgaacagcgcccccgtggtgctgcaccaggagttcctgggcagagacctgtggatcaagcagatcggcgagagcagcagcaccgaggtgcagctgagcaacttccagcagatgctgctgagcaccctgtag

SEQ ID NO: 330640 - protein, 240 aa, Artificial Sequence
  derived and/or modified sequence
MNFRQLLLHLPRYLGASGSPRRLWWSPSLDTISSVGSWRGRSSKSPAHWNQVVSEAEKIVGYPTSFMSLRCLLSDELSNIAMQVRKLVGTQHPLLTTARGLVHDSWNSLQLRGLVVLLISKAAGPSSVNTSCQNYDMVSGIYSCQRSLAEITELIHIALLVHRGIVNLNELQSSDGPLKDMQFGNKIAILSGDFLLANACNGLALLQNTKSFSFNGPIAIYQMGDCESAWILSKHPRALS

SEQ ID NO: 330641 - DNA, 723 bp, Artificial Sequence
  derived and/or modified sequence
atgaattttcggcaactcctgttgcatctgcctcgctatttgggtgcaagcggttcgccgcggagactctggtggagtcccagcctggataccataagcagtgtgggctcgtggcgagggcggtcgtcaaaatccccggcgcattggaatcaggtggtctccgaagcagagaagatcgtggggtaccccacctcctttatgtccctacgctgcctgctctcagatgagctgagcaacatcgcgatgcaggtgaggaagctagtcggtactcagcatccactcttgactactgctagagggctagtgcatgatagctggaattcacttcaactaagaggcctagtggttcttctcatctctaaggccgcgggccctagctctgtcaacacttcttgtcaaaactacgacatggtaagtggcatttattcttgccagaggagcctcgcagagatcaccgagctgatccacatagccttactggtacatcgaggaattgtaaaccttaacgagctgcagtcttcggatggcccccttaaggatatgcagttcggcaataagatcgcaattctgagtggagactttctgctggcaaatgcatgcaacggactcgctctattacaaaacaccaaatcctttagcttcaatggtcccattgccatttaccaaatgggggactgcgagagcgcatggattctatccaagcacccccgcgccctttcttag

SEQ ID NO: 330642 - DNA, 723 bp, Artificial Sequence
  derived and/or modified sequence
atgaacttccggcagctgctgctgcacctgccccgctacctgggcgccagcggcagcccccggcggctgtggtggagccccagcctggacaccatcagctctgtgggctcctggaggggccgcagcagcaagagccctgcccactggaaccaggtggtgtctgaggccgagaagatcgtgggctaccccaccagcttcatgagcctgcgctgcctgctgagtgatgagctgagcaacatcgccatgcaggtgaggaagctggtgggcacccagcaccccctgctgaccacagcccggggcctggtgcatgacagctggaacagcctgcagctgcggggcctggtggtgctgctgatcagcaaggctgctggccccagctctgtgaacaccagctgccagaactatgacatggtgtctggcatctacagctgccagaggagcctggccgagatcacagagctgatccacatcgccctgctggtgcaccggggcatcgtgaacctgaatgagctgcagagcagtgatggccccctgaaggacatgcagtttggaaacaagatcgccatcctgagcggggacttcctgctggccaatgcctgcaatggcctggccctgctgcagaacaccaagagcttctccttcaacggccccatcgccatctaccagatgggagactgtgagagcgcctggatcctgagcaagcacccccgggccctgtcctag

SEQ ID NO: 330643 - DNA, 723 bp, Artificial Sequence
  derived and/or modified sequence
atgaacttccggcagctgctgctgcacctgccccggtacctgggcgcctcaggctccccccgaagactgtggtggagcccttccctcgatactatatcctccgtaggctcctggagaggcaggtcttccaagtcccctgctcattggaatcaagttgtgtctgaagccgaaaagatcgttgggtaccccacgtccttcatgagtctgcggtgccttctgagcgacgaactgtctaacatcgccatgcaagtccggaaactggtgggaacccagcatccattgctcacaacagcccgaggcctggtacacgactcttggaattccctccaattgcgtggactggttgtgctgctgatttccaaagcggcgggtccttccagcgtgaacacctcttgtcaaaactatgatatggtgagcggcatctacagctgccagagaagcttggccgagattaccgaactgattcacatcgcactgctcgtgcaccgaggtatagtgaatctgaacgagttacagagctctgacggcccgctgaaagatatgcagttcgggaataagattgctatcctttctggagattttctgcttgctaacgcctgcaacgggttggcacttctccagaacactaaatcattttcattcaatggccctatagcaatttatcagatgggggactgtgagtcagcctggattctcagcaaacatccccgagccctgtcatag

SEQ ID NO: 330644 - DNA, 1236 bp, Artificial Sequence
  derived and/or modified sequence
atgcctccaatatggcgtcctccacataggcagtggctgtggtttctaccccgggtggccgggggcagtgctgagctgggactgttgtttgcccagcctgggctgcagaaagcagcagttaaagttcgtttctggtcactgctccaggaagccaccttactctgagggtcaagaattgccgcttccttttagttactgtaagttcctcctctgcccctggtttgtttcccgcggcacttctggatacccccaggtcccagacccttccagactcaaaccatgaactttcggcagctgctgttgcacttgccacgttatcttggagcctcgggttccccgcgtcgcctgtggtggtccccgtccctcgacaccatctcctcggtgggctcttggcgtggtcggtcctccaagtccccggcccactggaatcaggtagtgtcagaggcggagaagatcgtggggtaccccacgtccttcatgagccttcgctgcctgctgagcgacgagctcagcaacatcgctatgcaggtgcggaagctggtgggcactcagcaccctctgcttaccacagccagggggcttgtacatgacagctggaatagcctccagttgaggggcttggtggtgctccttatctctaaagcagctgggcccagcagcgtgaacacttcatgtcagaactatgacatggtcagtgggatctactcatgtcaaagaagtttggcagagatcacggagctaattcatattgctctccttgtacatcgtgggatagtaaatttaaatgagttgcaatcatctgatggtccactgaaagacatgcaatttggaaataaaattgctatcctgagtggagactttcttctagcaaatgcctgcaatggactagctctgctacagaacaccaagtcattttcatttaatggacctattgctatatatcagatgggagactgtgagtcagcctggatcttgtctaaacacccaagagcattgtcatgatgtcactcctggaggttgttctattaagcattagtgatttatacttccggataaccagtggcacagatgtactctttacatagctgatgtatttccttatgttaactttgttttcctaaaggcgtaaatatgttgtttaaaatgaagtattttgtttgtacaaatatgctcaatttatgcatataaatctccctttacaccatctatatagtttaataaagatgctattgtcta

SEQ ID NO: 330645 - DNA, 723 bp, Artificial Sequence
  derived and/or modified sequence
atgaatttccgtcagctgttactgcacttgcctcgatatctgggtgcatcaggctcgccaagacgtctttggtggtcacctagcctagatacaatatcaagcgtcggatcatggcgcggtcggtcgtcaaagagccccgcacattggaatcaggtggtgagtgaagcggaaaagattgtgggatacccaaccagcttcatgtcccttcgttgtttactgagtgatgaactctctaatatcgctatgcaagtccgtaaactggtgggcacccaacaccctctgttgacaactgcacgcggactggtgcacgacagttggaactccctgcagctcaggggcttagtggtccttctgatctccaaggccgctggcccaagcagcgtgaacacgagttgccagaactatgacatggtgagcggaatctatagctgtcagaggtcactcgccgaaattaccgaactgatccatatcgcactgctagtacataggggtatcgtgaatctgaatgaactgcagagctcagacggcccactgaaggacatgcagtttggcaataagatcgccatccttagcggcgattttctgttggccaacgcgtgtaacggtctggccctgctacaaaatactaaaagcttttctttcaatgggccaattgctatttaccagatgggcgactgcgaaagcgcctggatccttagcaaacatccccgagccttatcgtag

SEQ ID NO: 330646 - DNA, 723 bp, Artificial Sequence
  derived and/or modified sequence
atgaacttcagacagctgctgctgcacctgcccagatacctgggcgccagcggcagccccagaagactgtggtggagccccagcctggacaccatcagcagcgtgggcagctggagaggcagaagcagcaagagccccgcccactggaaccaggtggtgagcgaggccgagaagatcgtgggctaccccaccagcttcatgagcctgagatgcctgctgagcgacgagctgagcaacatcgccatgcaggtgagaaagctggtgggcacccagcaccccctgctgaccaccgccagaggcctggtgcacgacagctggaacagcctgcagctgagaggcctggtggtgctgctgatcagcaaggccgccggccccagcagcgtgaacaccagctgccagaactacgacatggtgagcggcatctacagctgccagagaagcctggccgagatcaccgagctgatccacatcgccctgctggtgcacagaggcatcgtgaacctgaacgagctgcagagcagcgacggccccctgaaggacatgcagttcggcaacaagatcgccatcctgagcggcgacttcctgctggccaacgcctgcaacggcctggccctgctgcagaacaccaagagcttcagcttcaacggccccatcgccatctaccagatgggcgactgcgagagcgcctggatcctgagcaagcaccccagagccctgagctag

SEQ ID NO: 330647 - protein, 348 aa, Artificial Sequence
  derived and/or modified sequence
MEDDSPVEAVSTPNTPRNLAAWKISIPYVDFFEDPSSERKEKKERIPVFCIDVERNDRRAVGHEPEHWSVYRRYLEFYVLESKLTEFHGAFPDAQLPSKRIIGPKNYEFLKSKREEFQEYLQKLLQHPELSNSQLLADFLSPNGGETQFLDKILPDVNLGKIIKSVPGKLMKEKGQHLEPFIMNFINSCESPKPKPSRPELTILSPTSENNKKLFNDLFKNNANRAENTERKQNQNYFMEVMTVEGVYDYLMYVDAIFCENTEPRSLQDKQKGAKQTFEEMMNYIPDLLVKCIGEETKYESIRLLFDGLQQPVLNKQLTYVLLDIVIQELFPELNKVQKEVTSVTSWM

SEQ ID NO: 330648 - DNA, 1047 bp, Artificial Sequence
  derived and/or modified sequence
atggaggacgacagccccgtggaggccgtgagcacccccaacacccccagaaacctggccgcctggaagatcagcatcccctacgtggacttcttcgaggaccccagcagcgagagaaaggagaagaaggagagaatccccgtgttctgcatcgacgtggagagaaacgacagaagagccgtgggccacgagcccgagcactggagcgtgtacagaagatacctggagttctacgtgctggagagcaagctgaccgagttccacggcgccttccccgacgcccagctgcccagcaagagaatcatcggccccaagaactacgagttcctgaagagcaagagagaggagttccaggagtacctgcagaagctgctgcagcaccccgagctgagcaacagccagctgctggccgacttcctgagccccaacggcggcgagacccagttcctggacaagatcctgcccgacgtgaacctgggcaagatcatcaagagcgtgcccggcaagctgatgaaggagaagggccagcacctggagcccttcatcatgaacttcatcaacagctgcgagagccccaagcccaagcccagcagacccgagctgaccatcctgagccccaccagcgagaacaacaagaagctgttcaacgacctgttcaagaacaacgccaacagagccgagaacaccgagagaaagcagaaccagaactacttcatggaggtgatgaccgtggagggcgtgtacgactacctgatgtacgtggacgccatcttctgcgagaacaccgagcccagaagcctgcaggacaagcagaagggcgccaagcagaccttcgaggagatgatgaactacatccccgacctgctggtgaagtgcatcggcgaggagaccaagtacgagagcatcagactgctgttcgacggcctgcagcagcccgtgctgaacaagcagctgacctacgtgctgctggacatcgtgatccaggagctgttccccgagctgaacaaggtgcagaaggaggtgaccagcgtgaccagctggatgtag

SEQ ID NO: 330649 - DNA, 1047 bp, Artificial Sequence
  derived and/or modified sequence
atggaagacgactctcccgtggaggcagtgtcaaccccaaacactccgaggaatctggccgcatggaagatttccattccatatgtggacttcttcgaggaccccagctctgaacggaaagagaaaaaggagcggatccctgtgttttgtatcgatgtcgaacgcaatgatcgtagggcagtcgggcatgagcctgaacactggtccgtgtatcgacgatacctggagttttacgttctggagtctaagcttaccgaattccatggagctttcccagatgcacagcttccgtcgaagcggatcattggtcccaaaaactacgagttcctaaaatcaaagagagaagaattccaagagtacctgcaaaagttgcttcagcaccctgagctgtccaattcccagttactggctgattttctcagtccaaacggtggagagacgcagtttctggataaaatcctgcctgatgtgaacttggggaaaattatcaagtccgtgcctggtaagctgatgaaagagaagggtcagcacctcgaacccttcataatgaacttcatcaacagctgtgagagtccgaagccaaaaccctctcgcccagagctcaccatcctgtcccctactagcgagaacaacaagaaactgttcaatgacctcttcaaaaataacgctaacagggccgagaacaccgagagaaagcagaaccagaactatttcatggaagtgatgacagtggagggggtctacgactaccttatgtacgtcgatgctattttctgtgagaatacggaaccgcgctcccttcaggacaagcagaagggcgcaaagcagacgttcgaagagatgatgaactacatcccagacttgctggttaaatgcatcggagaagagacaaagtatgaatccataagacttctgttcgatggcctccagcaacccgtgcttaataaacagctgacttatgtgctgctggacattgtcatccaagagctgttccctgaacttaataaggtccagaaggaagtcacttcagtgacatcttggatgtag

SEQ ID NO: 330650 - DNA, 1047 bp, Artificial Sequence
  derived and/or modified sequence
atggaggatgacagccctgtggaggccgtgtccacccccaacaccccaagaaacctggccgcctggaagatcagcatcccctacgtggacttctttgaggaccccagcagcgagaggaaggagaagaaggagcgcatccctgtgttctgcattgatgtggagagaaatgaccggcgggctgtgggccacgagcctgagcactggagcgtgtaccgccgctacctggagttctacgtgctggagagcaagctgacagagttccacggggccttcccagatgcccagctgcccagcaagaggatcatcggccccaagaactatgagttcctgaagagcaagcgggaggagttccaggagtacctgcagaagctgctgcagcaccctgagctgagcaacagccagctgctggccgacttcctgagccccaatggaggagagacccagttcctggacaagatcctgcctgatgtgaacctgggcaagatcatcaagtctgtgcctgggaagctgatgaaggagaagggccagcacctggagcccttcatcatgaacttcatcaacagctgtgagagccccaagcccaagcccagcaggcctgagctgaccatcctgagccccaccagcgagaacaacaagaagctgttcaatgacctcttcaagaacaatgccaacagagcagaaaatacagagaggaagcagaaccagaactacttcatggaggtgatgacagtggagggcgtgtatgactacctgatgtatgtggatgccatcttctgtgagaacacagagcccaggagcctgcaggacaagcagaagggggccaagcagacctttgaggagatgatgaactacatcccagacctgctggtgaagtgcattggagaggagaccaagtatgagagcatccggctgctgtttgatggcctgcagcagcctgtgctgaacaagcagctgacctacgtgctgctggacatcgtcatccaggagctgtttcctgagctgaacaaggtgcagaaggaggtgacctctgtgacctcctggatgtag

SEQ ID NO: 330651 - DNA, 1047 bp, Artificial Sequence
  derived and/or modified sequence
atggaggacgacagccccgtggaggccgtgagcacccccaacaccccaaggaacttggccgcgtggaagatctcaatcccatacgtggatttctttgaagaccccagttccgaaagaaaggaaaagaaagagaggatccctgtgttctgcattgacgtggagagaaatgatcggagggctgtggggcacgagccagaacactggtcagtgtacagacgctacctcgagttctatgtgctggagtctaaattaaccgaattccatggcgcttttcctgacgcacagctcccaagtaagagaattataggccccaaaaattatgagtttcttaagtccaagcgtgaagaatttcaggagtatttacagaaactgctgcaacatccggaactgtccaattctcaacttttggccgattttctcagtcccaatggcggcgaaactcagtttctcgacaagattctaccagacgtaaatcttgggaagattattaagagtgtgcctggcaagctgatgaaggagaaggggcaacacctcgagccttttatcatgaatttcatcaattcttgcgagtcccctaaaccgaaaccgtcacgccccgaactcacaatcctttctcccacatcagaaaataataaaaaattgttcaacgatctgttcaagaataacgccaatagggccgagaatacggaacggaaacagaatcagaactactttatggaggtcatgaccgttgagggggtttacgactatttaatgtatgtggacgctattttttgcgagaacaccgaaccccgctcactgcaggacaaacaaaagggggctaagcagaccttcgaagagatgatgaattacatccccgatctgctcgtgaaatgcatcggcgaggagaccaaatacgagagcattaggcttctcttcgatgggttgcagcagcctgtcctcaataagcagctgacgtacgtcctcctggatatcgtgattcaagagctctttcctgagctcaacaaagtgcagaaggaggtaactagcgtcacttcatggatgtag

SEQ ID NO: 330652 - DNA, 1047 bp, Artificial Sequence
  derived and/or modified sequence
atggaggacgacagcccggtagaagcagtctcaactcctaacacgcccagaaaccttgctgcctggaagattagcattccgtatgtagatttcttcgaggaccctagctcggaacgcaaggaaaagaaagagcggatccctgtgttctgtatcgacgtggagcgtaacgatcggagggctgtggggcatgagcccgagcattggtccgtgtaccggcgatatctcgagttctacgtgcttgaaagcaaattgaccgagtttcacggcgcattcccggacgctcagcttccctctaaaagaataataggtcctaagaattatgagttcctgaagagtaagagggaggagttccaggaatacttgcaaaagcttctacagcatcccgagctgagtaactcacagctgttagccgatttcctcagccccaacgggggagagactcagttccttgataagattcttcccgatgttaatctgggaaaaattatcaagtcggtccctggaaaactgatgaaagaaaagggccaacacctcgagccttttattatgaattttattaacagctgtgagagtccaaaacctaaaccttctcgaccagagctgacgatcctctcgcccacatctgaaaataacaagaaactgttcaatgacttgtttaagaacaacgcaaaccgagctgaaaacacagaacggaagcagaaccagaactactttatggaagtgatgacagtcgaaggagtgtacgattatctcatgtatgtggacgcaatcttttgcgagaataccgaaccacggagccttcaagacaaacagaagggtgctaaacagacctttgaggagatgatgaactacatccctgatttgctggtcaagtgtattggagaagagaccaagtatgagagcattcggctgctgtttgacggactgcagcaacccgtgctgaacaagcagctgacatacgtactgttagacatcgtgatccaggagcttttccctgagctgaacaaggtccagaaagaggtgacaagcgtcacctcttggatgtag

SEQ ID NO: 330653 - protein, 1385 aa, Artificial Sequence
  derived and/or modified sequence
MELSDSDRPVSFGSTSSSASSRDSHGSFGSRMTLVSNSHMGLFNQDKEVGAIKLELIPARPFSSSELQRDNPATGQQNADEGSERPPRAQWRVDSNGAPKTIADSATSPKLLYVDRVVQEILETERTYVQDLKSIVEDYLDCIRDQTKLPLGTEERSALFGNIQDIYHFNSELLQDLENCENDPVAIAECFVSKSEEFHIYTQYCTNYPRSVAVLTECMRNKILAKFFRERQETLKHSLPLGSYLLKPVQRILKYHLLLHEIENHLDKDTEGYDVVLDAIDTMQRVAWHINDMKRKHEHAVRLQEIQSLLTNWKGPDLTSYGELVLEGTFRIQRAKNERTLFLFDKLLLITKKRDDTFTYKAHILCGNLMLVEVIPKEPLSFSVFHYKNPKLQHTVQAKSQQDKRLWVLHLKRLILENHAAKIPAKAKQAILEMDAIHHPGFCYSPEGGTKALFGSKEGSAPYRLRRKSEPSSRSHKVLKTSETAQDIQKVSREEGSPQLSSARPSPAQRNSQPSSSTMISVLRAGGALRNIWTDHQIRQALFPSRRSPQENEDDEDDYQMFVPSFSSSDLNSTRLCEDSTSSRPCSWHMGQMESTETSSSGHRIVRRASSAGESNTCPPEIGTSDRTRELQNSPKTEGQEEMTPFGSSIELTIDDIDHVYDNISYEDLKLMVAKREEAESTPSKSARDSVRPKSTPELAFTKRQAGHSKGSLYAQTDGTLSGGEASSQSTHELQAVEENIYDTIGLPDPPSLGFKCSSLKRAKRSTFLGLEADFVCCDSLRPFVSQDSLQLSEDEAPYHQATPDHGYLSLLYDSPSGNLSMPHKPVSDKLSEEVDEIWNDLENYIKKNEDKARDRLLAAFPVSKDDVPDRLHAESTPELSRDVGRSVSTLSLPESQALLTPVKSRAGRASRANCPFEEDLISKEGSFMSLNRLSLASEMPLMDNPYDLANSGLSQTDPENPDLGMEATDKTKSRVFMMARQYSQKIKKANQLLKVKSLELEQPPASQHQKSMHKDLAAILEEKKQGGPAIGARIAEYSQLYDQIVFRESPLKIQKDGWASPQESSLLRSVSPSQVHHGSGDWLLHSTYSNGELADFCLPPEQDLRSRYPTFEINTKSTPRQLSAACSVPSLQTSDPLPGSVQRCSVVVSQPNKENWCQDHLYNSLGRKGISAKSQPYHRSQSSSSVLINKSMDSINYPSDVGKQQLLSLHRSSRCESHQDLLPDIADSHQQGTEKLSDLTLQDSQKVVVVNRNLPLNAQIATQNYFSNFKETDGDEDDYVEIKSEEDESELELSHNRRRKSDSKFVDADFSDNVCSGNTLHSLNSPRTPKKPVNSKLGLSPYLTPYNDSDKLNDYLWRGPSPNQQNIVQSLREKFQCLSSSSFA

SEQ ID NO: 330654 - protein, 46 aa, Artificial Sequence
  derived and/or modified sequence
MELSDSDRPVSFGSTSSSASSRDSHGSFGSRMTLVSNSHMGLFNQD

SEQ ID NO: 330655 - protein, 952 aa, Artificial Sequence
  derived and/or modified sequence
MELSDSDRPVSFGSTSSSASSRDSHGSFGSRMTLVSNSHMGLFNQDKEVGAIKLELIPARPFSSSELQRDNPATGQQNADEGSERPPRAQWRVDSNGAPKTIADSATSPKLLYVDRVVQEILETERTYVQDLKSIVEDYLDCIRDQTKLPLGTEERSALFGNIQDIYHFNSELLQDLENCENDPVAIAECFVSKSEEFHIYTQYCTNYPRSVAVLTECMRNKILAKFFRERQETLKHSLPLGSYLLKPVQRILKYHLLLHEIENHLDKDTEGYDVVLDAIDTMQRVAWHINDMKRKHEHAVRLQEIQSLLTNWKGPDLTSYGELVLEGTFRIQRAKNERTLFLFDKLLLITKKRDDTFTYKAHILCGNLMLVEVIPKEPLSFSVFHYKNPKLQHTVQAKSQQDKRLWVLHLKRLILENHAAKIPAKAKQAILEMDAIHHPGFCYSPEGGTKALFGSKEGSAPYRLRRKSEPSSRSHKVLKTSETAQDIQKVSREEGSPQLSSARPSPAQRNSQPSSSTMISVLRAGGALRNIWTDHQIRQALFPSRRSPQENEDDEDDYQMFVPSFSSSDLNSTRLCEDSTSSRPCSWHMGQMESTETSSSGHRIVRRASSAGESNTCPPEIGTSDRTRELQNSPKTEGQEEMTPFGSSIELTIDDIDHVYDNISYEDLKLMVAKREEAESTPSKSARDSVRPKSTPELAFTKRQAGHSKGSLYAQTDGTLSGGEASSQSTHELQAVEENIYDTIGLPDPPSLGFKCSSLKRAKRSTFLGLEADFVCCDSLRPFVSQDSLQLSEDEAPYHQATPDHGYLSLLYDSPSGNLSMPHKPVSDKLSEEVDEIWNDLENYIKKNEDKARDRLLAAFPVSKDDVPDRLHAESTPELSRDVGRSVSTLSLPESQALLTPVKSRAGRASRANCPFEEDLISKEGSFMSLNRLSLASEMTLCQALCRDAAW

SEQ ID NO: 330656 - DNA, 7136 bp, Artificial Sequence
  derived and/or modified sequence
aatatttctacggaaggcgctgcacagactagcaaaggctgtttcttttacctgactgaggtcactgcatcagctgaaggcagacgatgtgcttaagcctgagtggagcagagatgggcaccagttgcgtcttgaagtgccatcagctgtaaccaaagttccacatcccaagacgacagccaggcgttcctgccctcaagaactgaagacaatggagctctctgatagtgaccgacccgtcagcttcggttccacatcatcctcggcctcttcccgcgacagccatggttccttcggcagcagaatgaccttagtttcaaatagccacatgggcttgtttaaccaggataaggaggtaggggccataaaactggagctgattcctgccaggccgttttccagcagcgagctgcagagggacaaccccgccacggggcaacagaacgcggatgagggcagcgaaaggccacccagagcgcagtggagagtggactcaaacggggcacccaagacgatcgcagactcggccacgagccccaagctcctctatgtggatagagttgttcaggaaattctggaaaccgaaaggacttatgtacaagatttaaaaagcatcgtagaggattaccttgactgcatcagggaccaaacaaaacttcccctggggaccgaagaaagatcagccctttttggaaacatacaggatatctaccacttcaatagtgaacttctgcaagatttggaaaactgtgaaaatgatcctgtggccatagcagagtgttttgtgtccaagagtgaagagttccacatttatacccagtattgcactaactatccaaggtccgtggctgtgctaacagagtgtatgaggaacaagatactggccaaattcttcagggagcgtcaggaaactctgaaacactcgctgcctctggggtcctatctcttgaaaccagttcagcggattctcaagtatcatctccttctgcatgaaatagaaaaccaccttgataaggacacagaaggctatgatgtggtgcttgatgctatagacacaatgcagcgagtcgcctggcatatcaatgacatgaagcggaaacacgagcacgcggtccggttacaggagatacagagtttgctcactaactggaaggggccagacctgaccagctacggggaactggtgcttgagggaaccttccgcatccagcgagccaagaatgagcggacgctcttcctcttcgacaagctgctgctcatcacgaagaagagagatgacacgtttacatacaaagctcacatcctgtgtggcaacctcatgcttgtggaggtgattccaaaagagccgctcagcttcagcgtcttccactacaagaatcccaagctgcagcacacagtccaggccaaatcccagcaagacaaacgcctctgggttctgcacctaaagagactgattctggagaaccatgcagccaagattccagctaaggccaagcaagcaatccttgaaatggatgccattcatcatccaggcttctgttacagtcctgagggagggacgaaagcactgttcggctctaaagaaggttctgctccatatcggctgagaagaaaatctgaaccttcctcacggtcacataaagttttgaagaccagtgaaacagcacaagacatccaaaaggtttctagagaggaaggatctccccagctgtcttcagcaaggccgtctcctgcccagagaaatagtcagcctagcagttctaccatgatcagcgtgcttcgagcgggtggagctctcagaaacatctggaccgatcaccagatcaggcaagccttgtttcccagccgacggtccccgcaggagaatgaggatgatgaagatgattatcagatgttcgtgccgtcattttcctcctcagatctgaactctaccagactatgtgaagatagcacttctagtcgcccttgcagctggcatatgggacagatggagtccacagagacctccagctctggtcacaggattgtcaggcgggccagcagtgctggggagagcaacacatgccctcctgaaataggaactagtgacagaactagggaactgcagaacagccccaaaacagaagggcaggaggagatgactccctttgggtcatccatagagttgactattgatgacatagaccatgtctatgataacatcagttatgaggacttaaaactaatggttgctaagcgggaagaagctgaatccactccctctaaatcagccagggactccgttcgccccaagagcaccccagagttagccttcacaaagaggcaagctggccacagtaagggctctctttacgcacaaacagatggcaccctctcaggtggagaggcatccagccaaagcacgcatgaactccaagcggttgaggagaacatctatgacaccatagggctcccagatcctccgtcgctgggttttaagtgcagcagcctaaagcgtgcaaagcggagcacctttttgggtctggaggccgacttcgtgtgctgtgacagcctgaggccatttgtttcccaagacagcctccagctcagtgaggacgaagccccttaccatcaggccactcccgatcatggttatctgagtttgctgtatgactctcccagtggtaacttgtctatgcctcataagcctgtatctgataaactgtccgaagaagtagatgaaatctggaatgacctggaaaattacatcaagaaaaatgaagacaaggccagagaccgtctcctggcagcgtttcctgtgagcaaggatgatgtgccagacaggctgcacgcagagagcacccctgagctgagccgggacgtggggcgctctgtgtccacgctgtccctgcctgagagccaggctctcctcacgcccgtgaagagcagggctggcagagccagccgcgccaactgcccctttgaggaagacctgatttctaaagaaggctcctttatgagccttaaccggctttctctggctagtgaaatgcccctcatggacaatccctacgacctggccaacagtggcctgtctcaaacagacccagaaaaccctgacctggggatggaggccacagataagacaaaaagcagggtgtttatgatggctcggcagtacagtcagaagattaagaaggcgaatcaacttttaaaagtgaaaagtctggagctggagcagccgccggccagtcagcatcagaaatccatgcacaaagacctggctgccatcttggaagagaagaagcaaggagggcccgccattggtgccaggattgctgagtattcccagttgtatgaccagattgtattcagagagtctcccttgaaaattcagaaggatggctgggccagccctcaagaatcctccctcctgaggtctgtgtcaccttcccaggtccaccatggtagtggagactggcttctgcattcaacctatagtaatggagagttagcagatttctgtctcccaccagagcaagacttgaggtcaagatatcccacgtttgagatcaatacaaaaagtactcccaggcaattgtccgcagcttgctctgtgccttctcttcaaacctctgaccctctgccaggctctgtgcagagatgcagcgtggtagtaagtcagcccaacaaagagaactggtgtcaggaccatctttacaactccttgggtcggaaagggatcagcgctaaatctcagccttatcacaggtcccagtcatcttcctccgtcttgatcaacaaatcaatggattccatcaactaccctagtgatgtgggaaagcagcagctgctgtctttacacagaagttcaaggtgtgagagtcaccaggacttgctgccagatattgctgactcgcatcaacagggcactgaaaaactctcagatctcacactccaagactcacagaaagttgtggtggtcaatagaaatttacccttaaatgcccaaattgcaacacagaattatttttccaatttcaaagagactgatggagatgaagatgactatgtggaaatcaagtcagaagaagatgagtcggagttggagctatctcacaatcgtagaaggaaatctgactcaaagtttgtggatgctgacttttctgataatgtctgcagcggcaacacattgcattctttgaatagtccgcgcactccaaaaaagccggttaacagcaaacttggcctttcaccatatctgacaccatataatgattctgacaaactgaatgactatctttggagggggccatctcccaatcaacaaaatattgtccagtctctaagggaaaaatttcagtgtctcagttcaagcagctttgcttaaggttcttcataataactgcttgaatcaacttcttattttgctcataaaacgttacagatactgatgaggtgttttatgtataccagattaaaacaattttgtaagaaccagaggtgtaaaatatactttcttttacagcacaacttttggaaatggctgacgatgcagcccggattgtactgtagcacatgttggcatcaacagtatattttctcatgctgagtgtcttcatgtttcatgtaagtcaatcttacttgaaagtttttagacttttaacacgatggccataacctgacaatagtgcccacaccttaagaaatgcaataatcctttcctgttatccagaaggcccaggtagttttatcctgtgactcaaaggcagcaaggagactttttcacattttaaaaggcaacgaaagctgttgaaagaattatgcttatatctcacattttggttatatttgtggtaacaccttaggataacgtaagccagagatctgtaaattggactgcagtctgaggtgcccattttagggtttttgtgctagtattcttttatgtcattttgatgcagaaattgtgtgactgttgaaaattaaaatgtagcgggacccattttctgtacgcagaaccctttacctgtattcctggacaaggcctagagaacgagctgctcatcatgtttctaatataatttctggggtgaaatgaatgatttccttactggcttagagaaaaccaaggtcaataaaatgcagattgacttaactattagaaaagatgggatgacttctgggaaccacttaactcttcaaatgactgttgaaagagaaaaagcaaaactgaaatcccaccagaccattttgtgtgcctgtttctaatcgatacaaagttaagcatgagctaaaatcagacaaagcactttaaatttatcctttccagagcgctttgcacatgcaccctcctgagtttgggattctgccaaatgaccaacttgatcctggccctgaggagtcattggctgcaggaatagggcaagaatctatttcctaaactacacataacatgggagcctttttttcgttgttttcaggtatattaaagaatgaaatctttggttactaggtgctgactaataaataacaccttttatattctgaccatttgtcacatttcattgtgatactgtatactgatctaactccttatgaaaggcaacaaacaaaaataagacattgaataaaaagcaaaatcaaagaagctaaagagaaaaatgaaggcagatatattgcaactttataacatattctattttattgaagactgcaattaatgcagcaagaatgctttctcaagcggtggcctttgtattctcattttaatcaggtgtacattctatggcctctcccccatgctgttagtttctattttaaaagatacaataatatatgtagggaaaggggcctgggctcttcatttaaaggtaagcagtaatattgagtaagtgacataattctttttctctttgttaagtcctatgcctctttttcttaactgtaaaacatagaatatgagcgtttttatcttacaaataggtacctaaggcatgtgattttatttttaaataacaaaaaataacccaagtttcttgcttctccaaagtattcttctcatagcttataaaagaaagtccacattgaatagcatggtctgggaacattccttctttattgtgtttatttgaacatgatatgagtttccaagatgaaatgatcaaaaaagataagtaccacaagaaagtttttttgtttggttggtttttttgtttgtttgtttttttcttgagactgagtctctccctgttgcccaagttggagtgcaatcttggctcactgcagcctccacctccccggttccagcgattctcctgcctcagcctcttgaatagctgggattacaggcgcccgccaccacacctggctaatttttgtgttgttagtagaggcggggtttcatcatgttggccaggctggtctcgaactcctgatctcatgatccgtctgcctcggcctcccagagtgctgggattacaggcatgagccactgcgcccggccaagaaagtatgtttttagaggtgtgtgtaagtgcatttgtattacctatgaacaaaattacctgactcttgtcccaggaaagctgtttcgcattttcgctttttgattggtattatccagttctatgtagttcatattattgttctgtctgactctcagaaattacttcttcacgccagtgtcttgttgcatgactttgatgtcacctataggaatacacctcactgcacgtaagtgggtatcttactgtataaaaggtctacatggctttaggttttaggacaaatgtgtagatttatagaccatttctgttggccaggacacagattttgagagctgtgtgtatatatatataatcatgtttgtatttttttcctgaaagttatcaattgcttttgtttaaaacagtttgttttagaggtggggtggggatgtatataacgaggaaaagttatatgtactttaaagtatgtcaagttcttactagtttcctgtactgaaggttcaattttttttatataagtttacttttcacctgctctattctttgtggggaaaaaatgcatctagaaaaacatagtttaaatactgtatataagataatgaaagttagtaacgtccattatttaataaagtttgtaaagtacaaggt

SEQ ID NO: 330657 - DNA, 7237 bp, Artificial Sequence
  derived and/or modified sequence
gaggaagaggaagtcggagcccgagcctgagcccgagcccgagcccgacggcggctgcagggcgctccggcagcccgagccggcgcagcgcagcccgcaccctccccgcccgacctgcgagcgccgcccgggcatgcgaagccgtccctccccgggtgaagactgatgagaagagtctgtgggtgaagacattgaaaaggtttcaactataaaaatgggcaccagttgcgtcttgaagtgccatcagctgtaaccaaagttccacatcccaagacgacagccaggcgttcctgccctcaagaactgaagacaatggagctctctgatagtgaccgacccgtcagcttcggttccacatcatcctcggcctcttcccgcgacagccatggttccttcggcagcagaatgaccttagtttcaaatagccacatgggcttgtttaaccaggataaggaggtaggggccataaaactggagctgattcctgccaggccgttttccagcagcgagctgcagagggacaaccccgccacggggcaacagaacgcggatgagggcagcgaaaggccacccagagcgcagtggagagtggactcaaacggggcacccaagacgatcgcagactcggccacgagccccaagctcctctatgtggatagagttgttcaggaaattctggaaaccgaaaggacttatgtacaagatttaaaaagcatcgtagaggattaccttgactgcatcagggaccaaacaaaacttcccctggggaccgaagaaagatcagccctttttggaaacatacaggatatctaccacttcaatagtgaacttctgcaagatttggaaaactgtgaaaatgatcctgtggccatagcagagtgttttgtgtccaagagtgaagagttccacatttatacccagtattgcactaactatccaaggtccgtggctgtgctaacagagtgtatgaggaacaagatactggccaaattcttcagggagcgtcaggaaactctgaaacactcgctgcctctggggtcctatctcttgaaaccagttcagcggattctcaagtatcatctccttctgcatgaaatagaaaaccaccttgataaggacacagaaggctatgatgtggtgcttgatgctatagacacaatgcagcgagtcgcctggcatatcaatgacatgaagcggaaacacgagcacgcggtccggttacaggagatacagagtttgctcactaactggaaggggccagacctgaccagctacggggaactggtgcttgagggaaccttccgcatccagcgagccaagaatgagcggacgctcttcctcttcgacaagctgctgctcatcacgaagaagagagatgacacgtttacatacaaagctcacatcctgtgtggcaacctcatgcttgtggaggtgattccaaaagagccgctcagcttcagcgtcttccactacaagaatcccaagctgcagcacacagtccaggccaaatcccagcaagacaaacgcctctgggttctgcacctaaagagactgattctggagaaccatgcagccaagattccagctaaggccaagcaagcaatccttgaaatggatgccattcatcatccaggcttctgttacagtcctgagggagggacgaaagcactgttcggctctaaagaaggttctgctccatatcggctgagaagaaaatctgaaccttcctcacggtcacataaagttttgaagaccagtgaaacagcacaagacatccaaaaggtttctagagaggaaggatctccccagctgtcttcagcaaggccgtctcctgcccagagaaatagtcagcctagcagttctaccatgatcagcgtgcttcgagcgggtggagctctcagaaacatctggaccgatcaccagatcaggcaagccttgtttcccagccgacggtccccgcaggagaatgaggatgatgaagatgattatcagatgttcgtgccgtcattttcctcctcagatctgaactctaccagactatgtgaagatagcacttctagtcgcccttgcagctggcatatgggacagatggagtccacagagacctccagctctggtcacaggattgtcaggcgggccagcagtgctggggagagcaacacatgccctcctgaaataggaactagtgacagaactagggaactgcagaacagccccaaaacagaagggcaggaggagatgactccctttgggtcatccatagagttgactattgatgacatagaccatgtctatgataacatcagttatgaggacttaaaactaatggttgctaagcgggaagaagctgaatccactccctctaaatcagccagggactccgttcgccccaagagcaccccagagttagccttcacaaagaggcaagctggccacagtaagggctctctttacgcacaaacagatggcaccctctcaggtggagaggcatccagccaaagcacgcatgaactccaagcggttgaggagaacatctatgacaccatagggctcccagatcctccgtcgctgggttttaagtgcagcagcctaaagcgtgcaaagcggagcacctttttgggtctggaggccgacttcgtgtgctgtgacagcctgaggccatttgtttcccaagacagcctccagctcagtgaggacgaagccccttaccatcaggccactcccgatcatggttatctgagtttgctgtatgactctcccagtggtaacttgtctatgcctcataagcctgtatctgataaactgtccgaagaagtagatgaaatctggaatgacctggaaaattacatcaagaaaaatgaagacaaggccagagaccgtctcctggcagcgtttcctgtgagcaaggatgatgtgccagacaggctgcacgcagagagcacccctgagctgagccgggacgtggggcgctctgtgtccacgctgtccctgcctgagagccaggctctcctcacgcccgtgaagagcagggctggcagagccagccgcgccaactgcccctttgaggaagacctgatttctaaagaaggctcctttatgagccttaaccggctttctctggctagtgaaatgcccctcatggacaatccctacgacctggccaacagtggcctgtctcaaacagacccagaaaaccctgacctggggatggaggccacagataagacaaaaagcagggtgtttatgatggctcggcagtacagtcagaagattaagaaggcgaatcaacttttaaaagtgaaaagtctggagctggagcagccgccggccagtcagcatcagaaatccatgcacaaagacctggctgccatcttggaagagaagaagcaaggagggcccgccattggtgccaggattgctgagtattcccagttgtatgaccagattgtattcagagagtctcccttgaaaattcagaaggatggctgggccagccctcaagaatcctccctcctgaggtctgtgtcaccttcccaggtccaccatggtagtggagactggcttctgcattcaacctatagtaatggagagttagcagatttctgtctcccaccagagcaagacttgaggtcaagatatcccacgtttgagatcaatacaaaaagtactcccaggcaattgtccgcagcttgctctgtgccttctcttcaaacctctgaccctctgccaggctctgtgcagagatgcagcgtggtagtaagtcagcccaacaaagagaactggtgtcaggaccatctttacaactccttgggtcggaaagggatcagcgctaaatctcagccttatcacaggtcccagtcatcttcctccgtcttgatcaacaaatcaatggattccatcaactaccctagtgatgtgggaaagcagcagctgctgtctttacacagaagttcaaggtgtgagagtcaccaggacttgctgccagatattgctgactcgcatcaacagggcactgaaaaactctcagatctcacactccaagactcacagaaagttgtggtggtcaatagaaatttacccttaaatgcccaaattgcaacacagaattatttttccaatttcaaagagactgatggagatgaagatgactatgtggaaatcaagtcagaagaagatgagtcggagttggagctatctcacaatcgtagaaggaaatctgactcaaagtttgtggatgctgacttttctgataatgtctgcagcggcaacacattgcattctttgaatagtccgcgcactccaaaaaagccggttaacagcaaacttggcctttcaccatatctgacaccatataatgattctgacaaactgaatgactatctttggagggggccatctcccaatcaacaaaatattgtccagtctctaagggaaaaatttcagtgtctcagttcaagcagctttgcttaaggttcttcataataactgcttgaatcaacttcttattttgctcataaaacgttacagatactgatgaggtgttttatgtataccagattaaaacaattttgtaagaaccagaggtgtaaaatatactttcttttacagcacaacttttggaaatggctgacgatgcagcccggattgtactgtagcacatgttggcatcaacagtatattttctcatgctgagtgtcttcatgtttcatgtaagtcaatcttacttgaaagtttttagacttttaacacgatggccataacctgacaatagtgcccacaccttaagaaatgcaataatcctttcctgttatccagaaggcccaggtagttttatcctgtgactcaaaggcagcaaggagactttttcacattttaaaaggcaacgaaagctgttgaaagaattatgcttatatctcacattttggttatatttgtggtaacaccttaggataacgtaagccagagatctgtaaattggactgcagtctgaggtgcccattttagggtttttgtgctagtattcttttatgtcattttgatgcagaaattgtgtgactgttgaaaattaaaatgtagcgggacccattttctgtacgcagaaccctttacctgtattcctggacaaggcctagagaacgagctgctcatcatgtttctaatataatttctggggtgaaatgaatgatttccttactggcttagagaaaaccaaggtcaataaaatgcagattgacttaactattagaaaagatgggatgacttctgggaaccacttaactcttcaaatgactgttgaaagagaaaaagcaaaactgaaatcccaccagaccattttgtgtgcctgtttctaatcgatacaaagttaagcatgagctaaaatcagacaaagcactttaaatttatcctttccagagcgctttgcacatgcaccctcctgagtttgggattctgccaaatgaccaacttgatcctggccctgaggagtcattggctgcaggaatagggcaagaatctatttcctaaactacacataacatgggagcctttttttcgttgttttcaggtatattaaagaatgaaatctttggttactaggtgctgactaataaataacaccttttatattctgaccatttgtcacatttcattgtgatactgtatactgatctaactccttatgaaaggcaacaaacaaaaataagacattgaataaaaagcaaaatcaaagaagctaaagagaaaaatgaaggcagatatattgcaactttataacatattctattttattgaagactgcaattaatgcagcaagaatgctttctcaagcggtggcctttgtattctcattttaatcaggtgtacattctatggcctctcccccatgctgttagtttctattttaaaagatacaataatatatgtagggaaaggggcctgggctcttcatttaaaggtaagcagtaatattgagtaagtgacataattctttttctctttgttaagtcctatgcctctttttcttaactgtaaaacatagaatatgagcgtttttatcttacaaataggtacctaaggcatgtgattttatttttaaataacaaaaaataacccaagtttcttgcttctccaaagtattcttctcatagcttataaaagaaagtccacattgaatagcatggtctgggaacattccttctttattgtgtttatttgaacatgatatgagtttccaagatgaaatgatcaaaaaagataagtaccacaagaaagtttttttgtttggttggtttttttgtttgtttgtttttttcttgagactgagtctctccctgttgcccaagttggagtgcaatcttggctcactgcagcctccacctccccggttccagcgattctcctgcctcagcctcttgaatagctgggattacaggcgcccgccaccacacctggctaatttttgtgttgttagtagaggcggggtttcatcatgttggccaggctggtctcgaactcctgatctcatgatccgtctgcctcggcctcccagagtgctgggattacaggcatgagccactgcgcccggccaagaaagtatgtttttagaggtgtgtgtaagtgcatttgtattacctatgaacaaaattacctgactcttgtcccaggaaagctgtttcgcattttcgctttttgattggtattatccagttctatgtagttcatattattgttctgtctgactctcagaaattacttcttcacgccagtgtcttgttgcatgactttgatgtcacctataggaatacacctcactgcacgtaagtgggtatcttactgtataaaaggtctacatggctttaggttttaggacaaatgtgtagatttatagaccatttctgttggccaggacacagattttgagagctgtgtgtatatatatataatcatgtttgtatttttttcctgaaagttatcaattgcttttgtttaaaacagtttgttttagaggtggggtggggatgtatataacgaggaaaagttatatgtactttaaagtatgtcaagttcttactagtttcctgtactgaaggttcaattttttttatataagtttacttttcacctgctctattctttgtggggaaaaaatgcatctagaaaaacatagtttaaatactgtatataagataatgaaagttagtaacgtccattatttaataaagtttgtaaagtacaaggt

SEQ ID NO: 330658 - DNA, 3621 bp, Artificial Sequence
  derived and/or modified sequence
ctcaattgaatgatgtcatgtttcatttaaggctcttagtgatgctgaagtctgtggtctgcacactagggggaaaaaggcagtgagaaagttgcaaatcaggtttttgtaaagcctttgtgtgttgggtttgggagataaaagctgactcatgcaatatttctacggaaggcgctgcacagactagcaaaggctgtttcttttacctgactgaggtcactgcatcagctgaaggcagacgatgtgcttaagcctgagtggagcagagatgggcaccagttgcgtcttgaagtgccatcagctgtaaccaaagttccacatcccaagacgacagccaggcgttcctgccctcaagaactgaagacaatggagctctctgatagtgaccgacccgtcagcttcggttccacatcatcctcggcctcttcccgcgacagccatggttccttcggcagcagaatgaccttagtttcaaatagccacatgggcttgtttaaccaggataaggaggtaggggccataaaactggagctgattcctgccaggccgttttccagcagcgagctgcagagggacaaccccgccacggggcaacagaacgcggatgagggcagcgaaaggccacccagagcgcagtggagagtggactcaaacggggcacccaagacgatcgcagactcggccacgagccccaagctcctctatgtggatagagttgttcaggaaattctggaaaccgaaaggacttatgtacaagatttaaaaagcatcgtagaggattaccttgactgcatcagggaccaaacaaaacttcccctggggaccgaagaaagatcagccctttttggaaacatacaggatatctaccacttcaatagtgaacttctgcaagatttggaaaactgtgaaaatgatcctgtggccatagcagagtgttttgtgtccaagagtgaagagttccacatttatacccagtattgcactaactatccaaggtccgtggctgtgctaacagagtgtatgaggaacaagatactggccaaattcttcagggagcgtcaggaaactctgaaacactcgctgcctctggggtcctatctcttgaaaccagttcagcggattctcaagtatcatctccttctgcatgaaatagaaaaccaccttgataaggacacagaaggctatgatgtggtgcttgatgctatagacacaatgcagcgagtcgcctggcatatcaatgacatgaagcggaaacacgagcacgcggtccggttacaggagatacagagtttgctcactaactggaaggggccagacctgaccagctacggggaactggtgcttgagggaaccttccgcatccagcgagccaagaatgagcggacgctcttcctcttcgacaagctgctgctcatcacgaagaagagagatgacacgtttacatacaaagctcacatcctgtgtggcaacctcatgcttgtggaggtgattccaaaagagccgctcagcttcagcgtcttccactacaagaatcccaagctgcagcacacagtccaggccaaatcccagcaagacaaacgcctctgggttctgcacctaaagagactgattctggagaaccatgcagccaagattccagctaaggccaagcaagcaatccttgaaatggatgccattcatcatccaggcttctgttacagtcctgagggagggacgaaagcactgttcggctctaaagaaggttctgctccatatcggctgagaagaaaatctgaaccttcctcacggtcacataaagttttgaagaccagtgaaacagcacaagacatccaaaaggtttctagagaggaaggatctccccagctgtcttcagcaaggccgtctcctgcccagagaaatagtcagcctagcagttctaccatgatcagcgtgcttcgagcgggtggagctctcagaaacatctggaccgatcaccagatcaggcaagccttgtttcccagccgacggtccccgcaggagaatgaggatgatgaagatgattatcagatgttcgtgccgtcattttcctcctcagatctgaactctaccagactatgtgaagatagcacttctagtcgcccttgcagctggcatatgggacagatggagtccacagagacctccagctctggtcacaggattgtcaggcgggccagcagtgctggggagagcaacacatgccctcctgaaataggaactagtgacagaactagggaactgcagaacagccccaaaacagaagggcaggaggagatgactccctttgggtcatccatagagttgactattgatgacatagaccatgtctatgataacatcagttatgaggacttaaaactaatggttgctaagcgggaagaagctgaatccactccctctaaatcagccagggactccgttcgccccaagagcaccccagagttagccttcacaaagaggcaagctggccacagtaagggctctctttacgcacaaacagatggcaccctctcaggtggagaggcatccagccaaagcacgcatgaactccaagcggttgaggagaacatctatgacaccatagggctcccagatcctccgtcgctgggttttaagtgcagcagcctaaagcgtgcaaagcggagcacctttttgggtctggaggccgacttcgtgtgctgtgacagcctgaggccatttgtttcccaagacagcctccagctcagtgaggacgaagccccttaccatcaggccactcccgatcatggttatctgagtttgctgtatgactctcccagtggtaacttgtctatgcctcataagcctgtatctgataaactgtccgaagaagtagatgaaatctggaatgacctggaaaattacatcaagaaaaatgaagacaaggccagagaccgtctcctggcagcgtttcctgtgagcaaggatgatgtgccagacaggctgcacgcagagagcacccctgagctgagccgggacgtggggcgctctgtgtccacgctgtccctgcctgagagccaggctctcctcacgcccgtgaagagcagggctggcagagccagccgcgccaactgcccctttgaggaagacctgatttctaaagaaggctcctttatgagccttaaccggctttctctggctagtgaaatgaccctctgccaggctctgtgcagagatgcagcgtggtagtaagtcagcccaacaaagagaactggtgtcaggaccatctttacaactccttgggtcggaaagggatcagcgctaaatctcagccttatcacaggtcccagtcatcttcctccgtcttgatcaacaaatcaatggattccatcaactaccctagtgatgtgggaaagcagcagctgctgtctttacacagaagttcaaggtgtgagagtcaccaggacttgctgccagatattgctgactcgcatcaacagggcactgaaaaactctcagatctcacactccaagactcacagaaagttgtggtggtcaatagaaatttacccttaaatgcccaaattgcaacacagaattatttttccaatttcaaagagactgatggagatgaagatgactatg

SEQ ID NO: 330659 - DNA, 478 bp, Artificial Sequence
  derived and/or modified sequence
ccgagcctgagcccgagcccgagcccgacggcggctgcagggcgctccggcagcccgagccggcgcagcgcagcccgcaccctccccgcccgacctgcgagcgccgcccgggcatgcgaagccgtccctccccgggaaaggagagtgaatatctatggatattgccctggcccttaagaaggtgaagactgatgagaagagtctgtgggtgaagacattgaaaaggtttcaactataaaaatgggcaccagttgcgtcttgaagtgccatcagctgtaaccaaagttccacatcccaagacgacagccaggcgttcctgccctcaagaactgaagacaatggagctctctgatagtgaccgacccgtcagcttcggttccacatcatcctcggcctcttcccgcgacagccatggttccttcggcagcagaatgaccttagtttcaaatagccacatgggcttgtttaaccaggataa

SEQ ID NO: 330660 - protein, 350 aa, Artificial Sequence
  derived and/or modified sequence
MSQEGYGTRSQPPLAPGKPNHEDLNLIQQERPSSLPVEVLASEDAAFGLKDLSGSIDDLPTGTEATLSSAVSASGSTSSQGDQSNPAQSPFSPHASPHLSSIPGGPSPSPVGSPVGSNQSRSGPISPASIPGSQMPPQPPGSQSESSSHPALSQSPMPQERGFMAGTQRNPQMAQYGPQQTGPSMSPHPSPGGQMHAGISSFQQSNSSGTYGPQMSQYGPQGNYSRPPAYSGVPSASYSGPGPGMGISANNQMHGQGPSQPCGAVPLGRMPSAGMQNRPFPGNMSSMTPSSPGMSQQGGPGMGPPMPTVNRKAQEAAAAVMQAAANSAQSRYATQEHAPGRYAVCLPVTT

SEQ ID NO: 330661 - DNA, 1053 bp, Artificial Sequence
  derived and/or modified sequence
atgtcccaggaaggctacggaaccaggagccagcccccgctggcccccggcaaacctaaccacgaagatctaaacctgatccaacaagagcggccctcctctttgccagtcgaagtactggccagtgaagacgcggctttcgggctgaaagatctttcgggttccatagacgacctcccaaccggcacagaggctaccttgtcaagcgcggtgagcgcgtctggcagcaccagttcgcagggggaccagtcaaaccctgctcagtcccctttctctcctcacgcatcaccgcacttgagttctatccccggagggccatcaccctccccagtggggtcccccgtggggagcaatcagagccgctcaggtccgattagccctgcatccatcccaggttcccagatgcctccccaaccgcccggttctcagtctgagagttccagtcacccagctctgagtcaaagtccaatgccccaagaacggggttttatggccggtacacagagaaaccctcagatggcacaatatggcccgcagcaaaccggcccctctatgagccctcatccaagtcctggcgggcagatgcatgcgggcatctcgagttttcagcagtctaatagtagcggcacctatggcccacaaatgtcccagtatgggccacaggggaactatagcaggcctcctgcatatagcggcgtgcctagtgcttcctactctggacccggcccaggtatgggcatctcagccaacaaccaaatgcatggtcagggccccagtcagccctgcggcgcggttccgctgggtaggatgcccagcgctggcatgcagaatagaccatttccgggaaacatgagttctatgacaccttcttcacctggtatgtcacagcaagggggaccaggtatgggaccacctatgccgacagttaatagaaaagcccaagaggctgcagctgccgtcatgcaggcggctgccaattctgcccagtcgaggtacgctacacaagagcatgctcctggaaggtacgccgtctgcctgccagtcacaacgtag

SEQ ID NO: 330662 - DNA, 1053 bp, Artificial Sequence
  derived and/or modified sequence
atgagccaggagggctacggcaccaggagccagccccccctggcccctgggaagcccaaccacgaggacctgaacctgatccagcaggagcggcccagcagcctgcctgtggaggtgctggcctctgaagatgctgccttcggcctgaaggacctgagcggcagcattgatgacctgcccactggaacagaggccaccctgagcagcgctgtgtctgccagcggcagcaccagcagccagggcgaccagagcaacccagcccagagccccttcagcccccacgccagcccccacctgagcagcatccctgggggccccagccccagccctgtgggcagccctgtgggcagcaaccagagccgcagcggccccatcagccctgccagcatccctggcagccagatgccaccccagcccccaggcagccagagcgagagcagcagccacccagccctgagccagagccccatgccccaggagcggggcttcatggccggcacccagaggaacccccagatggcccagtatggcccccagcagacaggccccagcatgagcccccaccccagccctgggggccagatgcatgctggcatcagcagcttccagcagagcaacagcagcggcacctacggcccccagatgagccagtatggcccccagggcaactacagccggcccccagcctacagcggcgtgcccagcgccagctacagcggccctggccctggcatgggcatcagcgccaacaaccagatgcacggccagggccccagccagccctgtggggctgtgcccctgggccgcatgcccagcgctggcatgcagaaccggcccttccctggcaacatgagctccatgacccccagcagccctggcatgagccagcagggcggccctggcatgggcccccccatgcccaccgtgaacaggaaggcccaggaggccgctgctgctgtgatgcaggccgccgccaacagcgcccagagccgctatgccacccaggagcacgcccctggccgctatgctgtgtgcctgcctgtgaccacctag

SEQ ID NO: 330663 - DNA, 1053 bp, Artificial Sequence
  derived and/or modified sequence
atgagccaggagggctacggcacccggagccagccccccctggcccctggcaaaccaaaccatgaagacttaaaccttatccagcaagaaaggccgtcctccttaccagtggaagtgttggcttcagaagacgccgccttcggactgaaggatctgagtggctccatagatgaccttccgaccggcaccgaggctacgctctcatctgcggtcagcgcctctgggtccactagctcacaaggcgatcagagtaaccccgctcaatctcccttttcaccccatgcttctccgcaccttagttccatccccgggggcccgagccctagccctgtgggctcacccgtcgggtccaaccagagccggtcgggtccaatttcccccgcctcaattcctgggtcgcagatgccaccccagcctcctggcagtcaatccgaatccagctctcaccccgccttgagccagtcacccatgccccaggaacggggattcatggccggcactcagcgtaatccccagatggcacagtacggacctcagcagactggtccctccatgagccctcacccatctcccgggggacagatgcacgccggtatctcatctttccagcaatcaaattcctccggtacatatggaccccagatgagccagtacggcccacaaggcaattactcaaggcctccagcttactcaggggtcccttccgcctcttacagtgggccaggtcccggaatgggcatatccgccaataaccagatgcacggacaaggtcctagccagccgtgcggggctgtgccacttggccgaatgccctcagccgggatgcagaacagaccattccctgggaacatgagctccatgacaccaagcagtccaggaatgtcccagcaggggggaccgggcatgggaccacccatgcctactgtgaatagaaaggcccaggaggcggccgcagcagtgatgcaggccgcagctaacagtgcacagtctagatacgctacacaggagcacgcaccagggaggtatgccgtttgtttaccagtgaccacctag

SEQ ID NO: 330664 - DNA, 1053 bp, Artificial Sequence
  derived and/or modified sequence
atgtctcaggagggctacggcacccgatctcaacccccacttgctccagggaaacctaaccatgaggatctgaacctcattcagcaggaacgccctagttctttgcccgttgaggtcctcgcgtcggaagacgcagcatttggactgaaggatttatcggggtctattgatgatctgcctaccggcactgaagcaaccttgagctccgccgtttccgcctccggctctacaagcagccagggcgaccaaagcaatcctgcacagtcaccattcagtcctcacgcctccccgcatctttccagcatccccggtgggcctagtccttcacccgttggcagcccggtggggtccaaccagtcgaggagcggcccaatctcacccgcatcaatacctgggtcccagatgcccccacagcctcctgggagccaatcagagtcttcctctcaccctgcgctgagtcagagtcctatgccccaggaaaggggatttatggcgggaactcaacgtaatccccaaatggcgcagtatggccctcagcagaccggaccctctatgagccctcaccctagtcccggaggccaaatgcacgccggtatctctagtttccaacaaagtaactccagcggtacctatggaccacaaatgagtcagtacggaccacagggaaactacagccgtccacccgcttactcaggcgtgcctagcgcctcttactccgggcctgggcctggaatgggtattagtgcgaataaccagatgcacggccaggggccatcccagccgtgcggagctgttcccttgggaagaatgccttctgcaggaatgcagaatcgcccatttcctggcaacatgtcttcaatgacaccctcaagcccgggtatgagccagcaaggcggtcctgggatgggtcctccaatgcctaccgtgaacagaaaggcccaggaggctgcagctgctgttatgcaagccgcagccaacagcgctcagagtcgctacgcgactcaggaacatgccccaggcagatatgcagtgtgcctgcctgtgacaacctag

SEQ ID NO: 330665 - DNA, 1053 bp, Artificial Sequence
  derived and/or modified sequence
atgagccaggagggctacggcaccagaagccagccccccctggcccccggcaagcccaaccacgaggacctgaacctgatccagcaggagagacccagcagcctgcccgtggaggtgctggccagcgaggacgccgccttcggcctgaaggacctgagcggcagcatcgacgacctgcccaccggcaccgaggccaccctgagcagcgccgtgagcgccagcggcagcaccagcagccagggcgaccagagcaaccccgcccagagccccttcagcccccacgccagcccccacctgagcagcatccccggcggccccagccccagccccgtgggcagccccgtgggcagcaaccagagcagaagcggccccatcagccccgccagcatccccggcagccagatgcccccccagccccccggcagccagagcgagagcagcagccaccccgccctgagccagagccccatgccccaggagagaggcttcatggccggcacccagagaaacccccagatggcccagtacggcccccagcagaccggccccagcatgagcccccaccccagccccggcggccagatgcacgccggcatcagcagcttccagcagagcaacagcagcggcacctacggcccccagatgagccagtacggcccccagggcaactacagcagaccccccgcctacagcggcgtgcccagcgccagctacagcggccccggccccggcatgggcatcagcgccaacaaccagatgcacggccagggccccagccagccctgcggcgccgtgcccctgggcagaatgcccagcgccggcatgcagaacagacccttccccggcaacatgagcagcatgacccccagcagccccggcatgagccagcagggcggccccggcatgggcccccccatgcccaccgtgaacagaaaggcccaggaggccgccgccgccgtgatgcaggccgccgccaacagcgcccagagcagatacgccacccaggagcacgcccccggcagatacgccgtgtgcctgcccgtgaccacctag

SEQ ID NO: 330666 - DNA, 1068 bp, Artificial Sequence
  derived and/or modified sequence
ctgggcgtgaagggcctgcccctgtaccccgaccccagcagagtgcccggcaccaagacccagaacaacctggagagcgactacctggccagagacggccccagcagcaacagcagcttccacagcagcgaggaggagggcaccgacctggagggcgacatgctggactgcagcggcagcagacccctgctgatggagagcgaggaggaggacgagagctgcagacccccccccggcaagctgggcggcgccgtgcccttcgccccccccgaggtgagccccgagcaggccaagaccgtgcagggcggcagaaagaaccagttccaggccttcacccagcccgccaccgacggcctgagcgagcccgacgtgttcgccatcgcccccttcagaagcagcagagtgcccaacgacgacatggacatcttcagcaaggcccccttcgtgagcaagagcagcatggcccccagccagcccgaggagagcgacgtgttcctgagagcccccttcaccaagaagaagagcatggaggagctgaccgtgatccagtgcaccagccaggagctgcccgcccagaccggcctgctgagccagaccggcgacgtgcccctgcccgccggcagagagagagccgtgtacaccagcgtgcaggcccagtacagcaccgccggcttcgtgcagcagagcaacctgctgagccacagcgtgcaggccgccgaccacctggacagcatcagccccagaggcagctgcctggagagcggcggccacagcaacgacagaaacaagggcccccagctgcagaaggaggccgtgagcggccccatggccggcaagcccttcagaccccagagcctgagcaagtacagcagacactacagccccgaggacgagcccagccccgaggcccagcccatcgccgcctacaagatcgtgagccagaccaacaagcagagcatcgccggcagcgtgagcatcaccagcctgagcagcagaaccaccgagctgcccgccgccgaccccttcgccctggcccccttccccagcaagagcggcaagaagccctag

SEQ ID NO: 330667 - DNA, 1068 bp, Artificial Sequence
  derived and/or modified sequence
ctaggcgttaagggcctcccactttacccagacccatctcgggtgccaggtacaaaaacccagaataacctggagtccgactatctggcccgtgacgggccaagctctaactcctcttttcacagttccgaagaggagggcactgaccttgaaggcgatatgttagactgcagcggaagtagaccacttttgatggagtctgaggaagaggacgaatcatgccgtccaccccccggcaagctgggtggggccgttcccttcgctcctccagaagtgtctcctgaacaggcgaaaaccgtacaggggggccgcaaaaatcagttccaggcttttacccagcccgccacagatggtctctcagaacctgacgtgttcgccatcgcaccctttcgatcctctcgagtccctaacgatgacatggatatattctccaaggcgcctttcgtctctaaaagctcaatggccccttcacagccagaagaatctgacgtcttcctgagggccccgtttaccaagaagaagagtatggaggagctcactgtgatccagtgcacttctcaggagctgcctgcccagactggcctcttgtcccagactggggatgtacccctaccagcaggtagagagagggctgtgtataccagcgtccaggcccaatattcaactgccggcttcgtgcagcagagcaacctgttgtcacactcagtgcaggctgccgatcatctggattcaatcagcccgcggggttcatgcttggaatcagggggtcattccaacgaccgaaacaagggaccgcagttgcaaaaagaagcagtgtctggaccaatggccggcaagcctttccggccccagagcttgtccaagtacagtagacattactcccccgaggatgaacctagccccgaagcccagccaatcgctgcatataagatcgtgtctcagaccaataagcaaagcattgccggttctgtctcgatcacttccctgtcctctaggacgacagagttgcccgccgctgaccctttcgccctcgcgccttttcctagtaagagcggcaagaagccctag

SEQ ID NO: 330668 - DNA, 1068 bp, Artificial Sequence
  derived and/or modified sequence
ctgggcgtgaagggcctgcccctgtacccagaccccagccgggtgcccggcaccaagacccagaacaacctggagagtgactacctggccagagatggccccagcagcaacagcagcttccacagcagcgaggaggagggcacagacctggagggggacatgctggactgcagcggcagccggcccctgctgatggagagcgaggaggaggatgagagctgccggcccccacctgggaagctgggcggcgctgtgccctttgcccctcctgaggtgtccccagagcaggccaagacagtgcagggcggcaggaagaaccagttccaggccttcacccagcctgccacagatggcctgtctgagccagatgtgtttgccatcgcccccttccgcagcagccgggtgcccaatgatgacatggacatcttcagcaaggccccctttgtgtccaagagctccatggcccccagccagcctgaggagagtgatgtgttcctgcgggcccccttcaccaagaagaagtccatggaggagctgaccgtcatccagtgcaccagccaggagctgcctgcccagacaggcctgctgagccagacaggagatgtgcccctgcctgctggccgggagagagctgtgtacacctctgtgcaggcccagtacagcacagctggctttgtgcagcagagcaacctgctgagccacagcgtgcaggccgctgaccacctggacagcatcagcccccggggcagctgcctggagagcggcggccacagcaatgacagaaataaaggcccccagctgcagaaggaggccgtgtctggccccatggccggcaagcccttccggccccagagcctgagcaagtacagccgccactacagcccagaagatgagcccagccctgaggcccagcccatcgccgcctacaagatcgtgtcccagaccaacaagcagagcattgctggctctgtgtccatcaccagcctgagcagcaggaccacagagctgcctgctgctgacccctttgccctggcccccttccccagcaagagcggcaagaagccctag

SEQ ID NO: 330669 - DNA, 1068 bp, Artificial Sequence
  derived and/or modified sequence
ctgggcgtgaagggcctgcccctgtaccccgaccccagccgggtgccaggaaccaagacccaaaataacctcgagtcagattacctcgcccgcgacggcccttcgagcaatagctccttccactcttccgaggaggagggaaccgacttagaaggcgacatgttggattgctccggttcgcgtcccctattaatggaatccgaagaagaagacgaatcatgccgcccacccccaggcaaattgggtggggctgtgccattcgcccctccggaagtttcaccagagcaggccaaaaccgtgcaggggggcagaaagaaccagtttcaggcttttacacagcccgccacagatggactgtccgaacccgacgtcttcgcgattgctccgtttcggtcgagtagagtacccaatgatgacatggacatatttagcaaagccccatttgtgtctaagtcttccatggccccatctcaaccagaggagagtgacgtctttctgcgcgcccctttcacaaagaaaaaaagtatggaggagctgacggtgatccagtgcacaagccaggagttaccagcccagacaggactgctgagtcagacgggggatgtaccactgcccgccggccgagagagagcagtgtatacatcagtccaagcccaatattcaaccgctggttttgttcagcagagcaatttgctatctcacagcgttcaagcagccgatcacttggattcgatcagcccaagggggagctgtttagagtcaggggggcactcaaatgaccggaataaaggaccccagttgcaaaaagaagctgtgtctggccccatggcgggaaaaccgttccgaccgcaatccttgagtaaatactcccgtcactactccccagaagacgaaccaagtcctgaggcccagcctattgcggcctacaaaatcgtaagtcaaaccaataagcagtcaattgctggcagcgtgagtatcacctccctgtcttcccggactactgagctacctgctgcagatccattcgccctggctccctttcctagcaagagcgggaagaaaccatag

SEQ ID NO: 330670 - DNA, 1068 bp, Artificial Sequence
  derived and/or modified sequence
ctcggcgtgaaaggactgccactataccctgacccgagcagggtcccaggaacaaaaacacaaaataacctggaatccgattatctggcacgggacggtccatccagcaactcttctttccactcaagcgaggaggagggtacggacctggagggggatatgctggattgcagcggttctcggccactgctgatggaatccgaggaggaagacgaaagttgtcgccctcctcccggaaagcttgggggagcggtgcccttcgcgcctcccgaagtgtctcctgagcaggcgaaaacagttcaaggaggtcgaaaaaatcagtttcaggccttcacgcaacccgctacggacggcctctctgaaccggacgtgttcgccatcgccccatttcggtcctcacgagttccaaacgatgatatggacatttttagtaaagcgccatttgtttcgaagagttctatggctccctcccagcccgaagagtcagacgtttttctcagggctccgtttacaaagaagaaatccatggaggaactgaccgttatccagtgcacttcacaagagctgcctgcccagacagggctgttgagccagaccggcgacgtcccactgcccgctgggcgtgagagggccgtgtatacatctgtccaggctcagtattcgaccgcaggtttcgttcagcagtccaacctgctcagccatagtgttcaggccgctgaccacctagatagcatttccccgaggggctcctgtttggagtcaggcggtcatagtaacgaccgtaacaaaggcccacagcttcagaaagaggcggtcagcggtcctatggcgggaaagccttttcgcccacagtccctctcgaagtacagccggcactacagtcccgaggatgagccttcaccagaggcacaaccaatcgcagcctataaaatagtttcacagactaacaaacaatccatagctgggagcgtctccatcacatctctatctagtcgcacaacagaattgcctgctgcggatccttttgctctggctccgtttcccagtaaatccggtaaaaaaccatag

SEQ ID NO: 330671 - DNA, 153 bp, Artificial Sequence
  derived and/or modified sequence
atgaccgaggtgcaggccatggtggagttcagcgtggagctgaacaagttctacaacgtggacctgttccagagaggcttctaccagatcagagccagcatgaagatccccagcagaatcccccacagagtggaggccagcctgctgcactag

SEQ ID NO: 330672 - DNA, 96 bp, Artificial Sequence
  derived and/or modified sequence
atgaccgaggtgcaggccatggtggagttcagcgtggagctgaacaagttctacaacgtggacctgttccagagaggcttctaccagatcagatag

SEQ ID NO: 330673 - DNA, 153 bp, Artificial Sequence
  derived and/or modified sequence
atgacggaggtccaggccatggttgagttctcggttgagctgaacaagttctataatgttgatctgttccaacgggggttctatcaaatccgggcgtcaatgaaaataccctctagaatcccccatcgggttgaggcaagcctgttacattag

SEQ ID NO: 330674 - DNA, 96 bp, Artificial Sequence
  derived and/or modified sequence
atgaccgaggttcaggctatggttgaatttagcgtggagctcaataaattttacaacgtggacctctttcaacgcggattctaccaaattcgatag

SEQ ID NO: 330675 - DNA, 153 bp, Artificial Sequence
  derived and/or modified sequence
atgacagaggtgcaggccatggtggagttctctgtggagctgaacaagttctacaacgtggacctcttccagaggggcttctaccagatccgggcctccatgaagatccccagccgcatcccccaccgggtggaggccagcctgctgcactag

SEQ ID NO: 330676 - DNA, 96 bp, Artificial Sequence
  derived and/or modified sequence
atgacagaggtgcaggccatggtggagttctctgtggagctgaacaagttctacaacgtggacctcttccagaggggcttctaccagatcagatag

SEQ ID NO: 330677 - DNA, 153 bp, Artificial Sequence
  derived and/or modified sequence
atgaccgaggtgcaggccatggtggagttcagcgtggagctgaacaagttctataacgtggacctctttcagagagggttttatcaaattcgcgccagcatgaagatcccgagcagaatcccacacagagtggaagcaagtttgctgcactag

SEQ ID NO: 330678 - DNA, 96 bp, Artificial Sequence
  derived and/or modified sequence
atgaccgaggtgcaggccatggtggagttcagcgtggagctgaacaaattttataacgtggacctgtttcaaagaggcttctatcagatccgttag

SEQ ID NO: 330679 - DNA, 153 bp, Artificial Sequence
  derived and/or modified sequence
atgaccgaggtccaagcaatggtggaattctccgtggagttgaataaattttataatgttgatttgtttcaaagaggtttttaccagattcgtgcgtcgatgaagatcccatccaggatcccacacagagttgaggcctcactcctgcactag

SEQ ID NO: 330680 - DNA, 96 bp, Artificial Sequence
  derived and/or modified sequence
atgacagaggtgcaagctatggttgaattttccgtggaactgaataagttttataacgttgacctgtttcaaaggggtttctaccagatccgctag

SEQ ID NO: 330681 - protein, 728 aa, Artificial Sequence
  derived and/or modified sequence
MLLPQGKEAVEGKKCQGRQRRAGLSEVWSRKLRNESLGTWSTQGCKTVLTDASHTKCLCDRLSTFAILAQQPREIIMESSGTPSVTLIVGSGLSCLALITLAVVYAALWRYIRSERSIILINFCLSIISSNILILVGQTQTHNKSICTTTTAFLHFFFLASFCWVLTEAWQSYMAVTGKIRTRLIRKRFLCLGWGLPALVVATSVGFTRTKGYGTDHYCWLSLEGGLLYAFVGPAAAVVLVNMVIGILVFNKLVSRDGILDKKLKHRAGQMSEPHSGLTLKCAKCGVVSTTALSATTASNAMASLWSSCVVLPLLALTWMSAVLAMTDKRSILFQILFAVFDSLQGFVIVMVHCILRREVQDAFRCRLRNCQDPINADSSSSFPNGHAQIMTDFEKDVDIACRSVLHKDIGPCRAATITGTLSRISLNDDEEEKGTNPEGLSYSTLPGNVISKVIIQQPTGLHMPMSMNELSNPCLKKENSELRRTVYLCTDDNLRGADMDIVHPQERMMESDYIVMPRSSVNNQPSMKEESKMNIGMETLPHERLLHYKVNPEFNMNPPVMDQFNMNLEQHLAPQEHMQNLPFEPRTAVKNFMASELDDNAGLSRSETGSTISMSSLERRKSRYSDLDFEKVMHTRKRHMELFQELNQKFQTLDRFRDIPNTSSMENPAPNKNPWDTFKNPSEYPHYTTINVLDTEAKDALELRPAEWEKCLNLPLDVQEGDFQTEV

SEQ ID NO: 330682 - protein, 486 aa, Artificial Sequence
  derived and/or modified sequence
MVIGILVFNKLVSRDGILDKKLKHRAGQMSEPHSGLTLKCAKCGVVSTTALSATTASNAMASLWSSCVVLPLLALTWMSAVLAMTDKRSILFQILFAVFDSLQGFVIVMVHCILRREVQDAFRCRLRNCQDPINADSSSSFPNGHAQIMTDFEKDVDIACRSVLHKDIGPCRAATITGTLSRISLNDDEEEKGTNPEGLSYSTLPGNVISKVIIQQPTGLHMPMSMNELSNPCLKKENSELRRTVYLCTDDNLRGADMDIVHPQERMMESDYIVMPRSSVNNQPSMKEESKMNIGMETLPHERLLHYKVNPEFNMNPPVMDQFNMNLEQHLAPQEHMQNLPFEPRTAVKNFMASELDDNAGLSRSETGSTISMSSLERRKSRYSDLDFEKVMHTRKRHMELFQELNQKFQTLDRFRDIPNTSSMENPAPNKNPWDTFKNPSEYPHYTTINVLDTEAKDALELRPAEWEKCLNLPLDVQEGDFQTEV

SEQ ID NO: 330683 - DNA, 753 bp, Artificial Sequence
  derived and/or modified sequence
atggcacacgtgggcaccagtagggttgggtccgttctgtcaatgtcactaagcatccacctcctcgtgcccaccatgaccaaaggcgagactggcaagccagggcaccatgaagccccaaggacacttcaggctttcccttggacatgggctcgcgcatctcccggtgttagcgtggatatgagtgccggactaccacaatcactgctgtgctggcccggcgcaccactgctgcctacgccaccactgcccagtgcgacatatgtgggacatagcttgggtctgccgcgagcaggctcaagcgtcggcccatggttctccggtcgctgggtgggtggagcactcgtgcagtggcccctgggcggagggggcccgggatctgtggcagccggcctcggaggcccactcgtcagatggctgctgggtggcggagcactggtaaggtggccgctgggaggaggcgggccagggtctgtagcagccgggtgggggggcccatggttcgggggaaggtgggttggagggcccccaggatccgttgcagcgggatgggggggacctgtcagatggccactcggtggagggggccccggttctgtcgcgactggatggggcggtccatggtttggaggccgttgggtgggaggcccccctggaagcgtggctgccgggtgcggaggagcccttgtgcagtggccattgggtggaggaagcttacatagtatcccctcattccccagagcgtggcggtag

SEQ ID NO: 330684 - protein, 1458 aa, Artificial Sequence
  derived and/or modified sequence
MDTTAAAALPAFVALLLLSPWPLLGSAQGQFSAGGCTFDDGPGACDYHQDLYDDFEWVHVSAQEPHYLPPEMPQGSYMIVDSSDHDPGEKARLQLPTMKENDTHCIDFSYLLYSQKGLNPGTLNILVRVNKGPLANPIWNVTGFTGRDWLRAELAVSTFWPNEYQVIFEAEVSGGRSGYIAIDDIQVLSYPCDKSPHFLRLGDVEVNAGQNATFQCIATGRDAVHNKLWLQRRNGEDIPVAQTKNINHRRFAASFRLQEVTKTDQDLYRCVTQSERGSGVSNFAQLIVREPPRPIAPPQLLGVGPTYLLIQLNANSIIGDGPIILKEVEYRMTSGSWTETHAVNAPTYKLWHLDPDTEYEIRVLLTRPGEGGTGLPGPPLITRTKCAEPMRTPKTLKIAEIQARRIAVDWESLGYNITRCHTFNVTICYHYFRGHNESKADCLDMDPKAPQHVVNHLPPYTNVSLKMILTNPEGRKESEETIIQTDEDVPGPVPVKSLQGTSFENKIFLNWKEPLDPNGIITQYEISYSSIRSFDPAVPVAGPPQTVSNLWNSTHHVFMHLHPGTTYQFFIRASTVKGFGPATAINVTTNISAPTLPDYEGVDASLNETATTITVLLRPAQAKGAPISAYQIVVEELHPHRTKREAGAMECYQVPVTYQNAMSGGAPYYFAAELPPGNLPEPAPFTVGDNRTYQGFWNPPLAPRKGYNIYFQAMSSVEKETKTQCVRIATKAAATEEPEVIPDPAKQTDRVVKIAGISAGILVFILLLLVVILIVKKSKLAKKRKDAMGNTRQEMTHMVNAMDRSYADQSTLHAEDPLSITFMDQHNFSPRLPNDPLVPTAVLDENHSATAESSRLLDVPRYLCEGTESPYQTGQLHPAIRVADLLQHINLMKTSDSYGFKEEYESFFEGQSASWDVAKKDQNRAKNRYGNIIAYDHSRVILQPVEDDPSSDYINANYIDIWLYRDGYQRPSHYIATQGPVHETVYDFWRMIWQEQSACIVMVTNLVEVGRVKCYKYWPDDTEVYGDFKVTCVEMEPLAEYVVRTFTLERRGYNEIREVKQFHFTGWPDHGVPYHATGLLSFIRRVKLSNPPSAGPIVVHCSAGAGRTGCYIVIDIMLDMAEREGVVDIYNCVKALRSRRINMVQTEEQYIFIHDAILEACLCGETAIPVCEFKAAYFDMIRIDSQTNSSHLKDEFQTLNSVTPRLQAEDCSIACLPRNHDKNRFMDMLPPDRCLPFLITIDGESSNYINAALMDSYRQPAAFIVTQYPLPNTVKDFWRLVYDYGCTSIVMLNEVDLSQGCPQYWPEEGMLRYGPIQVECMSCSMDCDVINRIFRICNLTRPQEGYLMVQQFQYLGWASHREVPGSKRSFLKLILQVEKWQEECEEGEGRTIIHCLNGGGRSGMFCAIGIVVEMVKRQNVVDVFHAVKTLRNSKPNMVEAPEQYRFCYDVALEYLESS

SEQ ID NO: 330685 - protein, 1457 aa, Artificial Sequence
  derived and/or modified sequence
MDTTAAAALPAFVALLLLSPWPLLGSAQGQFSAGGCTFDDGPGACDYHQDLYDDFEWVHVSAQEPHYLPPEMPQGSYMIVDSSDHDPGEKARLQLPTMKENDTHCIDFSYLLYSQKGLNPGTLNILVRVNKGPLANPIWNVTGFTGRDWLRAELAVSTFWPNEYQVIFEAEVSGGRSGYIAIDDIQVLSYPCDKSPHFLRLGDVEVNAGQNATFQCIATGRDAVHNKLWLQRRNGEDIPVAQTKNINHRRFAASFRLQEVTKTDQDLYRCVTQSERGSGVSNFAQLIVREPPRPIAPPQLLGVGPTYLLIQLNANSIIGDGPIILKEVEYRMTSGSWTETHAVNAPTYKLWHLDPDTEYEIRVLLTRPGEGGTGLPGPPLITRTKCAEPMRTPKTLKIAEIQARRIAVDWESLGYNITRCHTFNVTICYHYFRGHNESKADCLDMDPKAPQHVVNHLPPYTNVSLKMILTNPEGRKESEETIIQTDEDVPGPVPVKSLQGTSFENKIFLNWKEPLDPNGIITQYEISYSSIRSFDPAVPVAGPPQTVSNLWNSTHHVFMHLHPGTTYQFFIRASTVKGFGPATAINVTTNISAPTLPDYEGVDASLNETATTITVLLRPAQAKGAPISAYQIVVEELHPHRTKREAGAMECYQVPVTYQNAMSGGAPYYFAAELPPGNLPEPAPFTVGDNRTYQGFWNPPLAPRKGYNIYFQAMSSVEKETKTQCVRIATKAAATEEPEVIPDPAKQTDRVVKIAGISAGILVFILLLLVVILIVKKSKLAKKRKDAMGNTRQEMTHMVNAMDRSYADQSTLHAEDPLSITFMDQHNFSPRLPNDPLVPTAVLDENHSATAESSRLLDVPRYLCEGTESPYQTGQLHPAIRVADLLQHINLMKTSDSYGFKEEYESFFEGQSASWDVAKKDQNRAKNRYGNIIAYDHSRVILQPVEDDPSSDYINANYIDVSIFIGYQRPSHYIATQGPVHETVYDFWRMIWQEQSACIVMVTNLVEVGRVKCYKYWPDDTEVYGDFKVTCVEMEPLAEYVVRTFTLERRGYNEIREVKQFHFTGWPDHGVPYHATGLLSFIRRVKLSNPPSAGPIVVHCSAGAGRTGCYIVIDIMLDMAEREGVVDIYNCVKALRSRRINMVQTEEQYIFIHDAILEACLCGETAIPVCEFKAAYFDMIRIDSQTNSSHLKDEFQTLNSVTPRLQAEDCSIACLPRNHDKNRFMDMLPPDRCLPFLITIDGESSNYINAALMDSYRQPAAFIVTQYPLPNTVKDFWRLVYDYGCTSIVMLNEVDLSQGCPQYWPEEGMLRYGPIQVECMSCSMDCDVINRIFRICNLTRPQEGYLMVQQFQYLGWASHREVPGSKRSFLKLILQVEKWQEECEEGEGRTIIHCLNGGGRSGMFCAIGIVVEMVKRQNVVDVFHAVKTLRNSKPNMVEAPEQYRFCYDVALEYLESS

SEQ ID NO: 330686 - DNA, 4377 bp, Artificial Sequence
  derived and/or modified sequence
atggacacaaccgcagccgcagccttacccgcctttgtcgcgctgctgctcttaagtccatggccgctactgggatccgcgcaaggacaattttcggcaggagggtgtacatttgacgatggccctggagcatgtgactaccaccaggatctttacgacgattttgagtgggtgcacgtgtcagctcaggagccccactatttgccccccgagatgccacagggatcatacatgattgtggattcatctgatcatgacccaggcgagaaggctagacttcagttgccaacaatgaaggagaatgatactcactgcatcgacttcagttatctcttatattcgcaaaagggcctgaatccgggcactctaaacatactggtccgggtcaataaaggacccctggctaatcccatatggaatgtgacaggatttaccgggcgcgactggctgagggcagagcttgccgtctccacgttctggcccaacgagtatcaggtgatcttcgaggcagaagtatccggtgggaggtcaggttacatagcgatcgatgacatacaggtgcttagctacccgtgcgacaaaagcccacatttcctgcggctgggcgatgtggaggtcaatgccggccagaatgctacctttcagtgtattgccacaggccgggacgccgtacacaacaaactctggttgcagcgccggaatggcgaagatatcccagtggcccagaccaagaatatcaatcacagaaggttcgcagctagctttcggctgcaggaggttacaaaaactgatcaggacttgtatcgatgtgttacccagagtgaacgggggagcggtgtatccaactttgcccagctcatcgtcagggaaccacccaggccaattgctcccccgcagctgttgggcgtggggcctacatacctgttgatacaactaaatgctaacagcatcataggggacggcccgatcatcctaaaagaagtggagtacagaatgaccagcggttcatggactgaaactcatgctgtaaacgcccctacatataagttgtggcacctggatcccgacacagagtacgaaatcagggtactcctgacacgccctggagaaggtggcacaggactgcccggtccccccctaatcactcgaaccaaatgtgctgagcctatgaggacaccaaaaacgctgaagatcgccgagattcaagcgcgccgtattgcggtggactgggaatcactgggctacaatatcacccggtgtcacacgtttaatgtgactatatgttaccactatttccgtgggcacaatgagtctaaggctgattgcctggatatggatcccaaagcgccgcaacacgtggtgaaccacctgcccccctacacaaacgtgagtcttaagatgatactcaccaaccccgaggggcggaaggagtctgaggagactatcattcagactgatgaggacgtgcccggcccagttccggtgaaaagtctgcagggaaccagctttgaaaataagatctttttgaactggaaggagccactggaccctaacggcattatcacccagtacgagatatcttattcatcaattcgctcctttgacccagcagtcccggtggcaggcccaccacagaccgtgagcaatctgtggaattcaactcatcatgtgttcatgcacctacatcctgggacgacataccagtttttcattagggcctcaaccgttaaaggatttggtcctgccacggccattaatgtcacgactaatatcagtgcgcccactctccccgactacgagggagtggatgccagtctaaacgagaccgctaccactattacggttttgctccgcccagcccaggccaaaggcgctccaatctccgcctaccagattgtggtagaagagttacaccctcatagaaccaagagggaggcaggcgcaatggagtgctaccaggtgcctgtgacataccagaatgctatgtccgggggtgcaccatattattttgcggcggagttgcctcccggcaacctacccgagcccgctcccttcaccgtgggcgacaatcggacctaccaggggttctggaacccacctctcgctccccgaaaaggttacaacatttacttccaagctatgagcagcgtggaaaaagagaccaaaacgcaatgcgtgcgaatagccaccaaggccgctgctaccgaggaacctgaggtaatcccggatcccgccaagcagaccgacagagtggtcaaaatagccggcatctcagccggtattctggtgtttattctcctcctgctcgtcgtgattcttatcgtcaagaaatctaaactggctaagaagagaaaagatgcaatgggcaataccaggcaggagatgacacacatggtgaatgcaatggacaggtcttacgccgatcagtctacactgcatgctgaggatccgcttagcataacctttatggaccagcacaattttagtccaaggctgccgaatgatcctctagtgccaaccgctgtgctggacgaaaaccactcggccacagcagaaagctctaggctgctagatgtacccaggtatctgtgcgaggggactgagtccccatatcagacgggccagctgcatcccgccatcagagtagctgatctcctgcaacatattaacttgatgaagaccagcgactcctatggcttcaaagaagaatacgaaagtttttttgaaggacagtctgcctcctgggatgttgccaaaaaagatcagaatcgtgccaagaatcgctatggcaatattattgcctacgaccattctagggtgatactccaaccagtggaggatgacccatcatctgattacattaacgcgaactacatcgacatctggctgtatcgcgatggataccagcggcctagccattacatcgctacacaaggtcccgtgcacgagaccgtgtacgacttctggcgaatgatatggcaagaacagagtgcttgcattgttatggtgactaacctcgtggaagtcggacgagtgaagtgctataagtactggcctgacgatacagaggtttacggcgatttcaaagtgacgtgcgtggaaatggagcccttggccgagtacgtggtaagaaccttcaccctggaacgacgcggatacaatgagatcagggaggtgaagcagttccatttcaccggatggcccgatcacggcgtaccctaccacgccaccggactgctttctttcattcgccgagtgaagttgagcaatcctccatctgcaggccccatcgtagtgcactgcagtgctggagcagggcgtaccggatgttacattgtgatagacatcatgttggatatggccgaacgagagggtgtagttgatatatacaactgcgtgaaggccctgagatctcggcggataaacatggtccagacagaggagcagtacatattcattcacgacgccatccttgaggcatgtctgtgcggggagaccgccatcccagtctgtgaatttaaggcggcctactttgatatgattcgaattgacagccagaccaattctagtcacctgaaggatgagttccagactctgaacagcgtgacccccaggctgcaggctgaagactgctctatagcctgtctcccccgtaatcacgacaaaaaccgcttcatggatatgctgccgcccgatcggtgtctgcccttcctgatcaccatcgacggggagtctagcaattacatcaacgcagcgctgatggatagttaccggcagcccgccgccttcattgtgactcaatatcccctccccaacacagtgaaggatttctggcgtttggtttatgattatggttgtacgtctattgtgatgctgaacgaagtggatttatctcaggggtgtcctcagtactggccagaggaaggcatgcttcgttatggtcctattcaggtcgaatgtatgtcctgtagcatggattgtgatgtgattaataggatatttaggatatgcaacctgacccggccccaggagggatacctcatggttcaacagttccaatatttgggatgggctagtcaccgagaagtgcccgggtcaaagaggtcttttctgaaactcatattgcaggtggagaagtggcaggaagagtgcgaggagggagagggtcgtactataattcattgtttgaacgggggcgggcgctccggaatgttttgcgctatcggaatcgtggtggagatggtgaaaaggcagaacgttgtggatgtattccacgccgtgaaaacactccgcaactccaagcctaacatggtggaggcaccagaacaatataggttctgctacgatgtggctttggaatatctggaaagcagctag

SEQ ID NO: 330687 - DNA, 4374 bp, Artificial Sequence
  derived and/or modified sequence
atggacaccactgccgcggcagctttacccgcattcgtcgcattgctgctcctatcaccctggcccctcctcggcagcgctcagggacagttctccgccggaggctgcaccttcgacgatggtcccggcgcctgtgactaccatcaggatctgtatgacgatttcgagtgggtgcacgtctctgcccaggaaccacactatttaccgcccgaaatgccccagggaagttatatgatcgtcgattcctctgatcatgatccaggagaaaaggcgagattacagttgcctaccatgaaagaaaacgatactcattgtatcgacttttcttatctgttgtacagtcagaaaggcttgaaccctggcactctaaatatcttggtccgtgttaataagggccctctggcaaaccctatctggaacgtgacaggtttcacgggtcgagactggctgcgagcagaactggcagtgtcaacattctggcccaatgagtaccaggtcattttcgaggcggaagtaagcggcggaagatcgggctatatcgcgattgatgatattcaggtcctgagttatccatgcgacaagtcaccccatttcctgcgtttgggcgatgtggaggtgaatgctggccaaaacgccacctttcaatgcatcgcaactgggagggacgccgtccacaacaagctgtggctgcagcgccggaatggtgaagacatacctgttgcccagaccaagaacattaaccatcgacggttcgctgcttcttttcggttgcaggaagtgacaaaaactgaccaggacctgtaccgctgcgtcacacaatccgagaggggatccggcgtgtcgaattttgcccaactgattgtgcgcgagcctccacggcccattgctccacctcagttgttgggtgttgggcctacttatctgttaattcagctgaacgcgaactctatcataggagacggtccaatcattctgaaagaggttgagtacaggatgacaagtggctcttggacagagactcacgcagtgaatgccccaacctataaactctggcatctcgaccccgataccgaatacgaaattagagttctgctgacccgccctggagagggaggcactggactgccagggcccccattgatcacacggacaaagtgtgccgagccaatgaggactccgaagaccttgaaaatcgccgagatccaagccaggcggatcgctgttgactgggagtctctagggtataacataactcgctgccacactttcaatgtgaccatttgttaccattattttcgcggccacaacgagtctaaggctgactgcttagatatggaccccaaggcccctcagcacgtggtaaaccacctcccaccatacaccaatgtgtccttaaagatgatcctgacaaaccccgaagggcggaaagagtccgaggagacaatcattcaaacagatgaggatgtgcctggacctgtgcccgttaagagtcttcaagggacaagcttcgagaataagattttcctgaactggaaagagcctcttgatccaaacggcatcatcacacagtacgagatcagctattcatccatccgctctttcgacccagccgtgcccgtggccgggccaccacagaccgtcagtaatctgtggaattcaactcatcatgtctttatgcacctgcaccctgggaccacgtaccagtttttcatccgagcatcaactgttaagggcttcggacccgctacagctatcaacgtgacaaccaacatcagcgctccaacgctgccagattacgagggggtcgacgctagtctgaacgaaactgcaactacaattaccgttctcctgaggccagcccaagcgaaaggcgctcccatatcagcctatcaaattgtagtggaagaactccatccacaccgcactaaaagagaagctggagccatggagtgctaccaggtgcctgtgacataccagaacgccatgagcgggggggccccttactactttgctgcagagctcccccccggcaatctgcctgaacccgctcccttcaccgtgggtgacaaccgcacctaccaaggcttctggaaccctcctctggctcccagaaagggttataatatttactttcaagccatgagctctgttgagaaggaaactaagacacaatgcgtcaggattgctacaaaggcggcggcaaccgaggaaccagaggtgattccggaccccgccaaacagacggatcgcgtcgtaaagattgccggaattagtgcggggatactagtctttatccttttgctgctggttgtcattttaattgtgaaaaagagcaagcttgccaaaaaacggaaggacgcaatgggaaatacccgacaggaaatgactcatatggtgaacgcaatggataggtcttatgcagatcaatcaacattgcatgctgaggaccctctatcaattacattcatggaccagcacaacttttcccccagactccccaatgaccctttggtgcccaccgccgtgctcgatgaaaaccactctgccaccgctgaatcatcacgtctgcttgatgtgccaagatatctttgcgaaggtacggaaagtccttaccaaaccgggcaactccacccagctattagagtggccgatcttttacagcacattaacttgatgaagacgtcggacagctacggcttcaaggaagagtacgagtcattttttgaggggcagtcagctagctgggacgtggctaaaaaggatcagaacagggccaagaatcggtacgggaatattatcgcctatgaccacagcagggtcatcctgcagcctgtggaggacgacccgagttctgactacatcaacgccaactacatcgatgtgtccatattcatcggctatcagcgcccttctcactatatagccacgcagggccccgtgcacgaaaccgtctacgacttttggcgtatgatctggcaggaacagtctgcctgtattgttatggtcaccaatctggtcgaagtcgggcgcgtgaaatgttataaatactggcccgacgacaccgaagtctatggggacttcaaggtgacttgcgtcgagatggagcccctcgccgagtatgttgttcggacgttcactttggaacgcagaggatataatgaaatacgggaagtaaaacagttccattttactgggtggcctgatcatggagtgccataccacgcgacggggttattgtcctttattcgacgggtaaagctgtccaatcctccttctgctgggccaatcgtggtgcattgttcagccggggccggacgaaccgggtgctatatcgtcatcgacataatgctggatatggctgagagggaaggagtcgtggatatttataattgcgtcaaggctttgcggtcacgtcggatcaatatggtgcagacggaagaacaatacatttttatccacgacgccattctggaagcctgtctatgtggcgagaccgcgatccccgtttgcgagttcaaggcggcttactttgatatgatccgtattgacagtcaaactaactcatctcacttgaaggatgagttccagaccttgaacagcgtgacaccccggctccaggctgaagactgcagcatcgcctgcctgccacgaaatcatgacaaaaatcgttttatggacatgctgcccccagaccgatgtcttcctttcttgatcacgatcgacggtgaatcttcgaactatataaacgcagctctgatggacagctatcgacaacctgctgcttttatcgtgacgcagtatcccctccccaacaccgttaaggacttctggagactggtgtacgattacggttgcacaagtattgtcatgctcaatgaggtagacctatctcagggttgtccacagtactggcccgaagaagggatgttgcggtatgggcctattcaggttgaatgtatgtcatgctccatggattgcgacgtgataaatcgaatatttcgaatatgtaatctgactcgaccgcaggaggggtatctaatggtgcaacagttccagtacctgggctgggccagtcaccgggaggtccccggatctaaaaggagcttcctgaaactgatccttcaagtcgaaaagtggcaggaggagtgcgaggagggggaagggagaacaattatacattgccttaacggggggggccgcagcggcatgttctgtgcgattgggattgtggtagaaatggttaagagacaaaacgtggtggacgtgtttcacgcagtcaagaccctgaggaatagcaagccgaacatggtggaggcccccgaacagtatcggttttgctatgacgtcgccttggaatacctggaatcctcgtag

SEQ ID NO: 330688 - DNA, 4377 bp, Artificial Sequence
  derived and/or modified sequence
atggacaccacagctgctgctgccctgcctgcctttgtggccctgctgctgctgagcccctggcccctgctgggcagcgcccagggccagttctctgctgggggctgcacctttgatgatggccctggggcctgtgactaccaccaggacctgtatgatgactttgagtgggtgcacgtgtctgcccaggagccccactacctgcccccagagatgccccagggcagctacatgattgtggacagcagtgaccatgaccctggagagaaggcccggctgcagctgcccaccatgaaggaaaatgacacccactgcatcgacttctcctacctgctgtacagccagaagggcctgaaccctggcaccctgaacatcctggtgcgggtgaacaagggccccctggccaaccccatctggaatgtgacaggcttcaccggccgggactggctgcgggcagagctggccgtgtccaccttctggcccaatgagtaccaggtgatctttgaggccgaggtgtctgggggccgcagcggctacatcgccattgatgacatccaggtgctgagctacccctgtgacaagagcccccacttcctgcggctgggagatgtggaggtgaatgccggccagaatgccaccttccagtgcatcgccaccggcagagatgctgtgcacaacaagctgtggctgcagaggagaaatggagaggacatccctgtggcccagaccaagaacatcaaccacagaagatttgctgccagcttccggctgcaggaggtgaccaagacagaccaggacctgtaccgctgtgtgacccagagcgagcggggcagcggcgtgagcaactttgcccagctgattgtgcgggagcccccccggcccatcgccccaccccagctgctgggcgtgggccccacctacctgctgatccagctgaatgccaacagcatcattggagatggccccatcatcctgaaggaggtggagtacaggatgaccagcggctcctggacagagacccatgctgtgaatgcccccacctacaagctgtggcacctggaccctgacacagaatatgagatccgggtgctgctgaccaggcctggagagggcggcaccggcctgcccggccccccactcatcaccaggaccaagtgtgccgagcccatgaggacccccaagaccctgaagattgctgagatccaggccaggagaattgctgtggactgggagagcctgggctacaacatcacccgctgccacaccttcaacgtgaccatctgctaccactacttccggggccacaatgaaagcaaggctgactgcctggacatggaccccaaggccccccagcacgtggtgaaccacctgcccccctacaccaacgtgtccctgaagatgatcctgaccaaccctgagggcaggaaggagagcgaggagaccatcatccagacagatgaagatgtgcccggccctgtgcctgtgaagagcctgcagggcaccagctttgagaacaagatcttcctgaactggaaggagcccctggaccccaacggcatcatcacccagtatgagatctcctacagcagcatccgcagctttgatcctgctgtgcctgtggccggccccccccagacagtgagcaacctgtggaacagcacccaccacgtgttcatgcacctgcaccctggcaccacctaccagttcttcatccgggccagcacagtgaagggctttggacctgccacagccatcaacgtgaccaccaacatcagcgcccccaccctgcctgactatgaaggagtggatgccagcctgaatgaaacagccaccaccatcaccgtgctgctgcggcctgcccaggccaagggggcccccatcagcgcctaccagatcgtggtggaggagctgcacccccacaggaccaagcgggaggccggggccatggagtgctaccaggtgcctgtgacctaccagaatgccatgtctggaggagccccctactactttgctgctgagctgcccccaggcaacctgcctgagcccgcccccttcaccgtgggggacaacagaacctaccagggcttctggaacccccccctggcccccaggaagggctacaacatctacttccaggccatgagctctgtggagaaggagaccaagacccagtgtgtgcgcatcgccaccaaggctgctgccacagaggagcctgaggtgatcccagaccctgccaagcagacagacagagtggtgaagattgctggcatctctgctggcatcctggtgttcatcctgctgctgctggtggtgatcctgattgtgaagaagagcaagctggccaagaagaggaaggatgccatgggcaacacccggcaggagatgacccacatggtgaatgccatggacaggagctatgctgaccagagcaccctgcacgccgaggaccccctgagcatcaccttcatggaccagcacaacttcagcccccggctgcccaatgaccccctggtgcccacagctgtgctggatgagaaccacagcgccacagctgagagcagccggctgctggatgtgccccgctacctgtgtgagggcacagagagcccctaccagacaggccagctgcacccagccatccgggtggccgacctgctgcagcacatcaacctgatgaagaccagtgacagctatggcttcaaggaggagtatgagagcttctttgagggccagagcgcctcctgggatgtggccaagaaggaccagaacagagccaagaacagatatggcaacatcatcgcctatgaccacagcagggtcatcctgcagcctgtggaggatgaccccagcagtgactacatcaatgccaactacatcgacatctggctgtacagagatggctaccagaggcccagccactacatcgccacccagggccctgtgcatgagaccgtgtatgacttctggaggatgatctggcaggagcagagcgcctgcatcgtgatggtgaccaacctggtggaggtgggccgggtgaagtgctacaagtactggccagatgacacagaggtgtatggagacttcaaggtgacctgtgtggagatggagcccctggccgagtatgtggtgaggaccttcaccctggagcggcggggctacaatgagatccgggaggtgaagcagttccacttcaccggctggccagaccacggcgtgccctaccacgccaccggcctgctgtccttcatccggcgggtgaagctgagcaaccccccatctgctggccccatcgtggtgcactgcagcgctggagctggccgcacaggctgctacatcgtcatcgacatcatgctggacatggccgagcgggagggcgtggtggacatctacaactgtgtgaaggccctgcggagccgccgcatcaacatggtgcagacagaggagcagtacatcttcatccatgatgccatcctggaggcctgcctgtgtggggagacagccatccctgtgtgtgagttcaaggccgcctactttgacatgatcagaattgacagccagaccaacagcagccacctgaaggatgagttccagaccctgaacagcgtgaccccccggctgcaggccgaggactgcagcatcgcctgcctgcccaggaaccacgacaagaaccgcttcatggacatgctgcccccagaccgctgcctgcccttcctgatcaccattgatggagagagcagcaactacatcaatgctgccctgatggacagctaccggcagcctgctgccttcatcgtgacccagtaccccctgcccaacacagtgaaggacttctggaggctggtgtatgactatggctgcaccagcatcgtgatgctgaatgaggtggacctgagccagggctgcccccagtactggccagaggagggcatgctgcgctatggccccatccaggtggagtgcatgagctgcagcatggactgtgatgtgatcaaccgcatcttccgcatctgcaacctgacccggccccaggagggctacctgatggtgcagcagttccagtacctgggctgggccagccaccgggaggtgcccggcagcaagaggagcttcctgaagctgatcctgcaggtggagaagtggcaggaggagtgtgaggagggggagggccgcaccatcatccactgcctgaatggaggcggccgcagcggcatgttctgtgccatcggcatcgtggtggagatggtgaagaggcagaatgtggtggatgtgttccacgctgtgaagaccctgaggaacagcaagcccaacatggtggaggcccctgagcagtaccgcttctgctatgatgtggccctggagtacctggagagcagctag

SEQ ID NO: 330689 - DNA, 4374 bp, Artificial Sequence
  derived and/or modified sequence
atggacaccacagctgctgctgccctgcctgcctttgtggccctgctgctgctgagcccctggcccctgctgggcagcgcccagggccagttctctgctgggggctgcacctttgatgatggccctggggcctgtgactaccaccaggacctgtatgatgactttgagtgggtgcacgtgtctgcccaggagccccactacctgcccccagagatgccccagggcagctacatgattgtggacagcagtgaccatgaccctggagagaaggcccggctgcagctgcccaccatgaaggaaaatgacacccactgcatcgacttctcctacctgctgtacagccagaagggcctgaaccctggcaccctgaacatcctggtgcgggtgaacaagggccccctggccaaccccatctggaatgtgacaggcttcaccggccgggactggctgcgggcagagctggccgtgtccaccttctggcccaatgagtaccaggtgatctttgaggccgaggtgtctgggggccgcagcggctacatcgccattgatgacatccaggtgctgagctacccctgtgacaagagcccccacttcctgcggctgggagatgtggaggtgaatgccggccagaatgccaccttccagtgcatcgccaccggcagagatgctgtgcacaacaagctgtggctgcagaggagaaatggagaggacatccctgtggcccagaccaagaacatcaaccacagaagatttgctgccagcttccggctgcaggaggtgaccaagacagaccaggacctgtaccgctgtgtgacccagagcgagcggggcagcggcgtgagcaactttgcccagctgattgtgcgggagcccccccggcccatcgccccaccccagctgctgggcgtgggccccacctacctgctgatccagctgaatgccaacagcatcattggagatggccccatcatcctgaaggaggtggagtacaggatgaccagcggctcctggacagagacccatgctgtgaatgcccccacctacaagctgtggcacctggaccctgacacagaatatgagatccgggtgctgctgaccaggcctggagagggcggcaccggcctgcccggccccccactcatcaccaggaccaagtgtgccgagcccatgaggacccccaagaccctgaagattgctgagatccaggccaggagaattgctgtggactgggagagcctgggctacaacatcacccgctgccacaccttcaacgtgaccatctgctaccactacttccggggccacaatgaaagcaaggctgactgcctggacatggaccccaaggccccccagcacgtggtgaaccacctgcccccctacaccaacgtgtccctgaagatgatcctgaccaaccctgagggcaggaaggagagcgaggagaccatcatccagacagatgaagatgtgcccggccctgtgcctgtgaagagcctgcagggcaccagctttgagaacaagatcttcctgaactggaaggagcccctggaccccaacggcatcatcacccagtatgagatctcctacagcagcatccgcagctttgatcctgctgtgcctgtggccggccccccccagacagtgagcaacctgtggaacagcacccaccacgtgttcatgcacctgcaccctggcaccacctaccagttcttcatccgggccagcacagtgaagggctttggacctgccacagccatcaacgtgaccaccaacatcagcgcccccaccctgcctgactatgaaggagtggatgccagcctgaatgaaacagccaccaccatcaccgtgctgctgcggcctgcccaggccaagggggcccccatcagcgcctaccagatcgtggtggaggagctgcacccccacaggaccaagcgggaggccggggccatggagtgctaccaggtgcctgtgacctaccagaatgccatgtctggaggagccccctactactttgctgctgagctgcccccaggcaacctgcctgagcccgcccccttcaccgtgggggacaacagaacctaccagggcttctggaacccccccctggcccccaggaagggctacaacatctacttccaggccatgagctctgtggagaaggagaccaagacccagtgtgtgcgcatcgccaccaaggctgctgccacagaggagcctgaggtgatcccagaccctgccaagcagacagacagagtggtgaagattgctggcatctctgctggcatcctggtgttcatcctgctgctgctggtggtgatcctgattgtgaagaagagcaagctggccaagaagaggaaggatgccatgggcaacacccggcaggagatgacccacatggtgaatgccatggacaggagctatgctgaccagagcaccctgcacgccgaggaccccctgagcatcaccttcatggaccagcacaacttcagcccccggctgcccaatgaccccctggtgcccacagctgtgctggatgagaaccacagcgccacagctgagagcagccggctgctggatgtgccccgctacctgtgtgagggcacagagagcccctaccagacaggccagctgcacccagccatccgggtggccgacctgctgcagcacatcaacctgatgaagaccagtgacagctatggcttcaaggaggagtatgagagcttctttgagggccagagcgcctcctgggatgtggccaagaaggaccagaacagagccaagaacagatatggcaacatcatcgcctatgaccacagcagggtcatcctgcagcctgtggaggatgaccccagcagtgactacatcaatgccaactacattgatgtgtccatcttcatcggctaccagaggcccagccactacatcgccacccagggccctgtgcatgaaacagtgtatgacttctggaggatgatctggcaggagcagagcgcctgcatcgtgatggtgaccaacctggtggaggtgggccgggtgaagtgctacaagtactggccagatgacacagaggtgtatggagacttcaaggtgacctgtgtggagatggagcccctggccgagtatgtggtgaggaccttcaccctggagcggcggggctacaatgagatccgggaggtgaagcagttccacttcaccggctggccagaccatggagtgccctaccacgccaccggcctgctgtccttcatcagaagagtgaagctgagcaacccccccagcgctggccccatcgtggtgcactgcagcgctggggccggccgcacaggctgctacatcgtgattgacatcatgctggacatggccgagcgggagggcgtggtggacatctacaactgtgtgaaggccctgcggagccgccgcatcaacatggtgcagacagaggagcagtacatcttcatccatgatgccatcctggaggcctgcctgtgtggggagacagccatccctgtgtgtgagttcaaggccgcctactttgacatgatcagaattgacagccagaccaacagcagccacctgaaggatgagttccagaccctgaacagcgtgaccccccggctgcaggccgaggactgcagcatcgcctgcctgcccagaaatcatgacaagaaccgcttcatggacatgctgcccccagaccgctgcctgcccttcctgatcaccattgatggagagagcagcaactacatcaatgctgccctgatggacagctaccggcagcctgctgccttcatcgtgacccagtaccccctgcccaacacagtgaaggacttctggaggctggtgtatgactatggctgcaccagcatcgtgatgctgaatgaggtggacctgagccagggctgcccccagtactggccagaggagggcatgctgcgctatggccccatccaggtggagtgcatgagctgcagcatggactgtgatgtgatcaaccgcatcttccgcatctgcaacctgacccggccccaggagggctacctgatggtgcagcagttccagtacctgggctgggccagccaccgggaggtgcccggcagcaagaggagcttcctgaagctgatcctgcaggtggagaagtggcaggaggagtgtgaggagggggagggccgcaccatcatccactgcctgaatggaggcggccgcagcggcatgttctgtgccatcggcatcgtggtggagatggtgaagaggcagaatgtggtggatgtgttccacgctgtgaagaccctgaggaacagcaagcccaacatggtggaggcccctgagcagtaccgcttctgctatgatgtggccctggagtacctggagagcagctag

SEQ ID NO: 330690 - DNA, 4377 bp, Artificial Sequence
  derived and/or modified sequence
atggacaccaccgccgccgccgccctgcccgccttcgtggccctgctgttgctgtctccgtggccactactcggatccgctcagggacaattctccgcagggggatgcacctttgacgacggccccggcgcatgtgactatcaccaggatctgtacgatgatttcgaatgggtgcacgtgtcggcgcaggaacctcattacctgccaccagagatgccccagggttcctacatgatcgtcgactcaagtgatcatgatcctggcgagaaggcaaggctccagctgcccacaatgaaagaaaatgacactcattgcattgacttttcatatttgctgtattcacaaaagggcctcaaccctggtacactcaatatcttggtgagagtcaacaaagggccactcgccaatcctatttggaacgtgacaggatttacagggcgggattggctgagagcagagctggccgtgtccacattctggccaaacgagtaccaggttattttcgaggcagaggtgtctggtggccggtctggatacatagcaatcgacgacattcaagtgctgagctatccctgcgataagtcaccacattttctgcggctaggggacgtggaggttaacgctggtcagaatgctacatttcagtgtatagctactggaagggacgctgttcacaacaagctgtggctgcagcgccgcaacggggaggatattcctgtggctcagacaaagaatatcaaccaccgaaggttcgcagcaagttttcggctgcaggaggtcaccaagacagaccaagacttgtaccgctgtgtaactcaaagcgagcgggggtcaggtgtctccaacttcgcccagctgatagtgcgcgaaccaccaagacccatcgccccaccacagcttcttggagtcgggccaacatacctgcttattcagctcaacgcaaacagtattattggcgacggtcccataattctcaaagaggtggagtatcggatgacttcagggagttggacggaaacccacgctgtgaacgcacctacatataaactgtggcatctcgatcccgacacggagtacgagatcagggtgctgctgacacgtcctggcgaaggtggcacaggactgcccggacctcccttgattacacgcacaaagtgcgccgagccaatgcggacgcccaaaaccctaaaaatcgctgaaattcaagcccggagaatagcagtcgactgggagtccctgggctataacatcacgcggtgccatacattcaacgtcactatttgctatcattattttcgtggccataatgaaagtaaagccgactgtctcgacatggacccaaaagcaccacagcatgtggtgaaccatcttccgccttatacaaatgttagtctaaaaatgatcttaactaatcccgaaggccgcaaggagtccgaggaaacaatcatccagactgacgaagacgtgcctggtcctgttcctgttaagtcactgcagggaactagcttcgaaaataaaatattcctgaactggaaggagcctctggacccaaacgggatcattacgcagtatgagatatcgtactcatccatcagaagcttcgaccccgccgtgcccgtggcaggcccccctcaaacggtcagtaacctttggaacagtacccatcacgttttcatgcatttgcatcccggcactacctaccagttcttcatcagagccagcactgtgaagggcttcggtcccgccactgctattaacgtcaccaccaatatttctgcgccaacgctccctgattatgaaggcgtagatgccagtctgaatgagacagcgactacaattaccgttctactacggcccgctcaggctaagggggctcccatcagcgcctaccaaatagtcgtagaagaattgcaccctcacagaaccaaacgggaggccggcgccatggagtgttatcaggtgccagtcacataccaaaatgccatgtcagggggggcaccatattactttgctgccgaacttcccccagggaacctccccgaaccagcccccttcaccgtgggtgacaaccggacatatcaggggttctggaacccccctctggcccccagaaagggatataatatctattttcaggccatgagcagtgtcgagaaagagaccaagacccagtgtgtcagaattgctactaaggccgccgccacagaagaacctgaagtcattcctgacccagcaaagcagacggatagggttgtgaagatcgccggtataagcgccgggatacttgtcttcatactgctcctactggtggtaatcctgattgtaaagaagtctaagctagcgaagaagcggaaggatgccatggggaatacacggcaggagatgacacacatggtcaacgcgatggataggtcgtacgcggatcagagcaccctgcacgccgaagaccccttgagtataacttttatggatcagcacaacttttccccccgcctgccaaatgatcccctggtccctacagctgtactggatgagaaccactctgctacagccgaaagttccagactgctggatgttccacgatatctgtgtgagggtaccgagagcccataccagaccgggcaactacaccctgcgatcagagtcgctgatttgctgcaacatatcaacctcatgaaaacttcagattcttacgggttcaaggaggaatacgagtcattcttcgaaggccagtctgccagctgggacgtcgcaaagaaggaccagaaccgggcaaaaaataggtacggaaacatcattgcctacgatcatagcagggtcattctacagcccgttgaggacgatccatctagcgattacatcaacgctaattatatagacatttggctgtatcgcgacggataccagagaccaagccattatattgccacacaggggccagtgcatgaaactgtgtacgacttctggcggatgatatggcaggagcagtctgcttgtattgtgatggtgacgaacttagttgaggtgggacgagtcaaatgctataaatactggcctgatgacactgaagtctatggcgattttaaggtgacatgtgtggagatggagcccctagctgagtacgtagtacggacgtttacattggaacggcgcgggtataacgaaataagagaggtgaagcagttccattttacagggtggcctgaccatggggtgccatatcacgctacaggactcttgagcttcatccggcgtgtcaaactttctaatccaccatctgctggccccatcgtggtccattgctctgcaggggccggacggactggatgttatatcgtaatcgatataatgctcgatatggcagagcgcgagggcgtggtggatatctacaactgcgtcaaggccctgcggtcaaggagaatcaatatggtgcaaacggaggagcagtacatattcattcacgatgcaatactggaagcctgcctgtgcggggagaccgcgattcctgtgtgcgagttcaaggctgcctattttgacatgatccggattgactctcagactaactcctcccacttaaaggatgagttccagaccctcaattctgtcaccccaagactgcaggcagaggactgttcaattgcttgtctgccgaggaatcacgataagaacaggtttatggacatgctgccccccgacaggtgtctacctttcctgataaccatcgacggggagtcctccaattacattaacgctgcgctgatggattcatacaggcagcccgcggcatttatagtgacccaataccccctgccgaataccgtcaaggatttctggagactagtgtacgattacggatgcacaagcatcgtgatgctaaatgaagtggatcttagccagggttgcccacaatactggccagaggagggcatgcttagatatgggccgatccaggtggagtgcatgagttgctctatggattgtgacgtgattaatcgtatatttagaatatgtaatttaacgaggccccaagaggggtatttgatggtccaacagttccagtatctgggttgggcctcacacagggaagtacccggctctaaaaggtcctttctcaaattaatcctgcaggtagagaagtggcaagaagaatgcgaggagggagaagggaggacaataatccattgtctgaacggcggcgggcggagcgggatgttctgcgctatcgggattgtggtggagatggtgaagcgacaaaatgttgtcgacgtattccacgccgtaaaaacattaaggaacagcaagccaaatatggtggaggccccagagcagtaccgcttctgctacgatgttgccttggagtaccttgaaagcagctag

SEQ ID NO: 330691 - DNA, 4374 bp, Artificial Sequence
  derived and/or modified sequence
atggacaccaccgccgccgccgccctgcccgccttcgtggccctgctgctgctaagcccatggcccctactgggctcagctcagggtcaattctctgccggcggttgcaccttcgacgatggacctggggcctgcgactaccatcaggatctctacgatgatttcgaatgggtgcacgtgagcgcccaggagccacattacttgcctcctgaaatgccacaagggagttacatgatcgtcgattctagtgatcatgaccccggcgagaaggctcgcctgcagttacccactatgaaggaaaatgacactcactgtattgatttttcctacttgctctactcccaaaaagggttgaaccctggtacattgaacattctcgtgagggtgaataaaggccccctcgcaaatccaatctggaacgtgactgggttcaccggccgtgactggctacgcgccgagctggcagtgtcaacattttggcctaacgagtaccaggtgatattcgaagccgaggtatccggcggcaggtccggctacatcgccattgatgatattcaggtcttatcgtatccctgtgataagtcccctcacttccttcgactgggagacgtggaagtcaatgccggtcagaatgctaccttccagtgcatcgccaccggccgcgacgctgtgcataacaagctgtggctgcagcggagaaacggggaggatatccccgtggcccagactaaaaacatcaatcatcggcggttcgcagctagctttcggttacaagaggtaaccaaaaccgaccaggacctgtataggtgtgtgactcagtcggagaggggatcgggggtgagcaattttgcccagctgattgtgcgcgaacccccgagaccgattgcgccacctcagctactgggagtggggcccacttatctattgattcagctgaatgcaaatagcattattggcgatgggccaataatcctgaaagaagtcgagtatcgaatgacctctggtagctggacggaaacccacgctgtaaatgcccccacctacaagttatggcatcttgatccggatactgagtacgaaatccgagtcctcctgactcgacctggagaggggggaaccggactcccaggccccccacttatcactcgtactaaatgcgccgagcctatgaggacacccaagacactgaagatagccgaaatccaggcgagacggatcgccgtggactgggagtccctcgggtacaatatcaccagatgtcacacattcaatgtaaccatttgctaccactacttccggggtcacaacgaatctaaagccgattgcctcgacatggatcctaaggctccacagcatgttgtgaaccacctgcctccctacactaacgtgagtttgaagatgatactgactaatcctgaaggtcggaaagagtcagaagaaacaataatccaaaccgatgaggatgtgccaggacccgtaccagttaaatcccttcagggcacaagttttgagaacaaaatttttttgaattggaaagagccattggatccaaacggcataattacccaatacgagatctcctattcctctattcggtcattcgatccagctgtgcccgtggccggaccacctcaaacagtcagtaatctctggaacagtacccatcatgtgttcatgcacttgcatcccggcaccacatatcagttttttattagagcatcgacggtcaagggctttgggcccgccaccgcgatcaatgtcaccactaacatcagcgctccaacactccccgattatgagggcgtggacgcctcactgaatgaaaccgctaccaccatcaccgtgctgttacgccctgcccaagccaaaggtgcccccatctccgcctatcagatcgtcgtggaggagctccatccgcatcggacgaaaagagaagccggcgctatggaatgctatcaagtgccggtgacttaccagaatgccatgtctggcggcgccccttactactttgctgccgaactgccccccgggaacctgcctgaaccagccccattcacagtaggcgataatcgcacctaccagggtttttggaacccacctctggccccaagaaagggctacaatatttactttcaagccatgtcttccgtcgagaaggaaacgaagacccagtgtgtgcgcattgcaaccaaagccgccgccactgaagagccggaggtgataccggatcctgccaagcagacggaccgtgttgtgaaaatcgctgggatcagcgcaggcatcctggtctttatcctattgttgcttgttgtgattctcatcgttaaaaagagcaagcttgcaaaaaagaggaaggacgctatggggaatacccggcaggagatgactcatatggtgaatgcgatggatcgatcttacgccgatcagtctacgcttcacgctgaggaccctctcagcattactttcatggatcagcacaacttctctccccgcctgcccaacgaccctttggtcccaacagcagtgctcgatgagaaccacagcgctacggctgaatcatccagactcctggatgtccccaggtatctgtgtgagggaacagagtccccataccagaccggccagttacaccctgctattcgcgtggctgacttgctgcagcacattaatctgatgaaaacatctgatagctacggcttcaaagaggagtacgaatccttctttgagggtcagtcagcgtcttgggatgtggctaaaaaggatcagaatcgggctaagaaccgctacgggaacataatcgcctacgaccattcaagggtgatactgcagccagtagaggacgacccttcgagtgattacataaatgctaattatatcgacgtgagcatctttattggttatcagcggccgtctcactacatcgccacgcagggcccggtgcatgagacggtgtacgatttttggcggatgatctggcaggaacagtcagcctgtattgtaatggtgaccaatctcgtcgaggtgggaagagtcaagtgctataagtattggccagacgataccgaggtgtatggcgacttcaaggtgacctgtgtggagatggagcccctggccgagtatgtggtgaggactttcaccctagaaagaagaggttacaatgaaattcgggaagttaagcagttccacttcacaggatggccagaccacggggtgccatatcacgcaactgggttactgtcattcatcaggcgtgtgaagctctccaacccgcccagtgccggccccatcgtagtacactgctccgcaggggccggccgcacaggctgctacatcgtgatcgacattatgttggacatggccgaaagagaaggggtggtcgacatatacaattgcgtcaaagccttgcgaagcaggaggatcaatatggtccagacagaagaacaatatatctttattcacgatgcgatcctggaggcgtgcctgtgtggcgaaactgcaatccccgtgtgcgagtttaaggcagcgtatttcgacatgatacgtatagactcacagacaaatagctcccacctcaaggacgaattccaaacactgaacagcgttacccctagattgcaggccgaggattgtagcattgcatgtttaccaaggaatcacgacaaaaatagatttatggatatgttgccgccagatcggtgtctcccctttcttatcacgatagacggggagagttctaactacatcaacgcggcccttatggacagctaccggcagcccgccgcattcatcgtgacccagtaccctctacccaacacggtgaaagacttctggcggctcgtgtacgattacggctgcacttccatcgttatgctaaatgaggtggacctctcccaaggatgtcctcagtactggccggaggaaggcatgctgcggtacgggcctattcaggtagaatgtatgagttgtagcatggattgtgacgtgatcaatcgcattttccgcatttgcaaccttacccgtccacaggaaggctatctgatggtgcagcagtttcagtatctgggttgggctagtcacagagaggttcctggttctaaaaggtccttcctgaaattgatcctgcaggtagaaaaatggcaagaggagtgcgaagagggagaagggcggactatcatccactgtctgaacggcggcgggcgatctggaatgttctgtgcgattgggatcgtggtcgaaatggtaaagagacagaacgttgtggacgtcttccatgctgtgaaaaccctccggaattcaaagccaaacatggtcgaggctccggagcagtacagattctgctacgacgtggctctggagtaccttgagtcttcctag

SEQ ID NO: 330692 - DNA, 4377 bp, Artificial Sequence
  derived and/or modified sequence
atggataccacagcagccgcagccctacctgcatttgttgcactcctcctcctgtctccctggcccctgcttggtagtgcccagggacaattctcagccggaggatgtacatttgatgacgggccaggtgcatgtgattatcatcaggacctctatgacgattttgaatgggtccacgtatccgcacaggaaccacattacttgcctcccgagatgcctcagggctcctacatgatagtcgattctagcgatcatgacccaggggaaaaagcgcgtcttcagctgcccacgatgaaagagaacgacacccactgtatcgacttttcatatcttctgtattcacagaaaggccttaaccctggaactcttaacatactggtgcgggtgaacaagggcccattggctaatccaatctggaacgtaactggattcaccggccgtgactggctgagagccgagctagcggtctctactttttggccaaatgagtatcaggtcatctttgaggcagaagtcagcggcggtcgcagcggttatattgccatcgacgacattcaggtgctgtcatacccctgcgacaagagtccccacttcctacggctcggcgatgtagaagtcaacgctggccagaatgccacgtttcaatgtattgctacaggacgcgatgccgtgcacaacaagctttggctgcagaggcggaatggcgaggacatccccgtggcccaaacaaagaatatcaatcacaggcggtttgcagcctcgtttcggttgcaagaagttaccaaaacagaccaggatctgtaccggtgcgtgacccagagtgagcggggttcaggtgtgtccaacttcgcccaattaatcgtcagagagcccccaagaccgatagcccctccccagctgcttggcgtgggccctacgtacctgctgattcagcttaacgcgaatagtatcataggggatggacctataatactgaaggaagtggagtatagaatgacaagcggtagttggaccgagacgcacgctgtgaacgcccctacctataaactgtggcacttggaccccgacaccgagtatgagatccgagtattattgacacggcctggcgagggcggaacaggcctgcccggtccacctctgattacgcgaaccaaatgtgcggaaccaatgcgaacaccaaagaccctcaagattgccgagatccaggcaagacgtatcgcggtagattgggagtcactaggttataatattaccagatgtcatacatttaatgttacaatatgctatcattatttcaggggacacaatgaatccaaggctgactgccttgatatggacccaaaggcccctcagcatgttgttaatcacctgcccccttacaccaacgtgtcacttaaaatgattctgaccaacccagaagggaggaaggaatctgaagaaacaataatccagaccgatgaggatgtgccaggcccagttccggtgaagtcgttgcagggaacttccttcgagaataagatcttcctgaactggaaagagccgctggatccaaacggcataatcacccagtatgagataagttattcctcaattagatctttcgaccctgctgtgccagtggcaggccctccacagacggtcagtaacttatggaattccacccatcacgtcttcatgcacctccatccgggaacaacatatcagttttttattcgtgcatccaccgtaaaggggttcggacctgccactgccattaatgtgacgaccaacatatccgctccgacactgccggattatgagggagtggacgcttcactgaacgagaccgcaaccaccatcaccgtcctcctgagacccgcacaagcaaaaggggctccgatctcagcctaccagattgtggtggaagagttgcacccccatcgaacgaaacgcgaggctggagctatggaatgctaccaggtgcccgtcacataccagaacgccatgagtggcggagccccttactatttcgccgctgagctgcctcccggtaacctcccagagcctgctcctttcactgtaggggataataggacctaccagggcttctggaaccccccattagctccccgaaagggatataacatttattttcaagccatgtcctccgtagaaaaagagacgaaaacccagtgtgtaaggatcgccactaaagcagccgcaacggaagagccggaggtgatcccggaccccgcaaaacaaaccgacagggtggttaagattgctggtatctcagccggaatcctcgtttttattctgctgctccttgtcgtgatcttaatcgtgaaaaaaagtaaactggcgaagaagcggaaggatgccatgggaaatacgagacaagagatgacccacatggttaacgccatggataggagctacgcagatcaaagcacactgcatgcggaggatcctttgtccataacttttatggaccagcacaacttttcacctcgcctgccaaatgatcctctggtacctaccgctgtcctggacgaaaaccattccgccaccgcagaatcttcaagacttctggacgtaccaaggtatctttgcgagggaactgagagtccttaccagaccgggcagctccaccccgctatccgagtggccgacctcctgcagcacattaaccttatgaagaccagcgactcttatggatttaaggaggaatacgagtccttctttgaaggacagtccgcatcctgggacgtcgccaaaaaggatcagaaccgtgccaagaacaggtatggaaacattatcgcttacgatcattcgcgggtgatcttgcagcccgtcgaggatgacccttctagcgattacattaatgccaattatatcgacatctggttgtaccgggatggatatcagagaccttcacattatatcgccactcagggaccagttcacgagactgtttatgatttttggcgaatgatctggcaggaacagagcgcatgtattgtgatggtgaccaatctggtagaggtcggaagggtgaaatgttacaaatattggcccgacgacactgaagtgtacggggattttaaagtgacttgcgttgaaatggagcccctggctgaatatgtggtgagaactttcaccctcgagcggagagggtacaacgagatcagagaggtcaaacaattccactttacaggttggcccgaccacggcgtgccttatcacgccactggcttactgagttttattcgccgtgttaaactctctaatccccctagcgccggtcccatcgtggtacactgctccgccggagctgggaggactggatgttatatcgtgatcgacattatgctggatatggcggagagagagggagtcgtggacatctataactgcgtcaaggcattacgctctagaaggataaatatggtccagacagaggagcagtacattttcatccacgatgcgattctcgaggcatgtttgtgcggcgagaccgcgattcctgtgtgtgagtttaaggccgcatattttgatatgattaggatagactctcagactaattcatcccatctgaaagacgaatttcaaaccttaaactccgtcactccacggctgcaggcagaggactgttccattgcatgtctccctcggaaccacgacaaaaatcgcttcatggatatgctcccccctgaccgctgcctgccctttcttatcacaatagacggagaaagctcaaattacatcaatgccgctctcatggattcctacaggcagccggcagctttcattgtaacccagtatcccttgccaaacacagtgaaagacttttggaggctggtgtacgattatgggtgcacaagtatcgtcatgctgaatgaggttgatctatcccagggttgcccacagtattggcccgaagaggggatgctcagatacggccctatccaggtagagtgcatgtcatgtagcatggactgcgatgtcattaatcggatctttagaatctgtaaccttactaggccacaggaggggtatctcatggtgcagcagttccagtacctgggctgggcaagccaccgggaagtgccaggcagcaaaaggagcttcttgaagctgatcctgcaggtggagaaatggcaagaggagtgcgaggagggcgaaggccgaactattattcactgtttgaacggtggcggacggtctggtatgttctgtgcaatagggattgttgtcgagatggtgaaacgccaaaatgttgtcgacgtctttcacgccgtcaaaaccttaagaaatagcaaacccaacatggtcgaagctcccgaacagtatcgattttgctatgacgtggctcttgaatacttggagagtagctag

SEQ ID NO: 330693 - DNA, 4374 bp, Artificial Sequence
  derived and/or modified sequence
atggacacaaccgccgctgccgcactaccagcattcgtagccctgctgttgctgagtccctggccactcttgggtagcgctcagggccagtttagtgcgggaggctgcactttcgacgacgggccaggggcatgcgactaccaccaggatttgtacgatgacttcgaatgggtccacgtgagcgcccaggaaccacactatctgcccccagagatgcctcagggtagctacatgatcgttgattctagtgaccatgaccctggagagaaggcccgactgcaactgccaacgatgaaagaaaacgatacccactgtatcgatttcagctatctgctgtacagccagaaaggcctgaatcctgggacactcaacatcctggtcagggtaaacaaagggcctctggctaatcccatatggaacgtgacgggattcacaggcagagattggttacgagccgaactcgcggtttctactttctggcccaacgagtatcaggttattttcgaggccgaggtgagcggcggtcgcagcggctacatcgccatcgacgacatccaagttctgagttatccttgcgataagagcccgcatttcctccgcctgggagacgtcgaagtgaacgccggacaaaacgcgacatttcaatgtatcgcaacgggacgagatgccgtgcataataaactgtggttgcagcggaggaacggggaggacattcccgtcgctcagaccaagaacataaaccacaggaggtttgccgctagtttcaggttacaggaagttaccaagacagatcaagatctatacaggtgtgtgactcagagtgagagggggagcggcgtttcaaactttgcacagctgatcgtgcgggaaccacctcgtcccatcgcgccaccccagcttctgggcgtcggaccaacctacctactgatccagctgaatgccaacagtattatcggggatgggccaataatactcaaggaggttgaataccgcatgactagcggctcatggaccgagacccatgcggtcaatgctcccacttacaagctgtggcacctcgatccagatactgagtacgagatcagggtgctgttgacaagaccaggcgagggcggaaccggtcttccgggaccaccgttaatcacacggacgaagtgtgcggagccgatgagaactcctaagacccttaaaattgccgaaattcaagcaaggcgcattgccgtggattgggaatccctgggctacaacattactcgctgccatacattcaatgtgaccatctgttatcactacttcagaggccacaacgagtcaaaggctgattgtctcgacatggaccctaaggcaccacaacatgtagttaaccatctgccaccatacactaacgtgtccctgaagatgattctaactaaccctgagggacgcaaggaaagtgaggaaaccataatccaaacagacgaagacgtgccaggtccagtccctgtgaagtccctgcaggggacttcatttgagaacaaaatcttcctgaactggaaagagccactggaccccaacgggattataacacagtacgaaatttcttactcttctattcggagcttcgacccagctgtgccagtggcagggccacctcagactgtgtccaacctgtggaacagtacccaccacgtattcatgcatcttcaccccggtaccacgtatcagttcttcatccgggcaagcaccgtgaagggatttgggccagctactgcgattaatgtaactaccaatataagcgctcctacgctacctgactacgaaggtgtggatgcttctctgaacgagactgcaacaacgattaccgtcctgcttagaccggctcaagccaaaggagcacccatctcagcctatcagatagtcgtagaggaattgcatccccatcgcacgaagcgagaagccggtgcaatggaatgctatcaggtgcccgtgacttatcaaaatgccatgagcggaggcgctccttattactttgcagccgagctgcccccaggcaaccttcccgagccggctccgttcaccgtgggagataatcgcacgtaccagggcttctggaatccaccgctcgcgccacgcaaaggttataatatctatttccaggctatgagctccgtggagaaggaaactaaaacgcagtgtgtgcgaatcgcaactaaggctgcagctaccgaagagccagaagttatccccgatcccgctaagcaaaccgatagggtcgtaaagatcgcaggaatctcggcagggatcttggtattcattctgctcctcttagtggtgatactgatcgttaagaagagcaagctggcgaagaagaggaaagacgccatgggcaacacacggcaggagatgacccatatggtgaatgcaatggatcgctcatatgctgaccaaagtacgttgcacgcagaggaccctttaagcatcacattcatggatcagcacaacttctcaccccgactgccaaatgaccccctggtgccgacagcagtgctggacgaaaaccactccgccactgcagaaagcagcaggctcctcgacgtgcctagatacctttgtgaaggaaccgaatccccctaccaaactggacagctgcacccagccattcgagtagccgaccttctccagcacattaatctgatgaagacctctgacagctacgggtttaaggaagaatatgagagtttttttgaagggcaatctgcaagttgggatgtggcaaagaaagaccaaaatcgcgctaaaaataggtacggcaatataattgcatacgatcacagcagggtgatactccagccagtagaggatgacccatctagcgactatataaacgctaactacatcgatgtcagcattttcatcggttaccagcggcctagccactacattgcaacacagggacccgtgcacgagaccgtttatgatttttggcgcatgatatggcaagagcagtccgcgtgtatcgtgatggtgaccaatctggtggaggtcggtcgtgtgaagtgttataaatactggcccgacgacaccgaagtctatggagacttcaaggtgacatgcgttgagatggaacctctggctgagtatgttgtgcgcacattcaccttggagcgcaggggatataacgagatccgcgaggttaaacagttccactttaccggttggcccgaccatggggtgccataccatgctactggcttactgtcatttatccggcgtgtgaaattgtccaaccctcccagcgcaggccctatcgtggttcactgcagtgcaggggctggcaggacaggatgttatattgtcatcgacatcatgctggatatggccgaacgggaaggggtggttgatatttataactgtgttaaggcgttgaggagtaggcggatcaatatggtgcagaccgaagagcagtatatatttattcatgacgctatactcgaagcctgcctctgtggcgagaccgcgatcccggtgtgcgagttcaaggccgcatattttgatatgatcagaattgattcacagaccaattcgtcccatctgaaagacgaattccaaaccttgaacagcgtgacacccaggcttcaagcagaggactgctctattgcatgcctgcccaggaatcacgataaaaataggttcatggacatgcttccacctgatcggtgcctgccttttctgataacgatcgacggtgagtccagtaactatattaacgcagcactcatggatagctaccgtcagcccgctgcattcatcgttactcaatatcctttgccgaacacagtcaaagacttctggagactcgtgtacgactatggatgtacatctatagttatgctcaatgaagtggatctgagtcagggctgccctcagtactggcccgaagagggcatgctccggtacgggcctattcaggtggagtgcatgtcctgcagtatggactgtgacgtgatcaacaggatttttcgaatttgcaatctcacccgacctcaagaagggtacctcatggtgcagcagtttcagtatctgggctgggcgtcccacagggaggtcccagggagcaagaggtcgtttctgaagttgattctgcaggtcgaaaagtggcaggaggagtgcgaagaaggagaggggagaacgattatacattgtctcaacgggggtggcagatccggaatgttctgtgcaataggtatcgtcgtggagatggttaagcggcagaacgttgtcgacgtattccacgccgtgaaaaccctgcgcaatagcaaacccaatatggtcgaagctcctgagcagtacagattttgctatgacgtggcattggaataccttgaaagctcctag

SEQ ID NO: 330694 - DNA, 5025 bp, Artificial Sequence
  derived and/or modified sequence
gagcaaagtaactcttgactaacaggagcagcctccgccgagcatggagagctgccgccgcggccggccggcgacgctggcgacgctttcgcccctgaggtagtttggcgaccgcgaagaaggaaaaagggcgggcgggcggctgtcctctcaccgtcctcaccccgcgaggcccggcccgctcctccgtcgtggatttcgcggcgatccccccggcagctctttgcaaagctgcttgaaacttctcccaaactcggcatggatacgactgcggcggcggcgctgcctgcttttgtggcgctcttgctcctctctccttggcctctcctgggatcggcccaaggccagttctccgcaggtggctgtacttttgatgatggtccaggggcctgtgattaccaccaggatctgtatgatgactttgaatgggtgcatgttagtgctcaagagcctcattatctaccacccgagatgccccaaggttcctatatgatagtggactcttcagatcacgaccctggagaaaaagccagacttcagctgcctacaatgaaggagaacgacactcactgcattgatttcagttacctattatatagccagaaaggactgaatcctggcactttgaacatattagttagggtgaataaaggacctcttgccaatccaatttggaatgtgactggattcacgggtagagattggcttcgggctgagctagcagtgagcaccttttggcccaatgaatatcaggtaatatttgaagctgaagtctcaggagggagaagtggttatattgccattgatgacatccaagtactgagttatccttgtgataaatctcctcatttcctccgtctaggggatgtagaggtgaatgcagggcaaaacgctacatttcagtgcattgccacagggagagatgctgtgcataacaagttatggctccagagacgaaatggagaagatataccagtagcccagactaagaacatcaatcatagaaggtttgccgcttccttcagattgcaagaagtgacaaaaactgaccaggatttgtatcgctgtgtaactcagtcagaacgaggttccggtgtgtccaattttgctcaacttattgtgagagaaccgccaagacccattgctcctcctcagcttcttggtgttgggcctacatatttgctgatccaactaaatgccaactcgatcattggcgatggtcctatcatcctgaaagaagtagagtaccgaatgacatcaggatcctggacagaaacccatgcagtcaatgctccaacttacaaattatggcatttagatccagataccgaatatgagatccgagttctacttacaagacctggtgaaggtggaacggggctcccaggacctccactaatcaccagaacaaaatgtgcagaacctatgagaaccccaaagacattaaagattgctgaaatacaggcaagacggattgctgtggactgggaatccttgggttacaacattacgcgttgccacacttttaatgtcactatctgctaccattacttccgtggtcacaacgagagcaaggcagactgtttggacatggaccccaaagcccctcagcatgttgtgaaccatctgccaccttatacaaatgtcagcctcaagatgatcctaaccaatccagagggaaggaaggagagtgaagagacaattattcaaactgatgaagatgtgcctggtcccgtaccagtaaaatctcttcaaggaacatcctttgaaaataagatcttcttgaactggaaagaacctttggatccaaatggaatcatcactcaatatgagatcagctatagcagtataagatcatttgatcctgcagttccagtggctggacctccccagactgtatcaaatttatggaacagtacacaccatgtctttatgcatctccaccctggaaccacgtaccagtttttcataagagccagcacggtcaaaggctttggtccagccacagccatcaatgtcaccaccaatatctcagctccaactttacctgactatgaaggagttgatgcctctctcaatgaaactgccaccacaataactgtattgttgagaccagcacaagccaaaggtgctcctatcagtgcttatcagattgttgtggaagaactgcacccacaccgaaccaagagagaagccggagccatggaatgctaccaggttcctgtcacataccaaaatgccatgagtgggggtgcaccgtattactttgctgcagaactccccccgggaaacctacctgagcctgccccgttcactgtgggtgacaatcggacctaccaaggcttttggaaccctcctttggctccgcgcaaaggatacaacatctatttccaggcgatgagcagtgtggagaaggaaactaaaacccagtgcgtacgcattgctacaaaagcagcagcaacagaagaaccagaagtgatcccagatcccgccaagcagacagacagagtggtgaaaatagcaggaattagtgctggaattttggtgttcatcctccttctcctagttgtcatattaattgtaaaaaagagcaaacttgctaaaaaacgcaaagatgccatggggaatacccggcaggagatgactcacatggtgaatgcaatggatcgaagttatgctgatcagagcactctgcatgcagaagatcctctttccatcaccttcatggaccaacataactttagtccaagattgcccaatgatccacttgtaccgactgctgtgttagatgagaaccacagtgctacagcagagtccagtcgccttctagacgtacctcgctacctctgtgaggggacggaatccccttaccagacaggacagctgcatccagccatcagggtagctgatttactgcagcacattaatctcatgaagacatcagacagctatgggttcaaagaggaatatgagagcttttttgaaggacagtcagcatcttgggatgtagctaaaaaagatcaaaatagagcaaaaaaccgatatggaaacattatagcatatgatcactccagagtgattttgcaacccgtagaggatgatccttcctcagattatattaatgccaactatattgatatttggctgtacagggatggctaccagagaccaagtcattacattgcaacccaaggtcccgttcatgaaacagtgtatgatttctggaggatgatttggcaagaacaatctgcttgcattgtgatggttacaaatttagttgaggttggccgggttaaatgctataaatattggcctgatgatactgaagtttatggtgacttcaaagtaacgtgtgtagaaatggaaccacttgctgaatatgtagttaggacattcaccctggaaaggagggggtacaatgaaatccgtgaagttaaacagttccatttcacgggctggcctgaccatggagtgccctaccatgctacagggctgctttcctttatccggcgagtcaagttatcaaaccctcccagtgctggccccatcgttgtacattgcagtgctggtgctggacgaactggctgctacattgtgattgacatcatgctagacatggctgaaagagagggtgttgttgatatttacaattgtgtcaaagccttaagatctcggcgtattaatatggtccagacagaggaacagtacatttttattcatgatgccattttagaagcctgcttatgtggagaaactgccatacctgtctgtgaatttaaagctgcatattttgatatgattagaatagactcccagactaactcttcacatctcaaggatgaatttcagactctgaattcagtcacccctcgactacaagctgaagactgcagtatagcgtgcctgccaaggaaccatgacaagaaccgtttcatggacatgctgccacctgacagatgtctgccttttttaattacaattgatggggagagcagtaactacatcaatgctgctcttatggacagctacaggcaaccagctgctttcatcgtcacacaataccctctgccaaacactgtaaaagacttctggagattagtgtatgattatggctgtacctccattgtgatgttaaacgaagtcgacttgtcccagggctgccctcagtactggccagaggaagggatgctacgatatggccccatccaagtggaatgtatgtcttgttcaatggactgtgatgtgatcaaccggatttttaggatatgcaatctaacaagaccacaggaaggttatctgatggtgcaacagtttcagtacctaggatgggcttctcatcgagaagtgcctggatccaaaaggtcattcttgaaactgatacttcaggtggaaaagtggcaggaggaatgcgaggaaggggaaggccggacgattatccactgcctaaatggtggcgggcgaagtggcatgttctgtgctataggcatcgttgttgaaatggtgaaacggcaaaatgttgtcgatgttttccatgcagtaaagacactgaggaacagcaagccaaacatggtggaagccccggagcaataccgtttctgctatgatgtagctttggagtacctggaatcatcttagttgggtgagactctttaaagtgcatccatgaagaaacctgtccatctattgagccagcagctgttgtacctgttacacttgtgcagaaagattttaatgtggggggtgggagacttttacatttgagaggtaaaagtattttttttatgaagttgtgtatcttaataaaaaggactgaattagtttttattactatattaaagcatcaacatttcatgccacataaattatatttaataagaaccagattgaaatgagaacgtattggtgtttgtacagtgaacatgccaccttttttctcatggtttcagtagagcagctaccacatgttgcatgagttcatactttctacgtggcatttttctccctttctaaaatgaaagctgatga

SEQ ID NO: 330695 - DNA, 6188 bp, Artificial Sequence
  derived and/or modified sequence
gtctctccggcaggaggcggtggcggcgccgcgcccgagcccgcattcctcagaagcgcccggagcccgcggggcgacgtcacccccggctccgcccccgtccctccccgagcaaagtaactcttgactaacaggagcagcctccgccgagcatggagagctgccgccgcggccggccggcgacgctggcgacgctttcgcccctgaggtagtttggcgaccgcgaagaaggaaaaagggcgggcgggcggctgtcctctcaccgtcctcaccccgcgaggcccggcccgctcctccgtcgtggatttcgcggcgatccccccggcagctctttgcaaagctgcttgaaacttctcccaaactcggcatggatacgactgcggcggcggcgctgcctgcttttgtggcgctcttgctcctctctccttggcctctcctgggatcggcccaaggccagttctccgcaggtggctgtacttttgatgatggtccaggggcctgtgattaccaccaggatctgtatgatgactttgaatgggtgcatgttagtgctcaagagcctcattatctaccacccgagatgccccaaggttcctatatgatagtggactcttcagatcacgaccctggagaaaaagccagacttcagctgcctacaatgaaggagaacgacactcactgcattgatttcagttacctattatatagccagaaaggactgaatcctggcactttgaacatattagttagggtgaataaaggacctcttgccaatccaatttggaatgtgactggattcacgggtagagattggcttcgggctgagctagcagtgagcaccttttggcccaatgaatatcaggtaatatttgaagctgaagtctcaggagggagaagtggttatattgccattgatgacatccaagtactgagttatccttgtgataaatctcctcatttcctccgtctaggggatgtagaggtgaatgcagggcaaaacgctacatttcagtgcattgccacagggagagatgctgtgcataacaagttatggctccagagacgaaatggagaagatataccagtagcccagactaagaacatcaatcatagaaggtttgccgcttccttcagattgcaagaagtgacaaaaactgaccaggatttgtatcgctgtgtaactcagtcagaacgaggttccggtgtgtccaattttgctcaacttattgtgagagaaccgccaagacccattgctcctcctcagcttcttggtgttgggcctacatatttgctgatccaactaaatgccaactcgatcattggcgatggtcctatcatcctgaaagaagtagagtaccgaatgacatcaggatcctggacagaaacccatgcagtcaatgctccaacttacaaattatggcatttagatccagataccgaatatgagatccgagttctacttacaagacctggtgaaggtggaacggggctcccaggacctccactaatcaccagaacaaaatgtgcagaacctatgagaaccccaaagacattaaagattgctgaaatacaggcaagacggattgctgtggactgggaatccttgggttacaacattacgcgttgccacacttttaatgtcactatctgctaccattacttccgtggtcacaacgagagcaaggcagactgtttggacatggaccccaaagcccctcagcatgttgtgaaccatctgccaccttatacaaatgtcagcctcaagatgatcctaaccaatccagagggaaggaaggagagtgaagagacaattattcaaactgatgaagatgtgcctggtcccgtaccagtaaaatctcttcaaggaacatcctttgaaaataagatcttcttgaactggaaagaacctttggatccaaatggaatcatcactcaatatgagatcagctatagcagtataagatcatttgatcctgcagttccagtggctggacctccccagactgtatcaaatttatggaacagtacacaccatgtctttatgcatctccaccctggaaccacgtaccagtttttcataagagccagcacggtcaaaggctttggtccagccacagccatcaatgtcaccaccaatatctcagctccaactttacctgactatgaaggagttgatgcctctctcaatgaaactgccaccacaataactgtattgttgagaccagcacaagccaaaggtgctcctatcagtgcttatcagattgttgtggaagaactgcacccacaccgaaccaagagagaagccggagccatggaatgctaccaggttcctgtcacataccaaaatgccatgagtgggggtgcaccgtattactttgctgcagaactccccccgggaaacctacctgagcctgccccgttcactgtgggtgacaatcggacctaccaaggcttttggaaccctcctttggctccgcgcaaaggatacaacatctatttccaggcgatgagcagtgtggagaaggaaactaaaacccagtgcgtacgcattgctacaaaagcagcagcaacagaagaaccagaagtgatcccagatcccgccaagcagacagacagagtggtgaaaatagcaggaattagtgctggaattttggtgttcatcctccttctcctagttgtcatattaattgtaaaaaagagcaaacttgctaaaaaacgcaaagatgccatggggaatacccggcaggagatgactcacatggtgaatgcaatggatcgaagttatgctgatcagagcactctgcatgcagaagatcctctttccatcaccttcatggaccaacataactttagtccaagattgcccaatgatccacttgtaccgactgctgtgttagatgagaaccacagtgctacagcagagtccagtcgccttctagacgtacctcgctacctctgtgaggggacggaatccccttaccagacaggacagctgcatccagccatcagggtagctgatttactgcagcacattaatctcatgaagacatcagacagctatgggttcaaagaggaatatgagagcttttttgaaggacagtcagcatcttgggatgtagctaaaaaagatcaaaatagagcaaaaaaccgatatggaaacattatagcatatgatcactccagagtgattttgcaacccgtagaggatgatccttcctcagattatattaatgccaactatattgatgtaagtatttttataggctaccagagaccaagtcattacattgcaacccaaggtcccgttcatgaaacagtgtatgatttctggaggatgatttggcaagaacaatctgcttgcattgtgatggttacaaatttagttgaggttggccgggttaaatgctataaatattggcctgatgatactgaagtttatggtgacttcaaagtaacgtgtgtagaaatggaaccacttgctgaatatgtagttaggacattcaccctggaaaggagggggtacaatgaaatccgtgaagttaaacagttccatttcacgggctggcctgaccatggagtgccctaccatgctacagggctgctttcctttatccggcgagtcaagttatcaaaccctcccagtgctggccccatcgttgtacattgcagtgctggtgctggacgaactggctgctacattgtgattgacatcatgctagacatggctgaaagagagggtgttgttgatatttacaattgtgtcaaagccttaagatctcggcgtattaatatggtccagacagaggaacagtacatttttattcatgatgccattttagaagcctgcttatgtggagaaactgccatacctgtctgtgaatttaaagctgcatattttgatatgattagaatagactcccagactaactcttcacatctcaaggatgaatttcagactctgaattcagtcacccctcgactacaagctgaagactgcagtatagcgtgcctgccaaggaaccatgacaagaaccgtttcatggacatgctgccacctgacagatgtctgccttttttaattacaattgatggggagagcagtaactacatcaatgctgctcttatggacagctacaggcaaccagctgctttcatcgtcacacaataccctctgccaaacactgtaaaagacttctggagattagtgtatgattatggctgtacctccattgtgatgttaaacgaagtcgacttgtcccagggctgccctcagtactggccagaggaagggatgctacgatatggccccatccaagtggaatgtatgtcttgttcaatggactgtgatgtgatcaaccggatttttaggatatgcaatctaacaagaccacaggaaggttatctgatggtgcaacagtttcagtacctaggatgggcttctcatcgagaagtgcctggatccaaaaggtcattcttgaaactgatacttcaggtggaaaagtggcaggaggaatgcgaggaaggggaaggccggacgattatccactgcctaaatggtggcgggcgaagtggcatgttctgtgctataggcatcgttgttgaaatggtgaaacggcaaaatgttgtcgatgttttccatgcagtaaagacactgaggaacagcaagccaaacatggtggaagccccggagcaataccgtttctgctatgatgtagctttggagtacctggaatcatcttagttgggtgagactctttaaagtgcatccatgaagaaacctgtccatctattgagccagcagctgttgtacctgttacacttgtgcagaaagattttaatgtggggggtgggagacttttacatttgagaggtaaaagtattttttttatgaagttgtgtatcttaataaaaaggactgaattagtttttattactatattaaagcatcaacatttcatgccacataaattatatttaataagaaccagattgaaatgagaacgtattggtgtttgtacagtgaacatgccaccttttttctcatggtttcagtagagcagctaccacatgttgcatgagttcatactttctacgtggcatttttctccctttctaaaatgaaagctgatgaatcttaaaaggaagaagaaaagaaaagctgtgcaaattcatagtaaagttcgttttttatatgtttccagtgtagcagatctctatataaatatataaatatatataactggcttattttcttttaatgtgcaatgatggctggatcatttaaagttctttttagaaaataacataagccaaagactcaagtgtaaatatgtctatatggagaaagcacattatatttattggttacttacattccttttttgatggctaaaatactaccaccacacaatcatcttttttttcctgaagaaagctttttctttagctaaaatcaattgtaaacgatttttgtagattattttttgtatgttttagtgtaagtagaagataaactttttattcataaaccaggaagcaatgttctttatagtgattctcttgtgtacatgcttgtgaattaaatttgtgtaaaatcccttggcaattgggtcttttaatataggaccaaattaaaacattttgctgaatatgtatagtttttcacaatttcattaggtaaataatggtttggtgatcatacatgagaaatgtacacattaaaaggccttgctgacaacttgcacaatgttgaacatagcctttaagcatcatttaaattttaaaggaatggagtttttcagcctgtggcccagcactggtcaagaaaacaagatggcaacatatatgctttcagggtcaaatttgagcaaactgtaaactgtcagggtgataaaatgtttctcttgatgtttacatgcacaagctttgcgttctgactataaaaagtgtgaacaaatcaatgccagattcctgttttgcgcattgtcatgggattcttaagtgaacctttctaaatgtggtcttgttcacatgctccacgtagctgtaacttcacatcatcagcttgcagtttgtaattgactaaagcattccagtgtcctctttctagattgccagctcatgacatggtgcttataaagatttaattaaagtaagaatgaaataaagtttttataattataacagtt

SEQ ID NO: 330696 - DNA, 4377 bp, Artificial Sequence
  derived and/or modified sequence
atggacaccaccgccgccgccgccctgcccgccttcgtggccctgctgctgctgagcccctggcccctgctgggcagcgcccagggccagttcagcgccggcggctgcaccttcgacgacggccccggcgcctgcgactaccaccaggacctgtacgacgacttcgagtgggtgcacgtgagcgcccaggagccccactacctgccccccgagatgccccagggcagctacatgatcgtggacagcagcgaccacgaccccggcgagaaggccagactgcagctgcccaccatgaaggagaacgacacccactgcatcgacttcagctacctgctgtacagccagaagggcctgaaccccggcaccctgaacatcctggtgagagtgaacaagggccccctggccaaccccatctggaacgtgaccggcttcaccggcagagactggctgagagccgagctggccgtgagcaccttctggcccaacgagtaccaggtgatcttcgaggccgaggtgagcggcggcagaagcggctacatcgccatcgacgacatccaggtgctgagctacccctgcgacaagagcccccacttcctgagactgggcgacgtggaggtgaacgccggccagaacgccaccttccagtgcatcgccaccggcagagacgccgtgcacaacaagctgtggctgcagagaagaaacggcgaggacatccccgtggcccagaccaagaacatcaaccacagaagattcgccgccagcttcagactgcaggaggtgaccaagaccgaccaggacctgtacagatgcgtgacccagagcgagagaggcagcggcgtgagcaacttcgcccagctgatcgtgagagagccccccagacccatcgcccccccccagctgctgggcgtgggccccacctacctgctgatccagctgaacgccaacagcatcatcggcgacggccccatcatcctgaaggaggtggagtacagaatgaccagcggcagctggaccgagacccacgccgtgaacgcccccacctacaagctgtggcacctggaccccgacaccgagtacgagatcagagtgctgctgaccagacccggcgagggcggcaccggcctgcccggcccccccctgatcaccagaaccaagtgcgccgagcccatgagaacccccaagaccctgaagatcgccgagatccaggccagaagaatcgccgtggactgggagagcctgggctacaacatcaccagatgccacaccttcaacgtgaccatctgctaccactacttcagaggccacaacgagagcaaggccgactgcctggacatggaccccaaggccccccagcacgtggtgaaccacctgcccccctacaccaacgtgagcctgaagatgatcctgaccaaccccgagggcagaaaggagagcgaggagaccatcatccagaccgacgaggacgtgcccggccccgtgcccgtgaagagcctgcagggcaccagcttcgagaacaagatcttcctgaactggaaggagcccctggaccccaacggcatcatcacccagtacgagatcagctacagcagcatcagaagcttcgaccccgccgtgcccgtggccggccccccccagaccgtgagcaacctgtggaacagcacccaccacgtgttcatgcacctgcaccccggcaccacctaccagttcttcatcagagccagcaccgtgaagggcttcggccccgccaccgccatcaacgtgaccaccaacatcagcgcccccaccctgcccgactacgagggcgtggacgccagcctgaacgagaccgccaccaccatcaccgtgctgctgagacccgcccaggccaagggcgcccccatcagcgcctaccagatcgtggtggaggagctgcacccccacagaaccaagagagaggccggcgccatggagtgctaccaggtgcccgtgacctaccagaacgccatgagcggcggcgccccctactacttcgccgccgagctgccccccggcaacctgcccgagcccgcccccttcaccgtgggcgacaacagaacctaccagggcttctggaacccccccctggcccccagaaagggctacaacatctacttccaggccatgagcagcgtggagaaggagaccaagacccagtgcgtgagaatcgccaccaaggccgccgccaccgaggagcccgaggtgatccccgaccccgccaagcagaccgacagagtggtgaagatcgccggcatcagcgccggcatcctggtgttcatcctgctgctgctggtggtgatcctgatcgtgaagaagagcaagctggccaagaagagaaaggacgccatgggcaacaccagacaggagatgacccacatggtgaacgccatggacagaagctacgccgaccagagcaccctgcacgccgaggaccccctgagcatcaccttcatggaccagcacaacttcagccccagactgcccaacgaccccctggtgcccaccgccgtgctggacgagaaccacagcgccaccgccgagagcagcagactgctggacgtgcccagatacctgtgcgagggcaccgagagcccctaccagaccggccagctgcaccccgccatcagagtggccgacctgctgcagcacatcaacctgatgaagaccagcgacagctacggcttcaaggaggagtacgagagcttcttcgagggccagagcgccagctgggacgtggccaagaaggaccagaacagagccaagaacagatacggcaacatcatcgcctacgaccacagcagagtgatcctgcagcccgtggaggacgaccccagcagcgactacatcaacgccaactacatcgacatctggctgtacagagacggctaccagagacccagccactacatcgccacccagggccccgtgcacgagaccgtgtacgacttctggagaatgatctggcaggagcagagcgcctgcatcgtgatggtgaccaacctggtggaggtgggcagagtgaagtgctacaagtactggcccgacgacaccgaggtgtacggcgacttcaaggtgacctgcgtggagatggagcccctggccgagtacgtggtgagaaccttcaccctggagagaagaggctacaacgagatcagagaggtgaagcagttccacttcaccggctggcccgaccacggcgtgccctaccacgccaccggcctgctgagcttcatcagaagagtgaagctgagcaacccccccagcgccggccccatcgtggtgcactgcagcgccggcgccggcagaaccggctgctacatcgtgatcgacatcatgctggacatggccgagagagagggcgtggtggacatctacaactgcgtgaaggccctgagaagcagaagaatcaacatggtgcagaccgaggagcagtacatcttcatccacgacgccatcctggaggcctgcctgtgcggcgagaccgccatccccgtgtgcgagttcaaggccgcctacttcgacatgatcagaatcgacagccagaccaacagcagccacctgaaggacgagttccagaccctgaacagcgtgacccccagactgcaggccgaggactgcagcatcgcctgcctgcccagaaaccacgacaagaacagattcatggacatgctgccccccgacagatgcctgcccttcctgatcaccatcgacggcgagagcagcaactacatcaacgccgccctgatggacagctacagacagcccgccgccttcatcgtgacccagtaccccctgcccaacaccgtgaaggacttctggagactggtgtacgactacggctgcaccagcatcgtgatgctgaacgaggtggacctgagccagggctgcccccagtactggcccgaggagggcatgctgagatacggccccatccaggtggagtgcatgagctgcagcatggactgcgacgtgatcaacagaatcttcagaatctgcaacctgaccagaccccaggagggctacctgatggtgcagcagttccagtacctgggctgggccagccacagagaggtgcccggcagcaagagaagcttcctgaagctgatcctgcaggtggagaagtggcaggaggagtgcgaggagggcgagggcagaaccatcatccactgcctgaacggcggcggcagaagcggcatgttctgcgccatcggcatcgtggtggagatggtgaagagacagaacgtggtggacgtgttccacgccgtgaagaccctgagaaacagcaagcccaacatggtggaggcccccgagcagtacagattctgctacgacgtggccctggagtacctggagagcagctag

SEQ ID NO: 330697 - DNA, 4374 bp, Artificial Sequence
  derived and/or modified sequence
atggacaccaccgccgccgccgccctgcccgccttcgtggccctgctgctgctgagcccctggcccctgctgggcagcgcccagggccagttcagcgccggcggctgcaccttcgacgacggccccggcgcctgcgactaccaccaggacctgtacgacgacttcgagtgggtgcacgtgagcgcccaggagccccactacctgccccccgagatgccccagggcagctacatgatcgtggacagcagcgaccacgaccccggcgagaaggccagactgcagctgcccaccatgaaggagaacgacacccactgcatcgacttcagctacctgctgtacagccagaagggcctgaaccccggcaccctgaacatcctggtgagagtgaacaagggccccctggccaaccccatctggaacgtgaccggcttcaccggcagagactggctgagagccgagctggccgtgagcaccttctggcccaacgagtaccaggtgatcttcgaggccgaggtgagcggcggcagaagcggctacatcgccatcgacgacatccaggtgctgagctacccctgcgacaagagcccccacttcctgagactgggcgacgtggaggtgaacgccggccagaacgccaccttccagtgcatcgccaccggcagagacgccgtgcacaacaagctgtggctgcagagaagaaacggcgaggacatccccgtggcccagaccaagaacatcaaccacagaagattcgccgccagcttcagactgcaggaggtgaccaagaccgaccaggacctgtacagatgcgtgacccagagcgagagaggcagcggcgtgagcaacttcgcccagctgatcgtgagagagccccccagacccatcgcccccccccagctgctgggcgtgggccccacctacctgctgatccagctgaacgccaacagcatcatcggcgacggccccatcatcctgaaggaggtggagtacagaatgaccagcggcagctggaccgagacccacgccgtgaacgcccccacctacaagctgtggcacctggaccccgacaccgagtacgagatcagagtgctgctgaccagacccggcgagggcggcaccggcctgcccggcccccccctgatcaccagaaccaagtgcgccgagcccatgagaacccccaagaccctgaagatcgccgagatccaggccagaagaatcgccgtggactgggagagcctgggctacaacatcaccagatgccacaccttcaacgtgaccatctgctaccactacttcagaggccacaacgagagcaaggccgactgcctggacatggaccccaaggccccccagcacgtggtgaaccacctgcccccctacaccaacgtgagcctgaagatgatcctgaccaaccccgagggcagaaaggagagcgaggagaccatcatccagaccgacgaggacgtgcccggccccgtgcccgtgaagagcctgcagggcaccagcttcgagaacaagatcttcctgaactggaaggagcccctggaccccaacggcatcatcacccagtacgagatcagctacagcagcatcagaagcttcgaccccgccgtgcccgtggccggccccccccagaccgtgagcaacctgtggaacagcacccaccacgtgttcatgcacctgcaccccggcaccacctaccagttcttcatcagagccagcaccgtgaagggcttcggccccgccaccgccatcaacgtgaccaccaacatcagcgcccccaccctgcccgactacgagggcgtggacgccagcctgaacgagaccgccaccaccatcaccgtgctgctgagacccgcccaggccaagggcgcccccatcagcgcctaccagatcgtggtggaggagctgcacccccacagaaccaagagagaggccggcgccatggagtgctaccaggtgcccgtgacctaccagaacgccatgagcggcggcgccccctactacttcgccgccgagctgccccccggcaacctgcccgagcccgcccccttcaccgtgggcgacaacagaacctaccagggcttctggaacccccccctggcccccagaaagggctacaacatctacttccaggccatgagcagcgtggagaaggagaccaagacccagtgcgtgagaatcgccaccaaggccgccgccaccgaggagcccgaggtgatccccgaccccgccaagcagaccgacagagtggtgaagatcgccggcatcagcgccggcatcctggtgttcatcctgctgctgctggtggtgatcctgatcgtgaagaagagcaagctggccaagaagagaaaggacgccatgggcaacaccagacaggagatgacccacatggtgaacgccatggacagaagctacgccgaccagagcaccctgcacgccgaggaccccctgagcatcaccttcatggaccagcacaacttcagccccagactgcccaacgaccccctggtgcccaccgccgtgctggacgagaaccacagcgccaccgccgagagcagcagactgctggacgtgcccagatacctgtgcgagggcaccgagagcccctaccagaccggccagctgcaccccgccatcagagtggccgacctgctgcagcacatcaacctgatgaagaccagcgacagctacggcttcaaggaggagtacgagagcttcttcgagggccagagcgccagctgggacgtggccaagaaggaccagaacagagccaagaacagatacggcaacatcatcgcctacgaccacagcagagtgatcctgcagcccgtggaggacgaccccagcagcgactacatcaacgccaactacatcgacgtgagcatcttcatcggctaccagagacccagccactacatcgccacccagggccccgtgcacgagaccgtgtacgacttctggagaatgatctggcaggagcagagcgcctgcatcgtgatggtgaccaacctggtggaggtgggcagagtgaagtgctacaagtactggcccgacgacaccgaggtgtacggcgacttcaaggtgacctgcgtggagatggagcccctggccgagtacgtggtgagaaccttcaccctggagagaagaggctacaacgagatcagagaggtgaagcagttccacttcaccggctggcccgaccacggcgtgccctaccacgccaccggcctgctgagcttcatcagaagagtgaagctgagcaacccccccagcgccggccccatcgtggtgcactgcagcgccggcgccggcagaaccggctgctacatcgtgatcgacatcatgctggacatggccgagagagagggcgtggtggacatctacaactgcgtgaaggccctgagaagcagaagaatcaacatggtgcagaccgaggagcagtacatcttcatccacgacgccatcctggaggcctgcctgtgcggcgagaccgccatccccgtgtgcgagttcaaggccgcctacttcgacatgatcagaatcgacagccagaccaacagcagccacctgaaggacgagttccagaccctgaacagcgtgacccccagactgcaggccgaggactgcagcatcgcctgcctgcccagaaaccacgacaagaacagattcatggacatgctgccccccgacagatgcctgcccttcctgatcaccatcgacggcgagagcagcaactacatcaacgccgccctgatggacagctacagacagcccgccgccttcatcgtgacccagtaccccctgcccaacaccgtgaaggacttctggagactggtgtacgactacggctgcaccagcatcgtgatgctgaacgaggtggacctgagccagggctgcccccagtactggcccgaggagggcatgctgagatacggccccatccaggtggagtgcatgagctgcagcatggactgcgacgtgatcaacagaatcttcagaatctgcaacctgaccagaccccaggagggctacctgatggtgcagcagttccagtacctgggctgggccagccacagagaggtgcccggcagcaagagaagcttcctgaagctgatcctgcaggtggagaagtggcaggaggagtgcgaggagggcgagggcagaaccatcatccactgcctgaacggcggcggcagaagcggcatgttctgcgccatcggcatcgtggtggagatggtgaagagacagaacgtggtggacgtgttccacgccgtgaagaccctgagaaacagcaagcccaacatggtggaggcccccgagcagtacagattctgctacgacgtggccctggagtacctggagagcagctag

SEQ ID NO: 330698 - DNA, 969 bp, Artificial Sequence
  derived and/or modified sequence
atgaatctgttccagtcagtaaccagcgcccttgataactccttggccaaggacccaaccgcagtgatttttggggaagatgttgctttcggtggagttttccgttgcaccgtgggcctgagagacaagtacggtaaggatcgcgtcttcaatactccactgtgcgaacagggtatagtaggatttggaatcggaattgctgtcacaggagcaacagccatagccgaaatccaattcgccgactacatcttccccgctttcgaccaaattgttaacgaggccgctaagtacagatatcggtccggcgacctttttaactgtggatccctgaccatccgatcgccctggggctgcgttggtcatggcgccctctaccattctcagtcaccagaagccttttttgcacattgccccggcattaaagtggtcattccgagaagtccttttcaggccaagggtttactgctgagctgcatagaagacaaaaatccctgtatctttttcgagcccaagatcctatatcgcgctgcagcagaagaggtcccaattgagccttataatatccctttaagccaagccgaggtgatccaggagggctcagacgtcaccttggtcgcatggggcactcaggttcatgtgatcagggaggttgcatcgatggccaaagaaaagttgggggtgtcatgcgaggttatcgacctgcgaactatcatcccttgggatgtagacaccatctgtaaaagcgtaattaagaccggacgtctcctcatcagtcacgaggcccccctgacggggggattcgcttctgaaatcagtagcactgtgcaagaggagtgttttctgaatctggaggcccccattagcagggtgtgtggatacgacaccccttttccgcatatcttcgaacctttctatattcccgataagtggaagtgctatgacgcactcaggaaaatgataaattactag

SEQ ID NO: 330699 - DNA, 969 bp, Artificial Sequence
  derived and/or modified sequence
atgaacctcttccagagcgtgaccagcgccctggacaacagcctggccaaggaccccacagctgtgatctttggagaagatgtggccttcggcggcgtcttccgctgcaccgtgggcctgcgggacaagtatggcaaggacagagtcttcaacacccccctgtgtgagcagggcatcgtgggcttcggcatcggcattgctgtgactggagccacagccatcgccgagatccagtttgctgactacatcttccctgcctttgaccagatcgtgaatgaggccgccaagtaccgctacagaagtggggacctcttcaactgtggcagcctgaccatccgcagcccctggggctgtgtgggccatggagccctgtaccacagccagagccctgaggccttctttgcccactgccccggcatcaaggtggtgatccccaggagccccttccaggccaagggcctgctgctgagctgcatcgaggacaagaacccctgcatcttctttgagcccaagatcctgtacagagctgctgctgaggaggtgcccatcgagccctacaacatccccctgagccaggccgaggtgatccaggagggcagtgatgtgaccctggtggcctggggcacccaggtgcacgtgatccgggaggtggcctccatggccaaggagaagctgggcgtgtcctgtgaggtgattgacctgcggaccatcatcccctgggatgtggacaccatctgcaagagcgtcatcaagacaggccgcctgctgatcagccatgaggcccccctgaccggcggctttgccagcgagatcagcagcacagtgcaggaggagtgcttcctgaacctggaggcccccatcagccgggtgtgtggctatgacacccccttcccccacatctttgagcccttctacatcccagacaagtggaagtgctatgatgccctgaggaagatgatcaactactag

SEQ ID NO: 330700 - DNA, 969 bp, Artificial Sequence
  derived and/or modified sequence
atgaacctgttccagagcgtgaccagcgccctggacaacagcctggccaaagaccccactgcagtaatctttggagaggatgtggcttttggcggagtgttcagatgtactgtggggcttagagacaagtacgggaaggatcgcgttttcaatacgcctctgtgtgagcaggggatcgtgggatttgggatcgggatcgctgtgactggtgccaccgcgatcgccgaaattcagttcgcagactacatctttccagcctttgatcagatcgtgaatgaagctgcgaaatatcgataccggtctggcgacctcttcaattgcggttctcttactattagatctccgtggggatgcgtgggccacggggcgttgtatcatagccagagccccgaggctttctttgctcactgtcccgggataaaggtggtcatccctcggtctcctttccaggccaagggactcctcctgtcatgtattgaagacaaaaatccgtgtattttttttgagcctaagatactgtaccgcgccgcagccgaggaggttccaatcgagccatataacattcctctgagtcaggctgaagttatccaggaagggtctgacgttaccctggtcgcttggggcactcaggttcatgtcatcagagaggtagccagcatggctaaggaaaaactgggtgtgtcatgtgaggtgatagacctgaggactattatcccctgggatgtggacaccatatgcaagagcgtgatcaaaactggcagactcttaatctcccacgaagcccccttgactggaggatttgcttctgagatctcctccaccgtccaagaggaatgttttctgaaccttgaagcacctatttcaagagtgtgtgggtacgatactccctttccgcacattttcgagccattttacattccagataagtggaagtgctatgacgctctgcggaagatgattaattactag

SEQ ID NO: 330701 - DNA, 969 bp, Artificial Sequence
  derived and/or modified sequence
atgaacttgttccagagcgtgacctctgccttagataacagtctcgcaaaagaccctactgcggtgatatttggggaggatgtggcttttggcggagtatttcgttgtacagtgggcctacgagacaaatacggaaaagatagggtgtttaacactccgctctgcgagcaggggatagtcggttttggaattggcattgccgtgacaggtgctaccgccattgccgagatacagtttgctgattacatctttcccgctttcgatcagatcgtgaacgaggctgctaagtatcgataccggtcaggggatctgttcaattgcggctcgctgaccatacgtagcccttgggggtgtgtgggtcacggcgctttataccatagtcagagcccagaagcttttttcgcacattgtccaggcatcaaggtggtcattccacgttcaccattccaggctaagggcctgctcctgtcgtgtatcgaggacaaaaatccatgtatattttttgagcccaaaatcctgtaccgcgctgccgcagaggaggtgccaatcgagccatacaacatacctttaagccaggccgaagttatacaagaagggtccgatgttacgctggtggcttgggggactcaagtgcacgtcatccgagaggtggcatcaatggcaaaggaaaagctgggtgttagctgcgaggtcatcgacctgagaacaatcatcccctgggatgtggacactatttgtaagagtgtgatcaagaccggcagactgctgataagccacgaggcccctctcacagggggtttcgcaagtgagatctcttcgactgtccaggaggagtgttttcttaacctggaagcccctatctcacgggtgtgcgggtatgacaccccattccctcacatctttgaacctttctacatccctgacaaatggaagtgttatgacgcgctgcgcaaaatgatcaactattag

SEQ ID NO: 330702 - DNA, 969 bp, Artificial Sequence
  derived and/or modified sequence
atgaacctgttccagagcgtgaccagcgccctggacaacagcctggccaaggaccccaccgccgtgatcttcggcgaggacgtggccttcggcggcgtgttcagatgcaccgtgggcctgagagacaagtacggcaaggacagagtgttcaacacccccctgtgcgagcagggcatcgtgggcttcggcatcggcatcgccgtgaccggcgccaccgccatcgccgagatccagttcgccgactacatcttccccgccttcgaccagatcgtgaacgaggccgccaagtacagatacagaagcggcgacctgttcaactgcggcagcctgaccatcagaagcccctggggctgcgtgggccacggcgccctgtaccacagccagagccccgaggccttcttcgcccactgccccggcatcaaggtggtgatccccagaagccccttccaggccaagggcctgctgctgagctgcatcgaggacaagaacccctgcatcttcttcgagcccaagatcctgtacagagccgccgccgaggaggtgcccatcgagccctacaacatccccctgagccaggccgaggtgatccaggagggcagcgacgtgaccctggtggcctggggcacccaggtgcacgtgatcagagaggtggccagcatggccaaggagaagctgggcgtgagctgcgaggtgatcgacctgagaaccatcatcccctgggacgtggacaccatctgcaagagcgtgatcaagaccggcagactgctgatcagccacgaggcccccctgaccggcggcttcgccagcgagatcagcagcaccgtgcaggaggagtgcttcctgaacctggaggcccccatcagcagagtgtgcggctacgacacccccttcccccacatcttcgagcccttctacatccccgacaagtggaagtgctacgacgccctgagaaagatgatcaactactag

SEQ ID NO: 330703 - protein, 218 aa, Artificial Sequence
  derived and/or modified sequence
MAVVAAAAGWLLRLRAAGAEGHWRRLPGAGLARGFLHPAATVEDAAQRRQVAHFTFQPDPEPREYGQTQKMNLFQSVTSALDNSLAKDPTAVIFGEDVAFGGVFRCTVGLRDKYGKDRVFNTPLCEQGIVGFGIGIAVTGATAIAEIQFADYIFPAFDQIVNEAAKYRYRSGDLFNCGSLTIRSPWGCVGHGALYHSQSPEAFFAHCPGIKIKVISLS

SEQ ID NO: 330704 - DNA, 657 bp, Artificial Sequence
  derived and/or modified sequence
atggccgtggtggcggccgccgcaggttggttactgaggcttcgcgcagctggcgccgaggggcactggaggagattacccggggccggactggcccggggatttctacatccggctgccactgttgaagatgcagctcagaggagacaggtcgcccacttcacctttcagccggatcccgaacctcgcgaatacggacagactcaaaagatgaatttgtttcagtcggtaacttcagcactagataacagtctcgcaaaagaccccacagcagtaatctttggcgaggatgtcgcattcggaggcgtctttcgctgcactgtgggtctgagagacaaatatggcaaagaccgcgtctttaatactccgctctgcgagcaggggattgtgggctttgggatagggatagccgtgaccggggcaactgccatcgccgaaattcagttcgcagactatatcttcccagcctttgaccaaatcgtcaatgaggccgccaaatatcggtaccgcagtggagatctttttaactgcgggagtctgactatccgtagcccttggggctgtgtgggccatggcgccctgtatcattctcagtcaccagaggccttcttcgctcactgccctgggataaaaataaaagtgatttccctttcttag

SEQ ID NO: 330705 - DNA, 657 bp, Artificial Sequence
  derived and/or modified sequence
atggccgtagtcgctgccgcagcaggctggttattgaggctacgtgccgccggggccgaagggcactggcgcagactcccgggagcaggccttgctcgagggtttctgcaccccgccgcaacagtggaggatgccgctcaacgtcggcaagtggcccatttcacctttcagcccgacccggagccgagagagtatgggcagactcagaaaatgaacttgttccaatccgtgaccagcgccctcgataattctttggcaaaagaccctacagcagtgatctttggagaggacgttgcttttggaggcgtgtttaggtgcacagtggggctgcgtgataagtacggaaaggaccgagtgtttaacacccctctgtgtgaacagggaattgttggattcggaatcggcattgcagtgacaggcgccaccgcgattgccgagattcagtttgctgactatattttccccgcctttgaccagatcgtgaacgaggccgccaagtatcgctatcggtctggcgacctctttaattgcgggtccctgaccataaggagcccttggggttgtgtcgggcacggagctctctatcattcacaaagtcccgaagcttttttcgcccactgtccgggcatcaagatcaaggtcatctctttgtcctag

SEQ ID NO: 330706 - DNA, 657 bp, Artificial Sequence
  derived and/or modified sequence
atggctgtggtggccgctgctgctggctggctgctgcggctgcgggctgctggagctgagggccactggaggcggctgcctggagctggcctggcccggggcttcctgcaccctgctgccaccgtggaggatgctgcccagaggcggcaggtggcccacttcaccttccagcctgaccctgagccccgggagtatggccagacccagaagatgaacctcttccagagcgtgaccagcgccctggacaacagcctggccaaggaccccacagctgtgatctttggagaagatgtggccttcggcggcgtcttccgctgcaccgtgggcctgcgggacaagtatggcaaggacagagtcttcaacacccccctgtgtgagcagggcatcgtgggcttcggcatcggcattgctgtgactggagccacagccatcgccgagatccagtttgctgactacatcttccctgcctttgaccagatcgtgaatgaggccgccaagtaccgctacagaagtggggacctcttcaactgtggcagcctgaccatccgcagcccctggggctgtgtgggccatggagccctgtaccacagccagagccctgaggccttctttgcccactgccccggcatcaagatcaaggtgatcagcctgtcctag

SEQ ID NO: 330707 - DNA, 657 bp, Artificial Sequence
  derived and/or modified sequence
atggccgtggtggccgccgccgccggctggctgctgcggctgcgggcagccggagcggagggccactggcgacgccttcctggtgcaggcttggcccgcggcttcctccatcctgcagccacggtggaagacgcagcccaacgacgccaagtggcccatttcacatttcagcccgatcccgaaccacgggagtacggacagacccagaagatgaatctgttccagtctgtgacaagtgcactcgacaatagtctggcgaaggatcccaccgccgtaatttttggcgaagacgtggcgttcggcggggtttttcgatgtacagtaggactcagggataagtacggcaaagatcgagtgttcaacacccccctgtgtgagcaaggcatcgtgggatttggcattggcattgcggttactggcgcgactgctatcgccgagattcagtttgccgattacatcttcccggctttcgaccagattgtcaacgaagcagccaagtatcgatacaggagtggcgacctctttaattgtggttctctgactattaggtcaccatggggctgcgtcggccacggagctctctatcatagtcagagccccgaagcctttttcgcccactgccccggcattaaaatcaaggtgatttctctgagctag

SEQ ID NO: 330708 - DNA, 657 bp, Artificial Sequence
  derived and/or modified sequence
atggccgtggtggccgccgccgccggctggctgctgcggctgcgggccgccggggctgagggacactggcgtcggcttcctggcgccgggcttgccagaggcttcctgcaccccgctgctacggtggaagacgccgctcagagacgccaggtggcccattttaccttccaaccagaccccgagcctcgtgaatatggccagacacagaaaatgaacctcttccaatccgttacaagcgccctggacaattctctagctaaagacccgacagccgtgatcttcggagaagatgtggcattcggcggagtgttccgctgcaccgtgggtcttagagataagtatggaaaagacagagtgttcaacacaccactttgcgagcagggaattgtagggtttgggatcggcatcgctgttacaggggcaacagctattgccgaaatacagtttgcagattatatattccctgcctttgaccagattgtcaacgaagccgcaaaatacaggtaccggtctggagacttgttcaattgtggaagtctgacaattcgtagtccttgggggtgcgtggggcatggtgcgctgtaccatagtcagtctccggaggcttttttcgctcactgtccaggcattaaaatcaaagtgatctcactttcatag

SEQ ID NO: 330709 - DNA, 657 bp, Artificial Sequence
  derived and/or modified sequence
atggctgtcgtggctgccgctgcaggatggctactcagactgagagctgccggagcggaaggccattggaggagactgccgggagctggtttggccagaggattcctgcaccctgctgccaccgtagaggacgctgctcagcgtcgccaggttgcccacttcacttttcagcctgatcctgaacccagggagtacggccaaacgcagaagatgaacttattccagtctgtgacttctgccctggacaattctctagccaaggaccccacagccgttatatttggtgaagatgtggcctttggcggtgtattccggtgtactgtgggtctgagagacaaatatgggaaggaccgggtctttaatacacccttatgcgagcaaggcattgttggcttcgggataggaatcgccgtcactggggcaactgccatcgccgaaattcaatttgcggactatatcttccccgcattcgatcaaatcgtcaatgaggcggcaaaatacaggtacaggtctggagacttgttcaactgtggatctctgacaatccgatcaccttggggttgcgtgggccatggtgccctctaccattcacaatccccggaggccttcttcgcacactgccctgggatcaaaatcaaggtgatcagtctaagctag

SEQ ID NO: 330710 - DNA, 657 bp, Artificial Sequence
  derived and/or modified sequence
atggccgtcgtggccgcagccgctggctggctgctgcgcctcagagccgcaggagctgagggccactggaggaggcttccaggagccggtctggcaagagggttcctgcaccccgcagccaccgtggaggatgctgcacagcgaagacaagtcgcccattttacattccagccagaccctgaaccacgggaatatggccagacacagaaaatgaacctgttccagagcgtaactagcgctctggataatagcttagctaaggacccaactgcagtgatctttggtgaggacgtggcttttggcggtgtgtttagatgcacagtcggactgagagacaaatacggcaaggatcgcgtctttaacacgcccctgtgtgagcaggggatcgttggattcggcatcggtattgcagtgaccggcgctacagccatcgccgaaatccagttcgcagactacatcttccctgcgtttgaccagatcgtcaacgaggctgcaaagtacagatatcgctctggggatctgttcaattgcggctctctgacaataaggtctccctggggctgcgtgggccacggagccctctaccactcccagagtccggaggcttttttcgcccattgccccggtatcaagattaaagttatctctctcagctag

SEQ ID NO: 330711 - DNA, 743 bp, Artificial Sequence
  derived and/or modified sequence
aggcggcgtgcggctgcatagcctgagaatcccggtggtgagcggggatggcggttgtagcggcggctgccggctggctactcaggctcagggcggcaggggctgaggggcactggcgtcggcttcctggcgcggggctggcgcggggctttttgcaccccgccgcgactgtcgaggatgcggcccagaggcggcaggtggctcattttactttccagccagatccggagccccgggagtacgggcaaactcagaaaatgaatcttttccagtctgtaacaagtgccttggataactcattggccaaagatcctactgcagtaatatttggtgaagatgttgcctttggtggagtctttagatgcactgttggcttgcgagacaaatatggaaaagatagagtttttaataccccattgtgtgaacaaggaattgttggatttggaatcggaattgcggtcactggagctactgccattgcggaaattcagtttgcagattatattttccctgcatttgatcagattgttaatgaagctgccaagtatcgctatcgctctggggatctttttaactgtggaagcctcactatccggtccccttggggctgtgttggtcatggggctctctatcattctcagagtcctgaagcattttttgcccattgcccaggaatcaagatcaaagttataagcttatcttagttgagtagatgttgcctgatttttgaatgtgagctagaa

SEQ ID NO: 330712 - DNA, 657 bp, Artificial Sequence
  derived and/or modified sequence
atggccgtggtggccgccgccgccggctggctgctgagactgagagccgccggcgccgagggccactggagaagactgcccggcgccggcctggccagaggcttcctgcaccccgccgccaccgtggaggacgccgcccagagaagacaggtggcccacttcaccttccagcccgaccccgagcccagagagtacggccagacccagaagatgaacctgttccagagcgtgaccagcgccctggacaacagcctggccaaggaccccaccgccgtgatcttcggcgaggacgtggccttcggcggcgtgttcagatgcaccgtgggcctgagagacaagtacggcaaggacagagtgttcaacacccccctgtgcgagcagggcatcgtgggcttcggcatcggcatcgccgtgaccggcgccaccgccatcgccgagatccagttcgccgactacatcttccccgccttcgaccagatcgtgaacgaggccgccaagtacagatacagaagcggcgacctgttcaactgcggcagcctgaccatcagaagcccctggggctgcgtgggccacggcgccctgtaccacagccagagccccgaggccttcttcgcccactgccccggcatcaagatcaaggtgatcagcctgagctag

SEQ ID NO: 330713 - protein, 762 aa, Artificial Sequence
  derived and/or modified sequence
MVETRLANDLAEFEGDFSLEGLRLWKTAFSAMTQNPRPGSPLRSGQGVVNKGSSNSPKMVEDKKIVIMPCKCAPSRQLVQVWLQAKEEYERSKKLPKTKPTGVVKSAENFSSSVNPDDKPVVPPKMDVSPCILPTTAHTKEDVDNSQIALQAPTTGCSQTASESQMLPPVASASDPEKDEDDDDNYYISYSSPDSPVIPPWQQPISPDSKALNGDDRPSSPVEELPSLAFENFLKPIKDGIQKSPCSEPQEPLVISPINTRARTGKCESLCFHSTPIIQRKLLERLPEAPGLSPLSTEPKTQKLSNKKGSNTDTLRRVLLTQAKNQFAAVNTPQKETSQIDGPSLNNTYGFKVSIQNLQEAKALHEIQNLTLISVELHARTRRDLEPDPEFDPICALFYCISSDTPLPDTEKTELTGVIVIDKDKTVFSQDIRYQTPLLIRSGITGLEVTYAADEKALFHEIANIIKRYDPDILLGYEIQMHSWGYLLQRAAALSIDLCRMISRVPDDKIENRFAAERDEYGSYTMSEINIVGRITLNLWRIMRNEVALTNYTFENVSFHVLHQRFPLFTFRVLSDWFDNKTDLYRWKMVDHYVSRVRGNLQMLEQLDLIGKTSEMARLFGIQFLHVLTRGSQYRVESMMLRIAKPMNYIPVTPSVQQRSQMRAPQCVPLIMEPESRFYSNSVLVLDFQSLYPSIVIAYNYCFSTCLGHVENLGKYDEFKFGCTSLRVPPDLLYQVRHDITVSPNGVAFVKIANKCRPEGMA

SEQ ID NO: 330714 - DNA, 2289 bp, Artificial Sequence
  derived and/or modified sequence
atggttgaaaccagactggcgaatgacctggccgaattcgagggcgacttttcactagagggacttcggctgtggaagaccgccttcagtgccatgacgcaaaatccaagacctggaagccccctcaggagtgggcagggcgtggtgaataaaggttcaagcaattccccgaaaatggtggaggataagaaaattgtgatcatgccctgtaaatgtgcccccagcaggcagttggtgcaggtgtggctgcaggctaaagaagaatacgagcgatctaaaaaattgcctaagacgaagcctacaggagtcgtgaagagcgcggaaaacttctcctcctctgtaaatcctgacgacaagcctgtagtgcctccaaaaatggacgtttccccatgtatcttgcctaccaccgctcacaccaaggaggatgttgacaactcgcagatagctctccaagcccccactacaggttgcagccaaactgctagtgagtcccagatgttgcctcctgtggccagtgcctcagatccagagaaggacgaagatgacgacgacaattactacatctcttatagttctcccgacagtcctgtgattccgccatggcagcagccgattagcccagacagtaaggcgctgaacggcgacgacaggccaagttctcctgttgaagagctcccatcccttgcattcgagaattttctcaagccgattaaagatggaatccagaagagtccttgcagtgaacctcaggaacccctggtgataagtcccattaacactcgcgcacggacaggtaaatgtgaaagtctatgcttccactccaccccgatcatccaacggaaactgctcgagcgcctgcctgaagccccgggacttagcccactgtccactgaacctaagactcagaagttgagtaacaagaagggcagcaatactgacactctgcgcagagtactcttgacccaagctaagaatcagttcgccgctgtaaacacgccccagaaagaaaccagccagatagacggccctagtctgaataacacatacggatttaaggtgagcatccagaacctccaagaagcaaaagccctacacgaaattcaaaacctgactctgatctctgtggaacttcatgcccggactcgaagagatctagaacccgatcctgaatttgacccaatttgcgctttgttctactgcatctcatccgatacacccttgccagacacagagaaaaccgagctcactggcgtgattgtaattgataaagacaagacggtttttagtcaagacattcgctatcagacccccctgttaatccgatcaggcattacagggctagaggtcacctacgcggccgacgaaaaggctttgttccacgagatagctaacattataaagaggtacgaccctgatattctgctgggctatgagatccagatgcatagctgggggtacctcctgcagcgggcagctgccttgtctatcgacctgtgtcgtatgatcagtcgggtccctgacgacaagattgagaacagattcgccgccgagagagacgagtacggtagctacactatgtccgagatcaacatagttgggaggatcactctgaatctttggcgaatcatgagaaatgaggtcgcgttgacaaactacacgtttgagaatgtaagctttcacgtgctgcaccaaaggtttccactctttaccttcagagtgctgtccgactggtttgacaacaagactgatctgtacaggtggaaaatggtagaccattatgtaagtagagtgagggggaatctccagatgctcgaacagctggacctgattggtaaaaccagtgagatggctaggttatttggcatccagtttctgcacgtcctgacgcgtgggagccagtacagagtggagagtatgatgctgcggattgccaaaccgatgaactatattccggtgacgccctctgtgcagcagcgcagccagatgcgggcccctcagtgcgtcccccttattatggagccggagtctcggttttatagcaatagtgtcctcgtcctggacttccagagcttgtaccccagcatagtgatagcctataactactgcttctccacttgtctggggcatgtagagaatcttggtaaatacgacgaattcaaatttgggtgtacatccttgcgagtgccccctgatctgctctaccaagtcaggcacgacatcacagtgtcccccaacggcgtggctttcgttaagatcgccaacaagtgtagaccggaagggatggcttag

SEQ ID NO: 330715 - DNA, 2289 bp, Artificial Sequence
  derived and/or modified sequence
atggtggagacccggctggccaatgacctggccgagtttgaaggagacttcagcctggagggcctgcggctgtggaagacagccttcagcgccatgacccagaacccccggcccggcagccccctgcggagcggccagggcgtggtgaacaagggcagcagcaacagccccaagatggtggaggacaagaagatcgtcatcatgccctgcaagtgtgcccccagccggcagctggtgcaggtgtggctgcaggccaaggaggagtatgaaagaagcaagaagctgcccaagaccaagcccactggagtggtgaagtctgctgagaacttcagcagctctgtgaacccagatgacaagcctgtggtgccccccaagatggatgtgagcccctgcatcctgcccaccacagcccacaccaaggaggatgtggacaacagccagatcgccctgcaggcccccaccaccggctgcagccagacagccagcgagagccagatgctgccccctgtggccagcgccagtgaccctgagaaggatgaagatgatgatgacaactactacatctcctacagcagcccagacagccctgtgattcctccctggcagcagcccatcagcccagacagcaaggccctgaatggagatgaccggcccagcagccctgtggaggagctgcccagcctggcctttgagaacttcctgaagcccatcaaggatggcatccagaagagcccctgcagcgagccccaggagcccctggtgatcagccccatcaacacccgggccaggactggaaaatgtgagagcctgtgcttccacagcacccccatcatccagaggaagctgctggagcggctgcctgaggcccctggcctgagccccctgagcacagagcccaagacccagaagctgagcaacaagaagggcagcaacacagacaccctgcggcgggtgctgctgacccaggccaagaaccagtttgctgctgtgaacaccccccagaaggagaccagccagattgatggccccagcctgaacaacacctacggcttcaaggtgtccatccagaacctgcaggaggccaaggccctgcacgagatccagaacctgaccctcatctctgtggagctgcacgcccggacccggcgggacctggagccagaccctgagtttgaccccatctgtgccctcttctactgcatcagcagtgacacccccctgcctgacacagagaagacagagctgactggagtgattgtgattgacaaggacaagacagtgttcagccaggacatccgctaccagacccccctgctgatccgcagcggcatcaccggcctggaggtgacctacgccgcagatgagaaggccctcttccacgagatcgccaacatcatcaagagatatgaccctgacatcctgctgggctatgagatccagatgcacagctggggctacctgctgcagagagctgctgccctgagcattgacctgtgcaggatgatcagccgggtgcctgatgacaagattgaaaatagatttgctgctgagagagatgaatatggcagctacaccatgtctgagatcaacatcgtgggccgcatcaccctgaacctgtggaggatcatgagaaatgaggtggccctgaccaactacacctttgaaaatgtgtccttccacgtgctgcaccagcgcttccccctcttcaccttccgggtgctgagtgactggtttgacaacaagacagacctgtaccgctggaagatggtggaccactacgtgtcccgggtgcggggcaacctgcagatgctggagcagctggacctgattggcaagaccagcgagatggcccggctgtttggcatccagttcctgcacgtgctgacccggggcagccagtacagagtggagagcatgatgctgagaattgccaagcccatgaactacatccctgtgaccccatctgtgcagcagaggagccagatgagggccccccagtgtgtgcccctcatcatggagcctgagagccgcttctacagcaacagcgtgctggtgctggacttccagagcctgtaccccagcatcgtgattgcctacaactactgcttcagcacctgcctgggccacgtggagaacctgggcaagtatgatgagttcaagtttggctgcaccagcctgcgggtgcccccagacctgctgtaccaggtgagacatgacatcaccgtgagccccaatggagtggcctttgtgaagatcgccaacaagtgcaggcctgagggcatggcctag

SEQ ID NO: 330716 - DNA, 2289 bp, Artificial Sequence
  derived and/or modified sequence
atggtggagacccggctggccaacgacctggccgagttcgagggcgatttcagtttagaagggctgcgcctttggaagaccgccttttcagccatgacccaaaacccccgtcccggctcccctctaaggtccgggcagggagtcgtcaacaaagggtcaagcaattcacccaagatggttgaggataaaaaaatcgttatcatgccttgtaaatgcgcccctagtagacagctggtacaggtttggctccaggcgaaggaggagtatgaacgctctaagaagcttccgaagacaaaacctaccggtgtggtgaagtcagcagaaaactttagcagtagcgtgaacccggatgataagccagtggttccccccaagatggacgtctcgccatgcattctccctacaactgcccacacaaaagaagatgtggacaatagccagatcgcccttcaagctcccaccacaggctgctcccagaccgctagtgaatcccagatgttgcctcccgttgcctccgcatctgaccctgagaaagatgaagacgatgacgataactactatatcagttactctagccccgatagtcctgtcattcccccatggcagcaaccaattagtcccgattctaaagcccttaatggcgacgatagaccatcatctccggtggaggaattgccatccctcgccttcgagaatttcctcaaacctattaaggacggcatacaaaaaagcccctgctcggagcctcaggagccactggtcatctctcccatcaacacacgcgcccggacgggcaaatgcgaaagcctctgctttcattccacgccaataattcaacgtaaactcctggaaagattgcccgaagcccctggcctttctcctctaagtactgaacccaagacacagaaactgagtaacaagaaagggtccaatacagatacattgagaagggtgctgctgacacaagccaagaatcaattcgccgctgttaatacgccgcagaaagagacgtcccaaatcgatggtccatcactcaataacacctacgggttcaaagtctctatccaaaacctgcaggaggccaaggctctgcatgagatccagaatctgacattgatttccgtagagctccacgctcgcacccggcgcgacctcgaacccgaccctgaattcgatccaatatgcgcccttttctactgcattagcagcgacacccccctgcctgatactgaaaaaacggagctaactggtgtgattgtaatcgacaaagataaaacggtatttagtcaagatatacgctatcagacaccgcttctgattagatcaggaataacaggcctggaggtgacttacgctgcagacgagaaggcactgttccacgagattgcaaacatcattaaaagatatgacccagatatcctgctcggatatgaaatccagatgcattcctgggggtatctccttcagcgggccgccgcactgagtattgatctgtgtcgcatgatttctagagtaccagatgataaaatcgagaacagattcgccgccgagcgagatgaatacggctcatataccatgtcagaaatcaacatcgtcggcaggatcacattgaacctgtggagaattatgcgtaacgaagtcgcactgaccaattacacctttgagaacgtgagctttcacgtcctccatcagcgcttccccctcttcactttccgggtgctgagcgactggtttgacaataaaactgacctgtaccgctggaaaatggttgaccattacgtctccagagttaggggtaacctacaaatgctggaacagctggacctcatcgggaagacctctgagatggcgaggctattcggtatccagttccttcacgtgttgactagagggagccagtatcgagtagaatccatgatgctgaggatagccaaacccatgaactacatcccggtaactcccagtgttcagcagaggagccagatgagggcaccccagtgcgtgccgcttattatggaacctgagagccgtttttactctaattcagtcctcgttctagattttcagagtctttacccgagtatcgttatcgcctacaactattgcttcagcacttgtttaggtcacgttgagaacctgggcaagtacgacgaatttaaattcgggtgtacttccctgcgcgttcctcccgatctgctctatcaggtcaggcatgacataactgtatctcctaacggtgtggccttcgtgaaaatcgccaacaagtgtagacctgaaggtatggcatag

SEQ ID NO: 330717 - DNA, 2289 bp, Artificial Sequence
  derived and/or modified sequence
atggtggaaactcgactggccaacgacctcgctgaattcgaaggggactttagcctcgagggcttaaggctttggaagacagcgttcagcgcaatgactcagaatccaagaccaggcagtccgctcaggtcaggccagggtgtggtgaataagggaagttctaacagtcctaagatggtggaggacaagaagatcgttatcatgccctgcaaatgcgcgccatcccgacagctggtgcaggtgtggctccaggcgaaagaggagtacgaaaggagtaagaaacttccaaagactaagccaactggcgtggtgaaaagcgccgagaattttagctccagtgtgaatccagacgacaagcccgtggtgccacctaagatggatgtgtccccctgtatcctgccaacaacagcccatacaaaggaagacgttgacaatagccagatagccctccaggcccctacaaccgggtgtagtcagacggcctcagaatcccagatgttgccgcctgtggctagcgcaagcgaccccgagaaggacgaggatgacgatgataattactacatttcctattcttctcccgactctccagttattcccccatggcagcagccaatctcgccggactctaaggccctaaacggcgatgaccgtcctagctctccggtcgaagaactgccgagtttagccttcgagaacttcctaaaaccaattaaggatggtatccagaagagtccatgcagcgagccacaggagcctctagtcatctctcccatcaacaccagagctagaacaggcaagtgtgagtccctgtgcttccatagcacccctattattcagcgaaagttactggaacgtttaccagaggccccaggattaagccccctgtcaacagagccaaagacccagaagctgagtaataagaaggggagcaacacggacacgcttagacgagttcttcttacccaagctaaaaaccagtttgctgccgtgaacaccccccagaaagaaacaagccagatagacgggccaagcctgaataatacatatgggttcaaggtgagcatacagaatctccaagaggcaaaagcactccacgagattcaaaacctcaccctcatctcggtagaactccacgctagaactaggcgggatctagagcctgacccagagttcgatcccatctgcgccctattctattgcattagcagcgatacgccactgcctgacacagaaaagaccgaactaactggcgtgatcgtgatcgacaaagacaagactgtattttcccaagacatcaggtaccagacccccctcttaatcagaagcggtattaccggactcgaggttacttatgctgcagacgagaaggccctgttccatgaaattgcaaacatcatcaagcgttatgatccggacattcttttgggttatgaaatccagatgcactcctggggctacctcctccagcgcgctgcagcactgagtatcgacttatgccgaatgatttctagggtcccagacgataaaatcgagaaccgcttcgctgcagagagagatgaatacggaagttacaccatgtccgaaatcaatatcgtaggcaggatcaccctaaatttatggaggattatgagaaacgaggtggccctcactaattatacatttgagaacgtgtcgtttcacgttttacaccagagatttccactcttcactttcagggtgctctcggattggtttgataataagacagacctgtaccgttggaagatggtggaccactacgtgagtagagtgagggggaatcttcagatgcttgaacagctcgacctgattggcaaaacttccgagatggccagactgtttggtattcagtttctgcatgtgttaactcgaggctcacagtacagagttgaatctatgatgctgcgaatcgcgaaacccatgaactatattcccgttactccttctgtgcagcagaggtcacaaatgcgagctccacagtgcgtgcctctgatcatggagccagaatctcggttctacagtaacagcgtgcttgtcctagatttccagtccctgtacccatctattgtcattgcctataactactgcttcagcacctgtctggggcatgttgaaaacctggggaaatatgatgagtttaagtttggttgcacgtctctcagagtgccacctgatctgctgtatcaggtgcggcacgatattacggttagccctaacggcgttgccttcgtaaaaatcgccaataaatgccgacccgagggtatggcatag

SEQ ID NO: 330718 - DNA, 8393 bp, Artificial Sequence
  derived and/or modified sequence
catcatcatggcaacaagagctgcagcctgggaccgaggagcccgtgtgattcccggcggtggcggcagtggcggcagcaccagcaccgacgaaagctcgagggcttctctcctgcggccccttgccgggtgctcctgaggaggcggcggcagcagcgcctacaccgccccgcccgccgctcctcgaggtgcctctgtgtgaggggagggggccgtgccgagaaggggagggggcgccgccgccgctgcggagggagccgccgccgctgctgctgccgctgccgggtcgccagtgaagggaggcagtggcggcggcggcgaacatgttttcagtaaggatagtgactgcagactactacatggccagcccgctgcaggggctggatacctgccaatcccccctcacccaggcccctgtcaagaaggtgccggtggtgcgagtcttcggagcgaccccggcaggtcagaagacatgtcttcatctacatggcatctttccttacctctatgtgccatacgatggttatggacagcagccagaaagctatctttctcagatggcattcagtatcgacagagcacttaatgtggctttaggcaatccatcttccactgctcagcatgtgttcaaagtgtcattagtatcaggaatgcctttttatggttatcatgagaaggaaagacactttatgaagatctatctttacaatcctacaatggtgaaaaggatatgtgaacttttgcaaagcggagccataatgaataaattttaccagcctcatgaagcgcatattccctacctcctacagctcttcattgactacaatctttatggcatgaatttaataaatctggctgctgtcaagttccgaaaagcaagaaggaaaagtaatacattgcatgcaactggatcctgcaagaatcatttatcaggaaattctcttgctgatactttatttcggtgggaacaagatgaaataccaagctctttaatattggaaggtgttgaaccacagagtacatgtgaattagaagtggatgctgtagctgctgatatcttaaatcgtctggacattgaagctcaaattggtggaaaccctggtctacaggccatatgggaagatgaaaagcaacggcgaagaaacagaaatgaaacttctcaaatgagccaacctgagtcacaagatcacaggtttgtgccagcaacagaaagtgaaaaaaaatttcagaagagacttcaggaaattctcaaacagaatgatttctctgtaacattatcaggatctgtggactacagcgatggatcccaggagttctctgctgagttaacattgcactctgaggttctgtctcctgaaatgcttcagtgtacaccagccaatatggtagaagttcacaaagacaaagagtcaagcaaaggtcacactagacacaaagtggaagaagctcttattaatgaagaagcaattttgaaccttatggaaaatagtcagacttttcagcctttgacccaaagactgagtgagtcacctgttttcatggacagtagtcctgatgaggctctggtacatcttcttgctggtttggaaagtgatggatatcggggggaaagaaataggatgccatcaccatgtcgctcctttggaaataataaatatccacaaaatagtgatgatgaagaaaatgaaccacagattgaaaaagaggaaatggagcttagtttggtgatgtcccagagatgggacagcaatattgaagaacattgtgccaaaaagagatcactgtgcagaaatacccacagaagttcaactgaagatgatgactcatcttcaggagaagaaatggaatggagtgataacagtttgcttctagccagtctttctatacctcagttagatggaactgcagatgaaaatagtgacaatccattgaacaatgaaaattctagaacccactcttctgtaattgcaacaagcaagctttcagttaaaccctccatctttcacaaagatgctgctacattagaaccctcatcttctgctaagattacctttcagtgtaaacacacaagtgccctttcttcccatgttttgaacaaggaagatttaattgaagacctttcacagacaaacaaaaatacagaaaaaggtctagataactcagtcacttcttttacaaacgaaagcacttattctatgaaataccctggatctttaagcagtactgttcattcagaaaattctcataaagagaatagtaagaaagagatcctcccagtatcttcctgtgaaagtagtatttttgattatgaagaagatattccatctgttacaagacaagtaccaagtagaaaatatacaaacattagaaaaatcgaaaaggattccccttttatacatatgcaccgtcaccctaacgagaatacattgggcaaaaattctttcaacttttctgacttaaatcattcaaaaaataaagtatcctctgaaggaaatgaaaaaggaaacagcacagctctgagtagtttattcccttcatcatttactgaaaattgtgaattactgtcatgctcaggggagaatagaactatggtgcattctcttaatagcactgctgatgaaagtggactaaataaacttaaaattaggtatgaagaatttcaagaacataaaacagaaaagccaagcctcagccagcaagcagcacactatatgttttttcccagtgttgttctttctaactgtcttactagaccacagaaactatctcctgtcacatataaattacaacctggcaataaaccatcccggttaaaattgaataaaaggaaacttgcaggtcatcaggagacttctaccaaaagtagtgagactggatccacaaaagataattttatacaaaataatccttgtaatagtaatcctgagaaggataatgcattggctagtgatttaactaaaaccactcgtggagcttttgaaaataaaacacccacagatggttttatagactgtcactttggagatggaacgttagaaactgagcagtcctttggactatatggaaataaatacacacttagagccaaacgcaaggtaaattatgagactgaagacagtgagtcaagttttgtaactcacaactcaaaaattagtctacctcatcccatggaaattggtgaaagtttagatggaactctcaaatcccgaaaacgaagaaaaatgtctaaaaagctgccccctgtcatcataaagtatattattattaatagatttagagggagaaaaaatatgcttgtgaagctaggaaaaatagactctaaagaaaaacaagtaatattaacagaagaaaaaatggaactatataaaaagcttgcacctttgaaggacttttggccaaaagttcccgactcccctgcaaccaaatatcccatttatccactaacaccaaagaaaagtcacagaagaaagtcaaaacataaatctgctaagaaaaaaactggtaaacaacaaaggacaaataatgaaaatattaaaagaactttgtctttcaggaaaaaacggtcacatgctattctttctcctccctcaccatcttacaatgctgaaaccgaagattgtgacctgaattatagtgatgttatgtctaaactaggttttctttctgagagaagcacaagtcccataaattcttctccacctcgctgctggtctcccacagatccaagagctgaagaaatcatggctgctgcagaaaaagaggcaatgctttttaagggtcctaatgtatataagaagactgttaattctcgtataggaaaaactagtcgcgcaagagcacagattaagaaatcaaaagcaaagcttgctaatccctctatagttactaagaaaaggaacaaacgaaatcagacaaataaactagtagatgatggaaaaaagaaaccaagagcaaaacaaaaaacaaatgagaaaggtacatcgagaaagcatacaacacttaaggatgaaaaaataaaatctcagtctggtgctgaggttaagtttgtactgaaacaccagaatgtgtctgaatttgcaagtagttctggaggctctcaactactttttaaacagaaagatatgccactaatgggctctgctgtagatcatcccctttctgcttccctacccactggaattaatgcacaacagaagttatctggctgcttttcttctttcttagaaagcaagaagtctgtagatttgcagacattccccagttcacgagatgatttgcatccatcagttgtttgtaattctataggacctggagtctcaaaaattaatgttcaaaggcctcataatcaaagtgctatgtttactctaaaggaatcaacgttaattcaaaaaaatatatttgacctttccaatcatttatctcaggtagcacagaatacacagatatcttctggtatgtcctcaaagatagaagataatgcaaataatatacaaagaaactatttgtcatcaatcggaaagttaagtgaatatcgcaattccctagaatcaaagctggaccaagcatatacccctaattttttgcattgcaaagacagtcagcagcagattgtgtgcatagcggaacagtcaaagcacagtgaaacttgttctccgggaaatacagcttcagaggaaagccaaatgcctaataattgctttgtaacttccttgagaagtccaatcaaacaaatagcatgggagcaaaagcaaaggggctttattttagatatgtcaaattttaaacctgaaagagtaaaaccgaggtcgttatcagaagcaatttcacaaaccaaagcactttctcagtgtaaaaatcgaaatgtgtcaacaccttcagcatttggtgaaggacagtctggactggcagttctaaaagaattgttacaaaaaagacagcagaaagcacaaaatgcaaatactacacaagacccattatccaataaacatcaaccaaataaaaatatttctggttcccttgagcataacaaagcaaataaacggacacgatcggtaacgtccccaagaaaacctcgaactcccagaagtacaaaacaaaaagaaaaaatccccaaacttctcaaagtagactctttaaatttacaaaactctagccagttggataactctgtatcagatgatagtcccatctttttttcagatccaggctttgaaagttgttactcacttgaagatagtttatctcctgaacataattataattttgatattaacacaataggtcagactggattttgtagcttttattctggaagtcagtttgtcccagctgatcagaatttgcctcagaagttcctaagtgatgctgttcaggatctttttccaggacaagctatagaaaaaaatgagtttttaagtcatgacaaccagaaatgtgatgaagacaagcatcataccacagactcagcctcatggattagatctggtactttaagtcctgaaatttttgagaagtcaaccatagatagcaatgagaatcgtcgccacaaccagtggaaaaatagctttcatcctctaacaactcggtctaactcaataatggattctttctgtgttcagcaggcagaagactgtctaagtgaaaaatctagattgaataggagttcagtaagcaaagaagtgtttcttagcctcccacagccaaacaattcagactggattcaaggtcacaccagaaaagaaatgggacagtctcttgactcagccaatacctcttttactgcaatactctcctcccctgatggtgaacttgtagacgtggcctgtgaagatttagaactgtatgtttcaagaaacaatgatatgttgacaccaactcctgatagttcaccaagatctactagctctccttcacaatctaaaaatggcagcttcacccctcgaactgctaacattctgaaaccacttatgtcccccccaagtagggaagaaattatggcaactttgttggatcatgacctgtctgagactatttaccaggaaccattttgcagtaatccttctgatgtaccagaaaagcccagggagattggtggacggctcctcatggtagaaactcgacttgcaaatgatctggctgagtttgagggagacttttccttggaaggacttcgtctttggaaaacagcattctcagcaatgactcagaatccaaggccagggtcaccccttcgcagtggccaaggagttgtcaataaagggtcaagtaatagccctaagatggttgaagataaaaaaattgtgattatgccttgcaaatgtgccccaagtcgacaactggttcaagtgtggcttcaagccaaagaagaatacgaacgttccaagaaactgcctaaaaccaagccaactggagttgtaaaatctgctgagaactttagctcttcagttaacccagatgacaaacctgtagtgcctccaaaaatggatgtaagtccatgtatactccccactacagcacataccaaggaggatgttgataattctcagattgctttacaagcaccaaccacgggatgtagtcaaactgcaagtgaaagtcagatgctgccaccagttgcctctgcaagtgatcccgaaaaagatgaagatgatgatgataactattacattagttatagctcccctgattctccagtaattcccccttggcaacaaccaatatccccagattccaaagcattaaatggagatgatagaccctcatcaccagtagaggagctgccttcattggcttttgagaacttcttaaagccaataaaagatggtatacaaaaaagcccctgcagtgagcctcaagagcctctagtgatatctccaattaatactagggcaagaactgggaaatgtgaatcactttgctttcatagtacaccaatcatacagagaaaacttctggaaaggcttcctgaagcacctggccttagcccattatcaacagaaccaaaaacacagaagttgagtaataagaaaggaagtaatactgacactcttagaagagtactgttaacacaagcaaagaatcaatttgcagcagtaaataccccacagaaagaaacttctcagattgatggaccatctttaaacaatacttacggtttcaaagtcagcatacaaaacttacaggaggcaaaagctttacatgagatacaaaatcttaccctaatcagtgtggagttgcatgctcgaactagacgagacttagaaccggatcctgaatttgacccaatctgtgctctgttctactgcatctcatctgacactccactgccagatacagaaaaaacagaactcacaggtgtaatagtgattgataaagacaagacagttttcagtcaagatatcagatatcagactccattacttattagatctggaattacaggactcgaagtcacctatgctgctgatgagaaggcactttttcatgaaattgcaaatataataaagaggtatgatcctgatattctgctaggatatgagattcagatgcattcctggggttacctcttacaaagggctgccgctttaagtattgacttatgtcggatgatctctcgggtgccagatgacaaaattgagaacagatttgcagctgaaagagatgagtatggatcatatacaatgagtgagataaatattgttggccgaattacactaaatctttggagaatcatgagaaatgaggtggctctaactaactacacctttgaaaatgtgagctttcatgttcttcatcagcgttttcccctctttacctttcgagtcttgtcagactggtttgataacaagacagatctatacagatggaaaatggttgatcattatgttagccgtgtccgtggaaatctccaaatgttagaacagctggacctgattgggaaaaccagtgagatggctagactttttggcattcagtttttacatgtactgacaaggggttcacagtaccgtgtggaatcaatgatgttgcgtattgctaaaccaatgaactatattcctgtgacacctagtgttcagcaaagatcccagatgagagccccacagtgtgttcctctaattatggagcctgaatcccgcttctatagcaactctgttctcgttttggatttccaatcactttatccttctattgtgattgcatataactactgcttttccacctgccttggccatgtggagaacttgggaaagtatgatgagttcaaatttggctgtacctctctgagagtacctccagatttactttaccaagttaggcatgatatcacagtgtcccccaatggagtagcttttgtcaagattgctaataaatgtaggccggaggggatggcttag

SEQ ID NO: 330719 - DNA, 2289 bp, Artificial Sequence
  derived and/or modified sequence
atggtggagaccagactggccaacgacctggccgagttcgagggcgacttcagcctggagggcctgagactgtggaagaccgccttcagcgccatgacccagaaccccagacccggcagccccctgagaagcggccagggcgtggtgaacaagggcagcagcaacagccccaagatggtggaggacaagaagatcgtgatcatgccctgcaagtgcgcccccagcagacagctggtgcaggtgtggctgcaggccaaggaggagtacgagagaagcaagaagctgcccaagaccaagcccaccggcgtggtgaagagcgccgagaacttcagcagcagcgtgaaccccgacgacaagcccgtggtgccccccaagatggacgtgagcccctgcatcctgcccaccaccgcccacaccaaggaggacgtggacaacagccagatcgccctgcaggcccccaccaccggctgcagccagaccgccagcgagagccagatgctgccccccgtggccagcgccagcgaccccgagaaggacgaggacgacgacgacaactactacatcagctacagcagccccgacagccccgtgatccccccctggcagcagcccatcagccccgacagcaaggccctgaacggcgacgacagacccagcagccccgtggaggagctgcccagcctggccttcgagaacttcctgaagcccatcaaggacggcatccagaagagcccctgcagcgagccccaggagcccctggtgatcagccccatcaacaccagagccagaaccggcaagtgcgagagcctgtgcttccacagcacccccatcatccagagaaagctgctggagagactgcccgaggcccccggcctgagccccctgagcaccgagcccaagacccagaagctgagcaacaagaagggcagcaacaccgacaccctgagaagagtgctgctgacccaggccaagaaccagttcgccgccgtgaacaccccccagaaggagaccagccagatcgacggccccagcctgaacaacacctacggcttcaaggtgagcatccagaacctgcaggaggccaaggccctgcacgagatccagaacctgaccctgatcagcgtggagctgcacgccagaaccagaagagacctggagcccgaccccgagttcgaccccatctgcgccctgttctactgcatcagcagcgacacccccctgcccgacaccgagaagaccgagctgaccggcgtgatcgtgatcgacaaggacaagaccgtgttcagccaggacatcagataccagacccccctgctgatcagaagcggcatcaccggcctggaggtgacctacgccgccgacgagaaggccctgttccacgagatcgccaacatcatcaagagatacgaccccgacatcctgctgggctacgagatccagatgcacagctggggctacctgctgcagagagccgccgccctgagcatcgacctgtgcagaatgatcagcagagtgcccgacgacaagatcgagaacagattcgccgccgagagagacgagtacggcagctacaccatgagcgagatcaacatcgtgggcagaatcaccctgaacctgtggagaatcatgagaaacgaggtggccctgaccaactacaccttcgagaacgtgagcttccacgtgctgcaccagagattccccctgttcaccttcagagtgctgagcgactggttcgacaacaagaccgacctgtacagatggaagatggtggaccactacgtgagcagagtgagaggcaacctgcagatgctggagcagctggacctgatcggcaagaccagcgagatggccagactgttcggcatccagttcctgcacgtgctgaccagaggcagccagtacagagtggagagcatgatgctgagaatcgccaagcccatgaactacatccccgtgacccccagcgtgcagcagagaagccagatgagagccccccagtgcgtgcccctgatcatggagcccgagagcagattctacagcaacagcgtgctggtgctggacttccagagcctgtaccccagcatcgtgatcgcctacaactactgcttcagcacctgcctgggccacgtggagaacctgggcaagtacgacgagttcaagttcggctgcaccagcctgagagtgccccccgacctgctgtaccaggtgagacacgacatcaccgtgagccccaacggcgtggccttcgtgaagatcgccaacaagtgcagacccgagggcatggcctag

SEQ ID NO: 330720 - DNA, 780 bp, Artificial Sequence
  derived and/or modified sequence
gcggccgccgccctcgccaccccgcctgcccactcccgccgccgccccgctctcgctttccccccggcctcccctcgccccttcccctcccccttcccggcgcactcggggggctgggaacgagctgccatgtgatgcgcgtcccctccgcgagctttcggtgacccacgaactgcccacctcgccggctgccgggagggggctgcgagccgggaagacgcggggaagaggaggcggaaaaggacgcaaagttctccggcgagtgcagctgtctgcttcagaaagtgagggctccaggaatgaggagaatcttcaagaacttcctcgcactgtgacatgtctgatcccttgctcccatccctgcagcatgaacaaggtggacactcactgacctgtcacaaggttgccccacaaaactttggggtccatgtctgaatggattgccagagccttctcatctctcccttcgcccagttccctgcatcctaagactcgaaggcagcacaggacctggaaaaattacatggtgtgaacggcatgtctgtggatgagaagcctgactcccccatgtatgtgtatgagtccacagtccactgcaccaacatcctcctgggcctcaatgaccagcggaaaaaggatattctctgtgacgtgactttgatcgtggagaggaaggagttccgggcccaccgggctgtgctggccgcatgcagtgaatatttttggcaggcgctggttggacagacaaaaaatgatttggtggtcagcttgcctgaggag

SEQ ID NO: 330721 - DNA, 868 bp, Artificial Sequence
  derived and/or modified sequence
gcggccgccgccctcgccaccccgcctgcccactcccgccgccgccccgctctcgctttccccccggcctcccctcgccccttcccctcccccttcccggcgcactcggggggctgggaacgagctgccatgtgatgcgcgtcccctccgcgagctttcggtgacccacgaactgcccacctcgccggctgccgggagggggctgcgagccgggaagacgcggggaagaggaggcggaaaaggacgcaaagttctccggcgagcgcgttcgttcacatagctcccagttttaacatttcgccacctactgaagacatcatttgggaccaagctgatgagcccttgaagcacagcagctgtctgcttcagaaagtgagggctccaggaatgaggagaatcttcaagaacttcctcgcactgtgacatgtctgatcccttgctcccatccctgcagcatgaacaaggtggacactcactgacctgtcacaaggttgccccacaaaactttggggtccatgtctgaatggattgccagagccttctcatctctcccttcgcccagttccctgcatcctaagactcgaaggcagcacaggacctggaaaaattacatggtgtgaacggcatgtctgtggatgagaagcctgactcccccatgtatgtgtatgagtccacagtccactgcaccaacatcctcctgggcctcaatgaccagcggaaaaaggatattctctgtgacgtgactttgatcgtggagaggaaggagttccgggcccaccgggctgtgctggccgcatgcagtgaatatttttggcaggcgctggttggacagacaaaaaatgatttggtggtcagcttgcctgaggag

SEQ ID NO: 330722 - DNA, 246 bp, Artificial Sequence
  derived and/or modified sequence
atgagcgtggacgagaagccagactcccccatgtatgtgtatgagtctaccgttcattgcaccaacatactgctcggtctgaatgatcagagaaagaaggatattttgtgcgatgtgaccctaatagtggaacggaaggaatttcgcgcgcaccgggcggttcttgcagcatgttcagaatacttctggcaggctctggtaggccagactaaaaacgatttagtcgtctccctgccagaagagtag

SEQ ID NO: 330723 - DNA, 246 bp, Artificial Sequence
  derived and/or modified sequence
atgtcagtggatgagaaacctgactcaccaatgtatgtttatgagagcacagttcactgtacaaacattttgctcgggcttaatgatcagcggaagaaggacattctgtgcgacgtgactctaattgtggaacgcaaagaattccgcgcccacagggccgttctggctgcttgtagtgagtacttttggcaggctctcgttggccagactaaaaatgatttagtggtctctctacctgaggaatag

SEQ ID NO: 330724 - DNA, 246 bp, Artificial Sequence
  derived and/or modified sequence
atgtctgtggatgagaagccagacagccccatgtatgtgtatgagagcacagtgcactgcaccaacatcctgctgggcctgaatgaccagaggaagaaggacatcctgtgtgatgtgaccctcatcgtggagaggaaggagttccgggcccacagagctgtgctggccgcctgcagcgagtacttctggcaggccctggtgggccagaccaagaatgacctggtggtgtccctgcctgaggagtag

SEQ ID NO: 330725 - DNA, 246 bp, Artificial Sequence
  derived and/or modified sequence
atgagcgtggacgagaagcccgacagccccatgtacgtgtacgagtccactgtgcactgtacgaacattctactcgggctgaatgaccaacgaaaaaaggacatcctctgtgatgttaccctgatcgtcgagagaaaggaatttcgggctcaccgggcagttcttgcagcgtgtagtgagtatttctggcaagccctggtgggtcagacgaagaatgacctcgttgttagccttcctgaagagtag

SEQ ID NO: 330726 - DNA, 246 bp, Artificial Sequence
  derived and/or modified sequence
atgagcgtggacgagaagcccgacagccccatgtacgtgtacgagagtacagttcactgtactaatatccttctggggttaaacgatcagagaaaaaaggatattctttgcgacgttacgttgattgtggagagaaaagagttccgggcgcaccgcgccgtcctggcggcgtgctccgaatatttttggcaggcactcgtgggccagactaagaatgacttggtggtgtcactaccggaagaatag

SEQ ID NO: 330727 - DNA, 246 bp, Artificial Sequence
  derived and/or modified sequence
atgagcgtggacgagaaacctgattctcccatgtacgtttacgagtccacggtgcactgtaccaatattctcttgggacttaacgatcagcggaagaaagacatactctgtgatgtgacactgatagtggaacggaaagagttccgcgcacaccgcgctgtcttggcggcatgctcagagtacttttggcaggcattggtcgggcagacgaaaaatgatctcgtcgtgtctttgccggaggagtag

SEQ ID NO: 330728 - DNA, 246 bp, Artificial Sequence
  derived and/or modified sequence
atgtcagtcgatgagaagcccgacagccctatgtatgtgtacgaatccactgtccactgtactaacatcttgctagggctgaacgatcagaggaagaaagatatcctgtgtgacgtgacattgattgttgagagaaaggaattcagagcacatagagccgtgctggccgcatgttcagagtatttttggcaggcactggtcggtcagactaaaaacgatctcgttgtctctctgcccgaggaatag

SEQ ID NO: 330729 - DNA, 246 bp, Artificial Sequence
  derived and/or modified sequence
atgagcgtggacgagaagcccgacagccccatgtacgtgtacgagagcaccgtgcactgcaccaacatcctgctgggcctgaacgaccagagaaagaaggacatcctgtgcgacgtgaccctgatcgtggagagaaaggagttcagagcccacagagccgtgctggccgcctgcagcgagtacttctggcaggccctggtgggccagaccaagaacgacctggtggtgagcctgcccgaggagtag

SEQ ID NO: 330730 - protein, 62 aa, Artificial Sequence
  derived and/or modified sequence
MLFLKLSVFRAVEFFIRDKYEKKKYYDKNAIAITNISSSDAPLQPLVSSPSLQAAVDKNKLE

SEQ ID NO: 330731 - protein, 97 aa, Artificial Sequence
  derived and/or modified sequence
WKYNEFYHVKTSCSQGPAYVCNITNLQPYTSYNVRVVVVYKTGENSTSLPESFKTKAGVPNKPGIPKLLEGSKNSIQWEKAEDNGCRITYYILEIRD

SEQ ID NO: 330732 - DNA, 294 bp, Artificial Sequence
  derived and/or modified sequence
tggaagtataatgaattttatcacgtgaagacatcctgcagccaagggccggcttacgtgtgtaatatcaccaacctccagccttatacgagttacaatgtgcgggtggtggtcgtatataaaaccggtgaaaatagcacgagtctgcctgagtcttttaagaccaaagccggcgtccctaacaagcctgggatccccaaacttctggagggatctaagaactcaatccaatgggagaaggctgaggataacggatgtcgaatcacttactatatactggaaattagagactag

SEQ ID NO: 330733 - DNA, 294 bp, Artificial Sequence
  derived and/or modified sequence
tggaagtacaatgagttctaccacgtgaagaccagctgcagccagggccctgcctacgtgtgcaacatcaccaacctgcagccctacaccagctacaacgtgcgggtggtggtggtgtacaagacaggagagaacagcaccagcctgcctgagagcttcaagaccaaggccggcgtgcccaacaagccaggcatccccaagctgctggagggcagcaagaacagcatccagtgggagaaggccgaggacaatggctgccgcatcacctactacatcctggagatccgggactag

SEQ ID NO: 330734 - DNA, 294 bp, Artificial Sequence
  derived and/or modified sequence
tggaagtacaacgagttctaccacgtgaagaccagctgcagccagggccccgcatacgtgtgtaacatcaccaatctgcagccttacacctcatacaacgttcgcgttgtggttgtttacaagacgggagaaaactcaacaagtctgcctgagtccttcaagaccaaggctggtgtgcctaataagcccggaattccaaagcttctcgaggggagtaagaacagcattcaatgggagaaagccgaggacaacggctgcagaattacctactatatcctggagattcgggattag

SEQ ID NO: 330735 - DNA, 294 bp, Artificial Sequence
  derived and/or modified sequence
tggaagtataatgagttctatcatgtgaagaccagttgtagccagggtccagcttacgtttgtaacatcaccaatcttcaaccctatacctcctacaacgttcgggtggttgtagtgtataagacaggagaaaatagcaccagtctcccagagtcattcaagacaaaagcaggtgtgcctaataagccaggaatccccaagctgctcgaaggatccaaaaactcaatccagtgggaaaaagccgaagacaatgggtgccggataacctattatatcctcgaaataagagactag

SEQ ID NO: 330736 - DNA, 681 bp, Artificial Sequence
  derived and/or modified sequence
tggaaatacaatgagttttaccatgttaaaacttcatgcagccaaggtcctgcttatgtctgtaatatcacaaatctacaaccttatacttcatataatgtcagagtagtggtggtttataagacgggagaaaatagcacctcacttccagaaagctttaagacaaaagctggagtcccaaataaaccaggcattcccaaattactagaagggagtaaaaattcaatacagtgggagaaagctgaagataatggatgtagaattacatactatatccttgagataagggactgaaaacacaccgtcgatgaaaaccagccactgatgaacagcctcagacctggccagtacggggagcacgtgaaccataactggcttagaaggactgatttcatgccaacttgaggggagaattccaaattccaaagacactcctctcacaggactatgaaaccatcttttaagaagttccaaggacaaaagtcacttccataattatagtcctggcaacttgatctttagatctatttttgcttcatctggctctggcattcccataaccttaaaaaatgttcctgttcatactagagaattcccttggcccttatttctaattgaaacctccttgaagtttctgttgctgcttttcatgcagagtgaaatacattctaacctgcagaa

SEQ ID NO: 330737 - DNA, 294 bp, Artificial Sequence
  derived and/or modified sequence
tggaagtacaacgagttctaccacgtgaagaccagctgcagccagggccccgcctacgtgtgcaacatcaccaacctgcagccctacaccagctacaacgtgagagtggtggtggtgtacaagaccggcgagaacagcaccagcctgcccgagagcttcaagaccaaggccggcgtgcccaacaagcccggcatccccaagctgctggagggcagcaagaacagcatccagtgggagaaggccgaggacaacggctgcagaatcacctactacatcctggagatcagagactag

SEQ ID NO: 330738 - protein, 166 aa, Artificial Sequence
  derived and/or modified sequence
MFTEEDVKFYLAELALALDHLHSLGIIYRDLKPENILLDEEGHIKITDFGLSKEAIDHDKRAYSFCGTIEYMAPEVVNRRGHTQSADWWSFGVLMFEMLTGSLPFQGKDRKETMALILKAKLGMPQFLSGEAQSLLRALFKRNPCNRLGEKTALCPRVSCSRLLGF

SEQ ID NO: 330739 - DNA, 501 bp, Artificial Sequence
  derived and/or modified sequence
atgttcaccgaggaggacgtgaagttctacctggccgagctggccctggccctggaccacctgcacagcctgggcatcatctacagagacctgaagcccgagaacatcctgctggacgaggagggccacatcaagatcaccgacttcggcctgagcaaggaggccatcgaccacgacaagagagcctacagcttctgcggcaccatcgagtacatggcccccgaggtggtgaacagaagaggccacacccagagcgccgactggtggagcttcggcgtgctgatgttcgagatgctgaccggcagcctgcccttccagggcaaggacagaaaggagaccatggccctgatcctgaaggccaagctgggcatgccccagttcctgagcggcgaggcccagagcctgctgagagccctgttcaagagaaacccctgcaacagactgggcgagaagaccgccctgtgccccagagtgagctgcagcagactgctgggcttctag

SEQ ID NO: 330740 - DNA, 1935 bp, Artificial Sequence
  derived and/or modified sequence
atgaaggtgctgaagaaggccaccctgaaggtgagagacagagtgagaagcaagatggagagagacatcctggccgaggtgaaccaccccttcatcgtgaagctgcactacgccttccagaccgagggcaagctgtacctgatcctggacttcctgagaggcggcgacctgttcaccagactgagcaaggaggtgatgttcaccgaggaggacgtgaagttctacctggccgagctggccctggccctggaccacctgcacagcctgggcatcatctacagagacctgaagcccgagaacatcctgctggacgaggagggccacatcaagatcaccgacttcggcctgagcaaggaggccatcgaccacgacaagagagcctacagcttctgcggcaccatcgagtacatggcccccgaggtggtgaacagaagaggccacacccagagcgccgactggtggagcttcggcgtgctgatgttcgagatgctgaccggcagcctgcccttccagggcaaggacagaaaggagaccatggccctgatcctgaaggccaagctgggcatgccccagttcctgagcggcgaggcccagagcctgctgagagccctgttcaagagaaacccctgcaacagactgggcgccggcatcgacggcgtggaggagatcaagagacaccccttcttcgtgaccatcgactggaacaccctgtacagaaaggagatcaagccccccttcaagcccgccgtgggcagacccgaggacaccttccacttcgaccccgagttcaccgccagaacccccaccgacagccccggcgtgccccccagcgccaacgcccaccacctgttcagaggcttcagcttcgtggccagcagcctgatccaggagcccagccagcaggacctgcacaaggtgcccgtgcaccccatcgtgcagcagctgcacggcaacaacatccacttcaccgacggctacgagatcaaggaggacatcggcgtgggcagctacagcgtgtgcaagagatgcgtgcacaaggccaccgacaccgagtacgccgtgaagatcatcgacaagagcaagagagaccccagcgaggagatcgagatcctgctgagatacggccagcaccccaacatcatcaccctgaaggacgtgtacgacgacggcaagttcgtgtacctggtgatggagctgatgagaggcggcgagctgctggacagaatcctgagacagagatacttcagcgagagagaggccagcgacgtgctgtgcaccatcaccaagaccatggactacctgcacagccagggcgtggtgcacagagacctgaagcccagcaacatcctgtacagagacgagagcggcagccccgagagcatcagagtgtgcgacttcggcttcgccaagcagctgagagccggcaacggcctgctgatgaccccctgctacaccgccaacttcgtggcccccgaggtgctgaagagacagggctacgacgccgcctgcgacatctggagcctgggcatcctgctgtacaccatgctggccggcttcacccccttcgccaacggccccgacgacacccccgaggagatcctggccagaatcggcagcggcaagtacgccctgagcggcggcaactgggacagcatcagcgacgccgccaaggacgtggtgagcaagatgctgcacgtggacccccaccagagactgaccgccatgcaggtgctgaagcacccctgggtggtgaacagagagtacctgagccccaaccagctgagcagacaggacgtgcacctggtgaagggcgccatggccgccacctacttcgccctgaacagaaccccccaggcccccagactggagcccgtgctgagcagcaacctggcccagagaagaggcatgaagagactgaccagcaccagactgtag

SEQ ID NO: 330741 - DNA, 501 bp, Artificial Sequence
  derived and/or modified sequence
atgttcactgaagaagacgtcaaattttacctcgctgagctggcacttgctttagatcatcttcatagcctggggattatctacagagacctgaagccagagaacatcctcctcgacgaggaggggcacatcaaaattacagatttcggcctctcaaaagaggctatcgatcacgataaacgggcttattctttctgtgggactatagagtacatggcacctgaagttgtgaacagacgcggacacactcagtctgcggattggtggagttttggagtgctgatgttcgagatgttgaccggctcactgcctttccagggcaaggataggaaggagacaatggcacttatcctcaaagccaagttggggatgcctcagttcctctcaggcgaagcccaatctctgctgagagcattatttaagcggaatccctgcaaccggttaggggagaagaccgccttgtgtccacgcgtgagctgctcccgactgttaggcttttag

SEQ ID NO: 330742 - DNA, 1935 bp, Artificial Sequence
  derived and/or modified sequence
atgaaagtcctgaaaaaggccacattgaaagtgagagacagggtgaggagcaagatggaaagggatattcttgctgaggtgaaccatcccttcatagtaaaactgcactacgcgtttcagaccgaaggtaaactgtatctcatcttagacttcctgcggggtggtgatctgtttaccaggctctccaaagaggtaatgttcactgaggaggacgtgaaattctacttggcagagctggcccttgccctggaccatctgcattctctgggcatcatctaccgcgatttgaagccagaaaacatcctacttgacgaagagggacacatcaagatcacagattttgggctgtcaaaagaagccatcgatcacgataaaagggcgtactccttttgcggaactatcgagtatatggctcccgaagttgtgaacagaagagggcacacacagtccgccgactggtggtccttcggggtgttaatgtttgagatgttgacgggctccttgccatttcaggggaaggataggaaagaaactatggcccttatccttaaggcaaaacttgggatgcctcagttcttgtccggagaggcccagtccctgctcagagccttattcaaaaggaacccttgcaatcggctcggcgctgggatcgacggcgtagaagaaatcaagaggcaccccttttttgttaccattgattggaatacattataccggaaggagattaaaccacctttcaaacccgcagttggccgacctgaagacacattccactttgaccctgagttcactgccaggacccctactgactcccccggggtgccaccttcggctaacgctcatcacctgtttcgcggatttagctttgtcgcctccagcctcatccaagaaccctctcagcaggatttgcacaaggtgccagttcaccccattgtgcagcagctgcatggcaacaatatccacttcactgatggatacgaaataaaagaagacatcggggtcgggtcctactctgtctgtaaacggtgtgtccataaggctactgacaccgagtatgccgtgaagatcattgataaaagcaagcgagatccctccgaagagatagagattctgctcaggtatggccagcaccctaatataatcacactcaaagacgtgtacgacgacggcaagttcgtttacctggtgatggagctcatgcgtgggggtgagctcctggaccgaatactgcgtcagcgatatttttctgagagagaagcaagtgacgtcctctgtaccattaccaaaaccatggattaccttcattctcagggcgtcgtgcacagggacctgaagcctagcaatattttatacagagatgagagtggaagtcccgagagcatccgcgtctgcgactttgggtttgctaagcagctccgggcgggaaacgggctgctcatgaccccctgttacacagcaaatttcgtcgcgccggaggtgctgaaacggcaaggctacgacgcagcttgcgacatctggtccctcggtatcctcctgtacaccatgctcgccggctttacccccttcgccaatggacctgatgacacccccgaagaaatcctggcgaggataggcagtgggaagtacgcactgtcgggtggtaactgggattccatttccgacgcagctaaagacgtcgtgtcaaagatgcttcacgtcgatccacaccagcggctgaccgctatgcaggtactaaagcacccatgggtcgtgaatcgggaatatctgtcacctaatcaactgagcaggcaagacgtgcacttggttaaaggggccatggccgccacttattttgctctgaacagaacacctcaagctcctagattagaacctgtactgtcatctaacctcgcccagcgtagaggaatgaaacgcttaacaagcaccaggctttag

SEQ ID NO: 330743 - DNA, 1935 bp, Artificial Sequence
  derived and/or modified sequence
atgaaagttctgaagaaggcgacattaaaagtccgtgacagagtgcggtcaaaaatggagagagacatcctggcagaggttaaccatcccttcattgtgaaactgcactacgcctttcagaccgagggcaaactctatttaatcttggactttctgcgcggtggagatctgttcactcggttgagcaaagaggtgatgtttacggaagaagacgttaaattttatctggctgagctagctctggccttggatcatctccattcactgggcattatttaccgcgacctcaaacccgaaaatattctgctggatgaagaaggccacatcaagatcacagactttgggctatccaaggaagctattgatcacgacaaaagagcttatagtttttgtggaaccatcgaatacatggcccccgaggtcgtgaatcggagaggccatacccagagcgccgattggtggtcatttggtgtgctgatgttcgagatgttgacgggcagcctcccattccagggcaaagacagaaaagagaccatggcattaattcttaaggcaaaattaggaatgcctcaattcctctccggggaggcccagtcattgctgcgcgccctctttaagagaaatccttgcaatagactaggcgccggcatagacggagtggaggaaatcaagagacatccgttctttgttactattgactggaataccctgtacaggaaggagataaaaccccccttcaagcccgctgtgggtcggcctgaggacacatttcattttgacccagaattcaccgcgcgcacaccgacagactctccaggtgtgcccccttctgcaaatgcacatcacctcttcagaggctttagttttgtcgcaagctccctgatccaagaaccatcacaacaggatctgcataaagttccagttcaccctattgttcagcagctccatgggaataatatccacttcaccgacggctatgaaattaaggaagatatcggggtcggcagctatagtgtctgcaaacggtgtgtgcacaaggcaaccgataccgaatacgccgtcaagatcattgacaagtctaagcgggatccatccgaagaaatcgaaattctcttaagatacgggcagcacccaaacatcatcactctcaaggacgtgtacgatgacggaaagttcgtgtatctggtgatggagctgatgcgcggcggcgagctgttagatcggatactgcgccagagatacttcagtgagcgggaggcatccgatgtgctgtgtaccattacaaagaccatggattatctccatagccaaggggtggttcaccgagatctgaaaccatcaaatattctgtatcgagatgagtccggctcgcctgaaagtattcgggtgtgcgacttcggatttgccaagcagctccgggctggaaatggccttctcatgaccccatgttacacagccaatttcgtggcgcctgaagtgctgaagcgccaagggtatgatgcggcctgtgacatatggagccttgggatcctcttgtacaccatgcttgccgggtttactccattcgcaaatggacccgacgacacgcccgaagagatactagcgcgcatcggcagcgggaagtacgcgttgagtggtggcaattgggacagcattagtgatgcggccaaggatgtggtgagcaagatgctgcacgtggatcctcaccaaagattaactgctatgcaggttctgaagcatccttgggtggtgaatcgcgaatacctgagccctaaccagctgtcccgacaagatgtccacctggtaaagggagccatggccgctacctacttcgctcttaacaggactcctcaggcaccaagactggaacctgtgttatccagcaacctggcccaacgaagagggatgaagcgcctaacctcaactaggctgtag

SEQ ID NO: 330744 - DNA, 501 bp, Artificial Sequence
  derived and/or modified sequence
atgttcacagaagaagatgtgaagttctacctggccgagctggccctggccctggaccacctgcacagcctgggcatcatctacagagacctgaagccagagaacatcctgctggatgaggagggccacatcaagatcacagactttggcctgagcaaggaggccatcgaccatgacaagagggcctacagcttctgtggcaccatcgagtacatggcccctgaggtggtgaacagaagaggccacacccagagcgctgactggtggagctttggagtgctgatgtttgagatgctgaccggcagcctgcccttccagggcaaggacaggaaggagaccatggccctgatcctgaaggccaagctgggcatgccccagttcctgtctggagaggcccagagcctgctgcgggccctcttcaagaggaacccctgcaaccggctgggggagaagacagccctgtgcccccgggtgtcctgcagccggctgctgggcttctag

SEQ ID NO: 330745 - DNA, 1935 bp, Artificial Sequence
  derived and/or modified sequence
atgaaggtgctgaagaaggccaccctgaaggtgcgggacagagtgcgcagcaagatggagcgggacatcctggccgaggtgaaccaccccttcatcgtgaagctgcactacgccttccagacagagggcaagctgtacctgatcctggacttcctgcggggcggggacctcttcacccggctgagcaaggaggtgatgttcacagaggaggatgtgaagttctacctggccgagctggccctggccctggaccacctgcacagcctgggcatcatctacagagacctgaagccagagaacatcctgctggatgaggagggccacatcaagatcacagactttggcctgagcaaggaggccatcgaccatgacaagagggcctacagcttctgtggcaccatcgagtacatggcccctgaggtggtgaacagaagaggccacacccagagcgctgactggtggagctttggagtgctgatgtttgagatgctgaccggcagcctgcccttccagggcaaggacaggaaggagaccatggccctgatcctgaaggccaagctgggcatgccccagttcctgagcggggaggcccagagcctgctgcgggccctcttcaagaggaacccctgcaaccggctgggcgccggcattgatggagtggaggagatcaagaggcaccccttctttgtgaccatcgactggaacaccctgtacaggaaggagatcaagccacccttcaagccagctgtgggccggcctgaggacaccttccactttgatcctgagttcaccgcccggacccccacagacagccctggggtgcccccatctgccaatgcccaccacctgttccggggcttctcctttgtggccagcagcctcatccaggagcccagccagcaggacctgcacaaggtgcctgtgcaccccatcgtgcagcagctgcacggcaacaacatccacttcacagatggctatgagatcaaggaggacatcggcgtgggcagctacagcgtgtgcaagagatgtgtgcacaaggccacagacacagaatatgctgtgaagatcatcgacaagagcaagagggaccccagcgaggagattgagatcctgctgcgctatggccagcaccccaacatcatcaccctgaaggatgtgtatgatgatggcaagtttgtgtacctggtgatggagctgatgaggggcggggagctgctggaccgcatcctgcggcagcgctacttcagcgagcgggaggccagtgatgtgctgtgcaccatcaccaagaccatggactacctgcacagccagggcgtggtgcaccgggacctgaagcccagcaacatcctgtacagagatgaaagtggcagccctgagagcatccgggtgtgtgactttggatttgccaagcagctgcgggctggaaatggcctgctgatgaccccctgctacacagccaactttgtggcccctgaggtgctgaagaggcagggctatgatgctgcctgtgacatctggagcctgggcatcctgctgtacaccatgctggccggcttcaccccatttgccaacggcccagatgacaccccagaggagatcctggccagaattggcagcggcaagtatgccctgagcggcggcaactgggacagcatcagtgatgctgccaaggatgtggtgtccaagatgctgcacgtggacccccaccagaggctgacagccatgcaggtgctgaagcacccctgggtggtgaaccgggagtacctgagccccaaccagctgagccggcaggatgtgcacctggtgaagggggccatggccgccacctactttgccctgaacagaacaccccaggccccccggctggagcctgtgctgagcagcaacctggcccagaggcggggcatgaagaggctgaccagcacccggctgtag

SEQ ID NO: 330746 - DNA, 501 bp, Artificial Sequence
  derived and/or modified sequence
atgttcaccgaggaggacgtgaagttctacctggccgagctggccttagcactggatcatctgcacagtctgggaattatatatagggatctgaagcctgagaacatcctgttggacgaggaaggtcatattaaaatcaccgacttcgggctctctaaggaagccatagatcatgacaagagggcctattccttttgtggcaccatcgaatatatggctcctgaagtggtgaatagacgcggtcatactcagtctgcagattggtggtctttcggcgttcttatgtttgaaatgctgactggatctcttcccttccaaggtaaggacaggaaagaaactatggctcttattcttaaggccaaactgggaatgcctcagttcctgtctggcgaggctcagagcttactcagggccctattcaagcggaacccttgcaatcgcctcggagaaaagaccgctttatgcccaagagtcagctgcagcaggctactcgggttctag

SEQ ID NO: 330747 - DNA, 1935 bp, Artificial Sequence
  derived and/or modified sequence
atgaaggtgctgaagaaggccaccctgaaggtgcgggaccgggtgaggtctaaaatggaacgtgatatcctggccgaagtcaaccatccatttattgtgaaacttcactatgcgtttcagactgaaggaaaactgtatcttatcctcgattttttgaggggaggagacctgtttaccagactgtctaaggaagttatgtttaccgaggaggatgttaaattctacctcgccgagctcgccctcgcactcgaccacttacactctctgggcattatctatagggacctaaagcccgagaatatcctgctagatgaggaagggcacattaaaattaccgatttcggactgagtaaggaagccatagatcatgataaacgagcttactctttctgcgggaccatagagtacatggctcccgaggtcgttaaccgccgcggtcacacacagtctgctgattggtggtccttcggcgtcctcatgttcgagatgctgaccggaagcttacctttccagggtaaagacaggaaagaaactatggcattaatactgaaggcgaaattaggaatgcctcagtttctgagcggggaagcccagagcctcctcagagccttgtttaaacgcaacccctgtaatcgcctgggggccggaatcgatggggtggaagagattaaacgccatcccttctttgtgacaattgattggaacaccctttataggaaggagataaaaccccctttcaagccggctgtcgggcggccagaggacaccttccattttgatccagagttcactgctcgtacaccaacggattctcccggagtgccccctagtgccaacgctcaccacttatttcgcgggtttagcttcgttgcttcaagcctcatacaggaacccagccagcaggatctccacaaagtccccgtgcaccctatcgtgcaacaattgcatgggaacaatattcatttcacggacggctatgaaatcaaggaggatattggcgtaggatcttatagcgtgtgtaagaggtgcgtccataaagctacagataccgaatacgcggtgaagattattgataagtctaagcgcgacccatccgaggagatcgaaatactactccggtatggtcagcaccctaatatcatcacgctgaaggatgtgtatgacgacggcaaattcgtttatctcgtaatggagctgatgcgcggcggagaattgttggatagaatcttgcgacaacgctatttctccgagcgtgaggcatctgatgttctgtgcacaattacaaagacgatggattacctgcattcacaaggagtagtacatagagacctgaaaccaagcaacattctgtaccgtgatgaaagcgggagtcctgagagtatcagggtatgtgattttggcttcgctaagcagctacgagcaggaaacggcctgctcatgactccttgctacaccgcaaactttgttgcgcctgaggtactgaagagacaaggatacgatgcagcctgcgatatctggagtctagggatcctgctgtacaccatgctcgcaggcttcaccccgttcgcaaacggacctgacgacacccccgaagaaattctcgccaggatcgggtctgggaaatatgctctgtcaggcgggaactgggactccatatctgacgccgccaaggatgttgttagcaagatgttgcacgttgacccccaccaacggcttacagccatgcaggtccttaaacatccctgggtggtgaatcgcgagtatctatcaccaaaccaactgtcgcgccaagacgtgcacctagtcaagggagcaatggctgccacgtactttgccctgaaccggacgcctcaagccccccgtctcgagcccgttctctcttcaaatttggcccagaggcgtggtatgaaacgcttgacctctaccaggctgtag

SEQ ID NO: 330748 - DNA, 1935 bp, Artificial Sequence
  derived and/or modified sequence
atgaaggtgctgaagaaggccaccctgaaggtgcgggaccgggtgagatcaaagatggagcgcgacattctcgccgaggtcaaccatccctttatcgtgaaattgcattacgctttccagaccgaaggtaagctttacttgatcctggacttcctgagggggggcgaccttttcactagactcagcaaggaagtgatgttcaccgaagaggatgttaaattctacctcgcagagctggccctcgccctggatcacttgcacagtttggggattatctatagagatctgaaacccgagaatattttgctagacgaggaaggccacatcaagatcacagatttcggactgtctaaagaagctattgaccatgacaagcgggcatacagtttctgcggcaccatcgaatacatggctccagaggtggtcaaccgccgcggccacacccagagtgctgattggtggagctttggtgttctcatgtttgagatgctgacaggctcgctgcccttccaggggaaggaccggaaagaaactatggctctcatactgaaagccaagcttggcatgccccaattcctaagtggcgaggctcagtccctcctgagggccctgttcaagaggaacccttgcaatcgtctgggcgccgggatagatggagttgaagagataaagcggcatcccttcttcgtgactattgactggaataccttatatcggaaggagattaagccgccgttcaagcctgctgtgggtcggcctgaggatacattccacttcgaccctgagtttactgcccggactcctacggactcccccggggttccccctagtgccaacgctcatcacctctttaggggattttccttcgtagcgtcctctctgattcaggagccaagccagcaggacctgcacaaggtgcccgtccaccccattgtccagcaactgcacgggaacaatatacacttcacagacggctacgaaatcaaggaggacatcggtgttggtagttactcagtgtgcaagaggtgtgtgcataaagctacagatacagagtacgccgtgaaaattatcgataaaagcaagagagatcccagcgaagaaatcgaaatactactgcgctacggccagcacccgaatatcattacactgaaagacgtatacgacgatggtaagttcgtctacctcgtcatggagttaatgcgggggggcgaactgctcgacagaattctgcggcaacgctacttctcagagcgcgaagccagcgatgtgctgtgtaccattacaaaaacaatggattacctgcattcccagggagtcgtccaccgcgacctcaagccaagtaacatcctttacagagatgagtcaggttcccctgaaagtatccgggtatgcgactttggtttcgccaagcagcttagagccggcaatggacttctcatgaccccttgctacactgctaactttgtggcccctgaagtgttgaaaagacaggggtatgacgctgcctgtgacatctggtcgctgggtattttgttatacactatgttagcaggctttactccgttcgccaacggccctgacgatacgcccgaagagatcctggcccggatcggctccgggaagtacgctctctccggcggaaactgggactcaattagcgatgccgcaaaagacgttgtctcaaagatgttgcacgtggacccccaccagagactgaccgcaatgcaagtactgaagcatccgtgggttgtcaacagagagtatttgtctccaaaccagctatcacggcaggacgtccatcttgtaaagggcgccatggctgctacttatttcgcgttaaacagaaccccccaggcgcccaggctggagcctgtgctgtcttcaaatctggcgcaacgaaggggtatgaagcgcctaacgagcactcgtctgtag

SEQ ID NO: 330749 - DNA, 501 bp, Artificial Sequence
  derived and/or modified sequence
atgtttactgaggaggacgtaaagttctacttggcagagctggccctcgctcttgatcatctacacagcctgggaatcatataccgggatctcaagcccgagaacatactgctggacgaagaagggcatataaagatcacggactttggcttgtcaaaagaagctattgatcacgataagcgggcatactccttttgcgggacaatcgaatatatggcacctgaggtcgttaaccggagggggcatacccagtcagccgactggtggtcgttcggcgtgcttatgtttgaaatgctgacaggatcactcccctttcagggcaaggatcgcaaagaaacaatggctttgatcctgaaggccaagctcgggatgcctcagtttttgtccggggaggcccagtcccttctccgcgcattgtttaagcgcaatccgtgtaatcgccttggtgagaagacggctctgtgccctcgtgtctcctgcagccggttactgggattttag

SEQ ID NO: 330750 - DNA, 1935 bp, Artificial Sequence
  derived and/or modified sequence
atgaaagtcctgaagaaggctacattgaaagtgagggatcgggtgcggagtaaaatggagagggatattctggcagaggtgaatcaccccttcatcgttaaactacactacgccttccagactgagggaaagttatatctcatccttgatttccttagaggtggagatttgtttacccgcctcagcaaggaggtgatgttcacagaagaggacgtcaagttctacctcgcagaactggccctggcacttgaccacctccactccctgggaattatctaccgggacttgaagcctgaaaacattctcctcgacgaggagggccatattaaaatcaccgatttcggcttgagcaaggaggccatcgatcatgataaacgcgcttacagcttctgcgggaccatcgagtacatggctcccgaggtggtcaacaggcgaggtcatacacagagcgcggactggtggtcgttcggggtgttaatgttcgagatgctgaccggttctctgcctttccagggaaaggaccgcaaagagaccatggctctgattttgaaggcaaaactgggcatgccgcagtttttgagtggggaagcacaatcattgctgcgcgcattgttcaagcgcaatccatgtaacagactgggggctggcatagatggcgtggaggagatcaagcggcatcctttcttcgtaacaatcgactggaatactctttaccggaaggaaataaagcccccttttaagccagcagttggcaggccggaggacacctttcacttcgatcctgagtttaccgctcgcactccaaccgactcgcctggtgttcctccctccgctaatgcgcaccatctgtttcggggattctcattcgtcgccagtagcttgatccaggagccctcgcagcaggatctacacaaagtgccagttcatcccattgttcagcagcttcatggaaacaatatccatttcacggatggctatgagataaaggaggacatcggcgtcgggtcttactctgtgtgtaaaagatgcgtccataaagccaccgatacagaatacgcggtaaagatcatcgataagtctaaaagggatccctcagaggaaattgaaatcctcctacggtacggccagcacccaaacattatcactttgaaagacgtgtacgacgacgggaagttcgtctacttggtcatggagcttatgagaggtggcgaactgctcgaccgaattctccgccagcgctacttcagtgaacgggaggctagcgacgtactgtgcaccatcacgaagactatggattatttacactcccagggcgtcgtgcatagagacttgaaacccagtaatatcctataccgagatgaatccggttccccagaatccatcagggtctgcgattttgggttcgcaaagcagctcagagctggaaacggactgcttatgacaccatgttacactgcaaatttcgtggcacctgaagttttaaaacggcaggggtatgacgctgcctgcgacatctggagcttaggcattctactatatacgatgctggccggttttacacctttcgctaatggacccgacgacacccctgaagagattctagccaggatcggcagcggaaagtacgcactgagtgggggtaactgggactctataagcgacgcagcaaaggatgtggtctctaagatgctccacgtggaccctcatcagcggctcaccgccatgcaggtactaaaacatccttgggtagtaaatcgcgagtaccttagccctaatcaactgtcccgacaggatgtacatcttgtcaaaggagctatggctgccacctatttcgccctcaacagaactccccaagcacccagacttgaaccggtattgtcctcaaatcttgctcagagaagggggatgaaaagactgaccagtacacggctgtag

SEQ ID NO: 330751 - DNA, 1935 bp, Artificial Sequence
  derived and/or modified sequence
atgaaagttctcaagaaggccaccctgaaagtgagagatcgcgtgagatccaagatggagcgagacatcctggctgaagtgaaccatccattcatcgtaaagttgcactatgcctttcaaactgagggcaagctctatctcatactagactttcttcggggtggggatctttttaccaggttgtctaaagaagtcatgtttaccgaggaagacgttaaattctatctggccgagttggccttggccttggaccacctgcactcattggggattatctaccgggatttgaaacctgagaatatcctcctcgacgaggagggtcacattaaaataacagacttcggcctttctaaagaagcgatagaccacgataaacgcgcatactctttttgtggtactatagagtatatggcccctgaagtcgtgaatcgacggggtcatacccagtcagcagattggtggagtttcggtgttttgatgtttgaaatgctgacgggcagcttacccttccagggtaaggataggaaagagactatggcgctgattctaaaagccaagcttggaatgccacagttcctcagcggcgaagctcagagtttgctgcgcgctttatttaaacgaaatccctgtaaccgtctaggcgcaggaatcgacggcgtggaggagatcaaacgccacccttttttcgtgactattgactggaacaccctatatcggaaagagatcaagcccccattcaagccggctgtgggaagaccagaggatactttccacttcgacccagagttcaccgcacgaacccctacagacagcccaggcgtccctcctagcgcaaatgcccaccacctgttcaggggcttcagtttcgtcgcatcttccctgatccaggagcctagccagcaggacctgcacaaggtcccagtgcaccccatcgtccagcagctccacggaaacaacattcatttcactgacgggtacgagattaaagaagacatcggcgtaggcagctatagcgtgtgtaagcgctgcgtccataaagccacagacacggaatatgcggtgaagatcattgacaagagcaaacgggacccctccgaggaaattgagatcttgctgcggtatggacaacatcccaatattataaccctcaaggacgtgtatgatgatggcaagttcgtttacctcgtgatggagttaatgcggggaggggagcttcttgatagaatcctgagacagagatatttttccgagagggaggctagcgacgttttgtgcaccatcacgaagaccatggattatcttcacagccagggggtggtgcaccgggacttaaaaccatcgaacattttatatcgcgacgaatcaggttcccccgaatccattcgggtgtgcgacttcgggttcgccaagcaactgcgtgcgggaaacggattactaatgactccatgttatacggccaattttgtggcgccagaagtgcttaaacgccagggatacgacgccgcttgtgacatttggagccttggaatcctgctgtacacaatgctggcaggcttcaccccctttgctaacggccctgacgatacaccagaagaaattctggccagaattggctcagggaagtatgctctctcgggaggcaactgggactcaatctctgatgccgcaaaagatgtggtgagtaagatgctgcacgttgatccgcatcagaggttaacagccatgcaggtgctcaaacatccttgggtggtgaatagggaatatctgtctcctaatcagctcagccggcaggatgtgcatctcgtgaagggcgcaatggcagccacatatttcgcccttaatcgcactcctcaggcgccacgtttggagcctgtgctgtcttctaacctggctcagcgtcgtggtatgaaacgcctgacatctacaaggctgtag

SEQ ID NO: 330752 - DNA, 2297 bp, Artificial Sequence
  derived and/or modified sequence
aaacgtcctaggccctggttggaatggaagcagctttgccaggagcatgggtcctgggcctcagatgatctgaattctcgtcccttgaatagaagaaggcgtcgtgaaggagatagacatcagccatcatgtgaaggagggctttgagaaggcagatccttcccagtttgagctgctgaaggttttaggacaaggatcctatggaaaggtgttcctggtgaggaaggtgaaggggtccgacgctgggcagctctacgccatgaaggtccttaagaaagccaccctaaaagttcgggaccgagtgagatcgaagatggagagagacatcttggcagaagtgaatcaccccttcattgtgaagcttcattatgcctttcagacggaaggaaagctctacctgatcctggacttcctgcggggaggggacctcttcacccggctctccaaagaggtcatgttcacggaggaggatgtcaagttctacctggctgagctggccttggctttagaccatctccacagcctggggatcatctacagagatctgaagcctgagaacatcctcctggatgaagaggggcacattaagatcacagatttcggcctgagtaaggaggccattgaccacgacaagagagcgtactccttctgcgggacgatcgagtacatggcgcccgaggtggtgaaccggcgaggacacacgcagagtgccgactggtggtccttcggcgtgctcatgtttgagatgctcacggggtccctgccgttccaggggaaggacaggaaggagaccatggctctcatcctcaaagccaagctggggatgccgcagttcctcagtggggaggcacagagtttgctgcgagctctcttcaaacggaacccctgcaaccggctgggtgctggcattgacggagtggaggaaattaagcgccatcccttctttgtgaccatagactggaacacgctgtaccggaaggagatcaagccaccgttcaaaccagcagtgggcaggcctgaggacaccttccactttgaccccgagttcacagcgcggacgcccacagactctcctggcgtccccccgagtgcaaacgctcatcacctgtttagaggattcagctttgtggcctcaagcctgatccaggagccctcacagcaagatctgcacaaagtcccagttcacccaatcgtgcagcagttacacgggaacaacatccacttcaccgatggctacgagatcaaggaggacatcggggtgggctcctactcagtgtgcaagcgatgtgtgcataaagccacagacaccgagtatgccgtgaagatcattgataagagcaagagagacccctcggaagagattgagatcctcctgcggtacggccagcacccgaacatcatcaccctcaaggatgtctatgatgatggcaagtttgtgtacctggtaatggagctgatgcgtggtggggagctcctggaccgcatcctccggcagagatacttctcggagcgcgaagccagtgacgtcctgtgcaccatcaccaagaccatggactacctccattcccagggggttgttcatcgagacctgaagccgagtaacatcctgtacagggatgagtcggggagcccagaatccatccgagtctgcgacttcggctttgccaagcagctgcgcgcggggaacgggctgctcatgacaccctgctacacggccaatttcgtggccccggaggtcctgaagcgtcaaggctatgatgcggcgtgtgacatctggagtttggggatcctgttgtacaccatgctggcaggatttaccccttttgcaaatgggccagacgatacccctgaggagattctggcgcggatcggcagtgggaagtatgccctttctgggggaaactgggactcgatatctgacgcagctaaagacgtcgtgtccaagatgctccacgtggaccctcatcagcgcctgacggcgatgcaagtgctcaaacacccgtgggtggtcaacagagagtacctgtccccaaaccagctcagccgacaggacgtgcacctggtgaagggcgcgatggccgccacctactttgctctaaacagaacacctcaggccccgcggctggagcccgtgctgtcatccaacctggctcagcgcagaggcatgaagagactcacgtccacgcggctgtagcgggtgggaccctggccccagcgtcccctgccagcatcctcgtgggctcacagaccccggcctcggagcccgtctggcacccagagtgaccacaagtccagca

SEQ ID NO: 330753 - DNA, 2612 bp, Artificial Sequence
  derived and/or modified sequence
gggaagccagacggttaacacagacaaagtgctgccgtgacactcggccctccagtgttgcggagaggcaagagcagcgaccgcggcacctgtccgcccggagctgggacgcgggcgcccgggcggccggacgaagcgaggagggaccgccgaggctgcccccaagtgtaactccagcactgtgaggtttcagggattggcagaggggaccaaggggaccatgaaaatggacatggaggatgcggatatgactctgtggacagaggctgagtttgaagagaagtgtacatacattgtgaacgaccacccctgggattctggtgctgatggcggtacttcggttcaggcggaggcatccttaccaaggaatctgcttttcaagtatgccaccaacagtgaagaggttattggagtgatgagtaaagaatacataccaaagggcacacgttttggacccctaataggtgaaatctacaccaatgacacagttcctaagaacgccaacaggaaatatttttggaggatctattccagaggggagcttcaccacttcattgacggctttaatgaagagaaaagcaactggatgcgctatgtgaatccagcacactctccccgggagcaaaacctggctgcgtgtcagaacgggatgaacatctacttctacaccattaagcccatccctgccaaccaggaacttcttgtgtggtattgtcgggactttgcagaaaggcttcactacccttatcccggagagctgacaatgatgaatctcacacaaacacagagcagtctaaagcaaccgagcactgagaaaaatgaactctgcccaaagaatgtcccaaagagagagtacagcgtgaaagaaatcctaaaattggactccaacccctccaaaggaaaggacctctaccgttctaacatttcacccctcacatcagaaaaggacctcgatgactttagaagacgtgggagccccgaaatgcccttctaccctcgggtcgtttaccccatccgggcccctctgccagaagactttttgaaagcttccctggcctacgggatcgagagacccacgtacatcactcgctcccccattccatcctccaccactccaagcccctctgcaagaagcagccccgaccaaagcctcaagagctccagccctcacagcagccctgggaatacggtgtcccctgtgggccccggctctcaagagcaccgggactcctacgcttacttgaacgcgtcctacggcacggaaggtttgggctcctaccctggctacgcacccctgccccacctcccgccagctttcatcccctcgtacaacgctcactaccccaagttcctcttgcccccctacggcatgaattgtaatggcctgagcgctgtgagcagcatgaatggcatcaacaactttggcctcttcccgaggctgtgccctgtctacagcaatctcctcggtgggggcagcctgccccaccccatgctcaaccccacttctctcccgagctcgctgccctcagatggagcccggaggttgctccagccggagcatcccagggaggtgcttgtcccggcgccccacagtgccttctcctttaccggggccgccgccagcatgaaggacaaggcctgtagccccacaagcgggtctcccacggcgggaacagccgccacggcagaacatgtggtgcagcccaaagctacctcagcagcgatggcagcccccagcagcgacgaagccatgaatctcattaaaaacaaaagaaacatgaccggctacaagacccttccctacccgctgaagaagcagaacggcaagatcaagtacgaatgcaacgtttgcgccaagactttcggccagctctccaatctgaaggtccacctgagagtgcacagtggagaacggcctttcaaatgtcagacttgcaacaagggctttactcagctcgcccacctgcagaaacactacctggtacacacgggagaaaagccacatgaatgccaggtctgccacaagagatttagcagcaccagcaatctcaagacccacctgcgactccattctggagagaaaccataccaatgcaaggtgtgccctgccaagttcacccagtttgtgcacctgaaactgcacaagcgtctgcacacccgggagcggccccacaagtgctcccagtgccacaagaactacatccatctctgtagcctcaaggttcacctgaaagggaactgcgctgcggccccggcgcctgggctgcccttggaagatctgacccgaatcaatgaagaaatcgagaagtttgacatcagtgacaatgctgaccggctcgaggacgtggaggatgacatcagtgtgatctctgtagtggagaaggaaattctggccgtggtcagaaaagagaaagaagaaactggcctgaaagtgtctttgcaaagaaacatggggaatggactcctctcctcagggtgcagcctttatgagtcatcagatctacccctcatgaagttgcctcccagcaacccactacctctggtacctgtaaaggtcaaacaagaaacagttgaaccaatggatccttaagattttcagaaaacacttattt

SEQ ID NO: 330754 - DNA, 583 bp, Artificial Sequence
  derived and/or modified sequence
ccttttcagtcttccatgtgagaggatgaaagagagctcgcagcagagggaggaggcagttgttttgaaagttgttttgcgttgggagctggtgggaaagttcggtcttccccatttggaaaaggcaggctgggttccgctcctgcaccacacgcgctttccatttttagcttcattcagaggcagacagagctccttcctcttcctctccttgtttgtgacacttttctgaggcagcttttccacagtgccgagggtctggcggccatgaccccaggcattctgggacactggactgtgtgcccagaacatttttctgccatgagaggctgcccccaagtgtaactccagcactgtgaggtttcagggattggcagaggggaccaaggggaccatgaaaatggacatggaggatgcggatatgactctgtggacagaggctgagtttgaagagaagtgtacatacattgtgaacgaccacccctgggattctggtgctgatggcggtacttcggttcaggcggaggcatccttaccaaggaatctgcttttcaagtatgccaccaacagtgaagaggttatt

SEQ ID NO: 330755 - DNA, 2370 bp, Artificial Sequence
  derived and/or modified sequence
atgaagatggacatggaggacgccgacatgaccttatggaccgaagccgaattcgaagagaagtgcacctatattgtaaacgatcatccgtgggattctggggctgacggcggcacatccgtacaagccgaggcctctctacccaggaatttgctgttcaaatatgccaccaacagcgaagaggtaatcggtgtgatgagcaaggagtatatcccaaaaggaacccggttcggcccactgattggtgaaatctacaccaacgacaccgttcccaaaaatgccaacaggaagtacttctggagaatttactcccgcggagagttgcaccattttatcgacggattcaatgaggagaaaagcaattggatgagatacgtcaaccccgcgcattcacctagagaacagaacctcgccgcctgtcagaacggtatgaacatctacttttacacaataaagccaatcccggccaatcaggagctgctggtgtggtattgtagggacttcgcagaacgtttgcactacccctaccctggagaattaaccatgatgaatctcactcagacgcagtcttcccttaaacagccttctactgagaaaaacgagctgtgccccaagaatgtacccaaacgagagtattctgtgaaagagatcctgaaactggactcgaacccatccaagggaaaggatttgtaccgctctaacatttcccccttgacatcagaaaaagatctggatgactttcggcgtcgtggcagccctgaaatgccattttaccctagagtcgtgtaccctattagagcccctctgcccgaagactttcttaaggccagcctggcctacggcatcgagcgcccgacctacattactcgcagccccattccgagctccacgaccccttcgccctccgctcgctcttcacctgaccagagtttgaaaagtagttcaccgcatagcagcccagggaacaccgtttcccccgtcggccctggctcccaggagcatcgggattcgtacgcctacttaaatgcatcatatggcacagaagggctaggcagctacccggggtacgctcccctgcctcatctgccccccgcgttcatcccttcatacaacgcccattacccgaagttccttctgcctccctacgggatgaattgtaacgggctgagcgctgtcagctctatgaatgggataaataatttcggactgtttcccagactgtgtccggtatattctaatctcctgggtggcggtagtctgcctcatccaatgctgaatcccacgagccttccctccagtctgccttctgatggggcgcgccggctgctacagcctgagcatccacgggaggttttagtgccagctccacatagcgctttttcctttacaggggccgctgcttcaatgaaagataaagcctgttctccaacctccggtagcccgacagccggcacagccgcaacagcggagcacgtggtccagcccaaggctacctccgccgccatggcagctccgagttcagacgaggccatgaacttaatcaagaacaagaggaacatgactggatacaaaactcttccctatcctctgaagaagcaaaatggcaaaattaagtacgaatgcaacgtgtgtgcaaaaaccttcgggcagctgtccaacctgaaggtgcatttgcgggtccacagtggagagcgaccttttaagtgtcagacttgcaacaaggggttcacgcaattagcccacctgcaaaagcactatttagtccacactggggagaagccccatgagtgtcaggtttgtcacaagaggttttcaagtacatccaacttgaagacccatctccgcttacacagcggagagaagccataccaatgcaaagtgtgccccgccaaatttactcagtttgttcatctcaaacttcacaaaaggctccacactcgcgaacgaccccataagtgcagtcagtgccacaaaaactatatccatttatgcagcttgaaggttcatctcaaagggaactgtgccgctgcacccgcgcctggcttgcccctcgaggacctcacacggatcaatgaagagattgagaaatttgacatctccgacaacgccgatcgcctggaggatgtggaagacgacatttcagtaatatctgtggtggagaaagagatattggcagtcgtaaggaaagaaaaggaagaaacaggcctaaaagtgtctttgcagagaaacatgggtaacggactgctgtccagcggatgcagtctctacgaaagttccgatctgcctttgatgaaacttcctccctcaaacccactgccactggttccagtaaaagtcaaacaggaaactgtcgaaccaatggatccctag

SEQ ID NO: 330756 - DNA, 192 bp, Artificial Sequence
  derived and/or modified sequence
atgaaaatggatatggaagatgccgacatgacactttggacagaggcagaatttgaggagaaatgtacatacattgtcaatgatcacccctgggatagcggcgcagatgggggaacgtccgtgcaagccgaagcttctcttccgagaaacctcctcttcaaatacgcgactaattccgaggaggttatttag

SEQ ID NO: 330757 - DNA, 2367 bp, Artificial Sequence
  derived and/or modified sequence
atgaagatggatatggaggatgctgatatgactttgtggaccgaggccgagtttgaagaaaagtgcacatacatcgttaacgatcacccatgggattcgggggccgacggggggacatccgtccaggcggaggcatcactgccccgcaacctgctcttcaagtatgctaccaactcagaggaagtgatcggcgttatgtcaaaagaatatatcccgaagggtacaaggttcggccccctgattggagagatttacaccaacgacaccgtgcctaagaatgccaataggaagtatttctggagaatctattctagaggggagctgcatcactttatcgacggcttcaatgaagagaagtccaattggatgcggtacgtaaatcccgctcatagcccaagggagcagaaccttgcagcgtgccagaacggtatgaatatatatttttacacaatcaagccaatacctgccaatcaggaactcttggtatggtattgccgcgactttgctgaaagactgcattacccatatcctggcgaacttactatgatgaacttgacccagacccaaagcagcctaaaacaaccaagtacagaaaaaaacgagctgtgtcctaagaatgtccccaagagggagtatagtgtgaaggagatcctgaagttggatagcaatccttctaaaggcaaggacttgtatcgaagcaatataagtcccctgacaagtgaaaaagacttggatgactttagacgccgcggcagccccgagatgccgttctatccacgggtggtgtatcccatcagagctcctctgcccgaagacttcctgaaggcaagcctcgcttacggtatagagcgtcctacctatatcacccgctcccccattccttcgtcaaccacacccagcccctctgcccggtcatctccggaccagtctttgaagtcctctagcccgcattctagcccagggaataccgtgagcccagtgggcccgggttcacaagagcatagagattcatatgcgtatctcaacgcttcctacgggacggagggcttgggaagttatcctggttatgctccgctacctcacctcccgcctgctttcatacctagctataacgctcattacccaaagttcctgctgcctccgtacggcatgaactgcaacgggctgtcagcagtcagctccatgaacggcattaacaactttggactgtttcctcggttatgtccagtgtactctaacctgctgggtggcggctccctacccacgccctgttccaccccactactcccctctagcctgccatccgacggagcacggaggctgctgcagcctgaacaccccagggaagtactcgtgccggctccacattccgcttttagtttcacgggagccgcagctagcatgaaggacaaggcatgttcgcccacttctggatctcccaccgctggaacagccgcgactgctgagcacgtggtacagcctaaagctacaagcgctgcaatggcagccccgagcagtgatgaggctatgaacctgatcaagaataagcggaacatgaccgggtacaaaacactcccatatcctttaaagaagcaaaacggtaaaattaagtacgagtgcaacgtttgcgcaaaaacttttggccagctgtccaatctgaaggtgcatctgcgcgtgcattctggagagaggccattcaagtgtcagacatgtaataaggggttcacacaactggcccacctgcaaaagcactatctggtgcacacaggagagaaaccacacgaatgccaggtatgccataaaagattttcctcaactagcaacttaaagacccaccttcgtctccacagcggagagaagccttaccagtgtaaagtgtgtccggccaagtttactcaattcgtgcatctcaagctccacaaaaggctccatacaagagagcggccgcataaatgttctcagtgccataaaaattatatacatttgtgctccctgaaggtgcacttgaaaggcaactgcgccgccgcacccgcccccgggctgccccttgaagacttgactcgaatcaacgaggagattgagaaatttgacatctctgataatgctgataggttagaagatgtggaagacgacatctcggtgatcagcgttgtggagaaggagattctggctgtggttcgcaaagagaaagaggaaaccgggttaaaggtcagcctgcagcgcaacatgggcaacggcctgttgagttcaggatgctcactatacgaatcaagcgatctgcccctgatgaaactgccccccagcaatcctctacccttagtgccagtaaaagttaagcaggaaaccgtggagccgatggacccctag

SEQ ID NO: 330758 - DNA, 2370 bp, Artificial Sequence
  derived and/or modified sequence
atgaagatggacatggaggatgctgacatgaccctgtggacagaggccgagtttgaggagaagtgcacctacatcgtgaatgaccacccctgggacagcggggctgatggcggcacctctgtgcaggccgaggccagcctgcccaggaacctgctcttcaagtatgccaccaacagcgaggaggtgattggagtgatgagcaaggagtacatccccaagggcaccaggtttggccccctgattggagagatctacaccaatgacacagtgcccaagaatgccaacaggaagtacttctggaggatctacagcagaggagagctgcaccacttcattgatggcttcaatgaggagaagagcaactggatgagatatgtgaacccagcccacagcccccgggagcagaacctggccgcctgccagaatggcatgaacatctacttctacaccatcaagcccatcccagccaaccaggagctgctggtgtggtactgccgggactttgctgagcggctgcactacccctacccaggagagctgaccatgatgaacctgacccagacccagagcagcctgaagcagcccagcacagagaagaatgagctgtgccccaagaatgtgcccaagcgggagtacagcgtgaaggagatcctgaagctggacagcaaccccagcaagggcaaggacctgtaccgcagcaacatcagccccctgaccagcgagaaggacctggatgacttcagaagaagaggcagccctgagatgcccttctacccccgggtggtgtaccccatccgggcccccctgcctgaggacttcctgaaggccagcctggcctacggcatcgagcggcccacctacatcaccaggagccccatccccagcagcaccacccccagccccagcgcccggagcagcccagaccagagcctgaagagcagcagcccccacagcagccctggcaacacagtgtcccctgtgggccctggcagccaggagcaccgggacagctatgcctacctgaatgccagctatggaacagagggcctgggcagctacccaggctacgcccccctgccccacctgcccccagccttcatccccagctacaatgcccactaccccaagttcctgctgcccccctacggcatgaactgcaatggcctgtctgctgtgtcctccatgaatggcatcaacaactttggcctcttcccccggctgtgccctgtgtacagcaacctgctgggcggcggcagcctgccccaccccatgctgaaccccaccagcctgcccagcagcctgcccagtgatggagcccggcggctgctgcagcctgagcacccccgggaggtgctggtgcctgccccccacagcgccttctccttcaccggggccgccgcctccatgaaggacaaggcctgcagccccaccagcggcagccccacagctggaacagctgccacagctgagcacgtggtgcagcccaaggccaccagcgctgccatggccgcccccagcagtgatgaggccatgaacctgatcaagaacaagaggaacatgacaggctacaagaccctgccctaccccctgaagaagcagaatggcaagatcaagtatgagtgcaatgtgtgtgccaagaccttcggccagctgagcaacctgaaggtgcacctgcgggtgcacagcggggagcggcccttcaagtgccagacctgcaacaagggcttcacccagctggcccacctgcagaagcactacctggtgcacactggagagaagccccatgagtgccaggtgtgccacaagcgcttcagcagcaccagcaacctgaagacccacctgcggctgcacagcggggagaagccctaccagtgcaaggtgtgcccagccaagttcacccagtttgtgcacctgaagctgcacaagaggctgcacacccgggagcggccccacaagtgcagccagtgccacaagaactacatccacctgtgcagcctgaaggtgcacctgaagggcaactgtgccgccgccccagcccctggcctgcccctggaggacctgacccgcatcaatgaggagattgagaagtttgacatcagtgacaatgctgaccggctggaggatgtggaggatgacatcagcgtcatctctgtggtggagaaggagatcctggccgtggtgaggaaggagaaggaggagaccggcctgaaggtgtccctgcagaggaacatgggaaatggcctgctgagcagcggctgcagcctgtatgagagcagtgacctgcccctgatgaagctgccccccagcaaccccctgcccctggtgcctgtgaaggtgaagcaggagaccgtggagcccatggacccctag

SEQ ID NO: 330759 - DNA, 192 bp, Artificial Sequence
  derived and/or modified sequence
atgaagatggacatggaggatgctgacatgaccctgtggacagaggccgagtttgaggagaagtgcacctacatcgtgaatgaccacccctgggacagcggggctgatggcggcacctctgtgcaggccgaggccagcctgcccaggaacctgctcttcaagtatgccaccaacagcgaggaggtgatctag

SEQ ID NO: 330760 - DNA, 2367 bp, Artificial Sequence
  derived and/or modified sequence
atgaagatggacatggaggatgctgacatgaccctgtggacagaggccgagtttgaggagaagtgcacctacatcgtgaatgaccacccctgggacagcggggctgatggcggcacctctgtgcaggccgaggccagcctgcccaggaacctgctcttcaagtatgccaccaacagcgaggaggtgattggagtgatgagcaaggagtacatccccaagggcaccaggtttggccccctgattggagagatctacaccaatgacacagtgcccaagaatgccaacaggaagtacttctggaggatctacagcagaggagagctgcaccacttcattgatggcttcaatgaggagaagagcaactggatgagatatgtgaacccagcccacagcccccgggagcagaacctggccgcctgccagaatggcatgaacatctacttctacaccatcaagcccatcccagccaaccaggagctgctggtgtggtactgccgggactttgctgagcggctgcactacccctacccaggagagctgaccatgatgaacctgacccagacccagagcagcctgaagcagcccagcacagagaagaatgagctgtgccccaagaatgtgcccaagcgggagtacagcgtgaaggagatcctgaagctggacagcaaccccagcaagggcaaggacctgtaccgcagcaacatcagccccctgaccagcgagaaggacctggatgacttcagaagaagaggcagccctgagatgcccttctacccccgggtggtgtaccccatccgggcccccctgcctgaggacttcctgaaggccagcctggcctacggcatcgagcggcccacctacatcaccaggagccccatccccagcagcaccacccccagccccagcgcccggagcagcccagaccagagcctgaagagcagcagcccccacagcagccctggcaacacagtgtcccctgtgggccctggcagccaggagcaccgggacagctatgcctacctgaatgccagctatggaacagagggcctgggcagctacccaggctacgcccccctgccccacctgcccccagccttcatccccagctacaatgcccactaccccaagttcctgctgcccccctacggcatgaactgcaatggcctgtctgctgtgtcctccatgaatggcatcaacaactttggcctcttcccccggctgtgccctgtgtacagcaacctgctgggcggcggcagcctgcccaccccctgcagcacccccctgctgcccagcagcctgcccagtgatggagcccggcggctgctgcagcctgagcacccccgggaggtgctggtgcctgccccccacagcgccttctccttcaccggggctgctgcctccatgaaggacaaggcctgcagccccaccagcggcagccccacagctggaacagctgccacagctgagcacgtggtgcagcccaaggccaccagcgctgccatggccgcccccagcagtgatgaggccatgaacctgatcaagaacaagaggaacatgacaggctacaagaccctgccctaccccctgaagaagcagaatggcaagatcaagtatgaatgtaatgtgtgtgccaagaccttcggccagctgagcaacctgaaggtgcacctgcgggtgcacagcggggagcggcccttcaagtgccagacctgcaacaagggcttcacccagctggcccacctgcagaagcactacctggtgcacactggagagaagccccatgagtgccaggtgtgccacaagcgcttcagcagcaccagcaacctgaagacccacctgcggctgcacagcggggagaagccctaccagtgcaaggtgtgcccagccaagttcacccagtttgtgcacctgaagctgcacaagaggctgcacacccgggagcggccccacaagtgcagccagtgccacaagaactacatccacctgtgcagcctgaaggtgcacctgaagggcaactgtgccgccgccccagcccctggcctgcccctggaggacctgacccgcatcaatgaggagattgagaagtttgacatcagtgacaatgctgaccggctggaggatgtggaggatgacatcagcgtcatctctgtggtggagaaggagatcctggccgtggtgaggaaggagaaggaggagaccggcctgaaggtgtccctgcagaggaacatgggaaatggcctgctgagcagcggctgcagcctgtatgagagcagtgacctgcccctgatgaagctgccccccagcaaccccctgcccctggtgcctgtgaaggtgaagcaggagaccgtggagcccatggacccctag

SEQ ID NO: 330761 - DNA, 2370 bp, Artificial Sequence
  derived and/or modified sequence
atgaagatggacatggaggacgccgacatgaccctgtggaccgaggccgaattcgaggagaagtgcacttacattgtcaatgatcacccctgggacagtggagccgacggaggtacttctgtgcaagccgaagcaagccttcctcgcaatctgctatttaaatacgcaactaacagcgaggaggtgatcggagtgatgagcaaagaatacattcctaagggtactcgtttcggccccctcattggcgagatatataccaacgacactgtgccgaagaatgcaaacagaaagtacttttggagaatctactcccgcggcgaactgcatcacttcatcgatggctttaatgaggaaaagtccaattggatgcgttacgtgaaccccgcccattcaccaagggagcaaaatctggctgcttgccagaatgggatgaacatctatttttacaccatcaagcctattcctgctaaccaggaactccttgtgtggtactgccgcgactttgccgagagactgcactacccttacccaggtgagctgacaatgatgaacctgacccaaactcagtcgtccttgaaacagccgtctaccgagaaaaacgaactctgccccaagaatgtgcccaaacgagagtactctgtcaaggaaattctcaagttggactctaatccttcaaagggcaaagatctctaccgcagcaatattagccccctcactagcgaaaaggaccttgacgactttagaagacgtggatccccagagatgccattctatccccgagtagtgtaccctatacgggcacccctgcctgaggattttctcaaggcctctctcgcatacggcatagagagaccaacatatatcactcggtctcccatacctagttctaccaccccttcaccatccgcgcgcagctctccggaccagtcgctaaagtctagctctccacacagctctcctggaaataccgtttcacctgttgggcctggttcacaggagcatagggactcctacgcctatctcaacgctagttacggaaccgagggtttaggttcttatcccggctacgccccgctgccgcatctgcctcccgcattcattcctagttataacgcccactatcctaaattcctgctgccaccttatggcatgaactgcaacggcctcagcgctgtgtcttctatgaacggcatcaacaatttcggattgttccctagactgtgccctgtatactccaatctgctgggtgggggcagtttgcctcaccctatgctcaatccgacgagtctcccatcttccttaccaagtgatggtgctagacggttgctgcagcctgagcatccccgcgaggtgcttgtgcccgcaccccactcggccttttcattcactggagctgctgcctcaatgaaggacaaagcttgcagccccactagcggatcccccaccgcaggaacagccgccacagcagagcatgtggtccagcctaaggctacatctgctgccatggccgctccgtcctctgatgaagccatgaaccttattaagaataagcggaatatgactggttataagactttaccataccccctgaaaaaacagaacggcaagatcaaatacgagtgtaatgtgtgtgctaagacattcggacagctgtccaatttgaaggtacacctaagagttcacagcggtgagcggccattcaagtgtcagacttgtaacaagggcttcactcagctggcccatttgcagaagcactacctggtgcacacgggtgaaaaaccccatgagtgtcaagtctgtcataagagattctcgagtacgtcaaacctcaagacacatcttcggctgcatagcggtgagaaaccctatcagtgcaaagtttgccccgccaaattcactcagtttgttcacctcaagttgcacaaaagactgcatacacgggagcggccacacaagtgctcgcagtgtcataagaactacattcacctgtgcagtcttaaggttcatctgaaaggaaactgtgccgccgcacccgcacccggtctgcctctggaggacctcacccgcatcaatgaagagatagagaagtttgatatctctgacaacgcagatcgcctcgaagacgtagaagacgacatctccgtgatttctgtggtggagaaagagatcctggccgttgttcgtaaggaaaaggaggaaacaggactgaaggtttctctccagcggaacatgggcaacggactgctcagcagcggttgtagtttgtatgaatcctccgacctccctttgatgaagttacccccaagcaacccactccctcttgtgcccgtgaaagtgaagcaggaaaccgtcgagcctatggatccgtag

SEQ ID NO: 330762 - DNA, 192 bp, Artificial Sequence
  derived and/or modified sequence
atgaagatggacatggaggacgccgacatgaccctgtggaccgaggcggaattcgaagaaaagtgcacgtatattgtgaacgatcacccgtgggactccggtgccgacggtggcacaagcgttcaggctgaggctagtttgcccaggaaccttctctttaaatatgcaacaaattccgaggaggtaatttag

SEQ ID NO: 330763 - DNA, 2367 bp, Artificial Sequence
  derived and/or modified sequence
atgaagatggacatggaggacgccgacatgaccctgtggaccgaggccgagtttgaagaaaaatgcacgtacatcgtcaacgaccacccgtgggactccggcgccgacggtggcacctccgtccaagcggaagcgtcgctccctcggaaccttctgttcaaatatgcaactaattccgaagaagtcatcggggttatgtccaaggaatatattcctaagggaacacgattcggacccttgataggcgagatatacaccaacgatactgtccctaaaaatgccaatcgaaaatacttttggagaatttactcgagaggtgaactgcatcactttatcgacgggttcaacgaagagaaatccaattggatgcgctacgttaatccagcccatagccctagggagcagaacctagctgcatgtcagaatgggatgaatatttatttctacaccataaaaccgatacccgctaaccaggagcttcttgtttggtactgccgggatttcgccgaaaggctccactatccctatccaggcgagctaactatgatgaatctgacacagacacagtccagcctgaagcagccaagcactgagaagaacgaactctgtcctaaaaacgtgccgaagcgtgagtatagcgtcaaggagattctgaagctggactccaacccttctaaggggaaggacctgtacagatctaacatctcgcccctcacgtccgagaaggatctggacgattttaggcgtcggggtagcccggaaatgccattctatcctcgtgtggtatatccaatccgggcaccgctgcccgaggacttcctgaaggcttccctggcctacggtatcgaacgacccacatatatcactagaagcccaataccatcatcaacaacaccttcaccctctgcgaggtcgagccctgatcagtccctgaagagttcatctccgcattcctcaccaggcaatacggttagtccggtaggtcctgggagtcaagagcatagagactcatatgcctatcttaatgccagctatggcaccgaaggactcgggagttatcctggatatgcaccactgccacatctgcctcctgcatttattccttcgtacaatgcccactatccgaaattccttctccccccatatgggatgaactgcaatggactgtccgcggtcagctccatgaatggcatcaacaattttggtctgtttccccggctctgccccgtgtactcgaacctgctgggtgggggctctctaccgaccccctgttccactccactgttgccgtcaagtctgcctagtgacggcgctagacggttgctgcagccagagcaccctagggaagtcttggttcctgcacctcactctgctttctcttttacaggagccgctgcttcaatgaaagataaggcgtgctcacccacatccggaagccccacagccggaaccgccgcgacggccgagcatgtggtgcagcccaaggcaacaagcgccgccatggccgctccctcttcggacgaggcgatgaacctgatcaagaataagagaaacatgactggttacaagacattaccctatccactcaagaagcaaaacggaaaaattaagtacgagtgcaatgtctgtgccaaaacatttggacagctcagtaacctgaaagtgcacttaagggtgcacagcggcgagagacctttcaagtgccagacgtgcaacaaagggttcacccagctggcacacctgcaaaagcattacttggtgcatacaggcgagaagccgcacgagtgccaggtgtgtcacaagagattcagctctacctctaatctgaaaactcatctgcgtctacacagcggagagaaaccatatcagtgcaaagtgtgcccagccaagttcactcaattcgtgcacctgaaactgcataagcgactccacacccgggaacgcccacacaaatgctcccagtgccataagaattatattcatttgtgttcgctgaaagtgcatctcaaaggaaattgcgccgccgcaccggcaccggggttaccactggaggacttaactcgcattaatgaagaaatagagaaatttgatatctctgacaacgcagaccgtctcgaggacgtggaagacgacattagcgtgatatccgttgtggaaaaggagattttggccgtcgttagaaaggagaaggaagagaccggactcaaggtatccctgcaaaggaacatgggcaacggcctgctaagcagtggatgttcactctatgagagtagcgacctccccctaatgaaattacctccatctaatccgctgcccctggtgccagtcaaggtaaaacaggagacagtggagcctatggatccttag

SEQ ID NO: 330764 - DNA, 2370 bp, Artificial Sequence
  derived and/or modified sequence
atgaagatggatatggaggatgcagatatgaccctgtggaccgaagccgagtttgaggaaaaatgcacttacatcgtcaatgaccacccatgggacagcggagccgacgggggtacttctgtgcaggccgaggcttctcttccacggaatctgctgtttaagtacgctactaattccgaagaggtgatcggcgtgatgtcaaaagaatatatccccaagggaacacgattcggaccacttattggggaaatttacaccaatgacactgtgcctaagaacgccaaccgtaagtatttctggcgcatctactccagaggcgagctgcaccactttattgatggttttaacgaggaaaagagcaattggatgcgctatgtcaaccctgcgcactcacctcgggagcagaatcttgccgcttgtcagaacgggatgaacatatatttttacaccatcaaaccaatccctgccaatcaggaactcctggtttggtattgtcgtgatttcgccgaaaggctccactacccttatcccggagaattgaccatgatgaacctgacacagactcagtctagcctcaaacaaccgagcactgaaaaaaacgaactctgcccaaaaaacgtgcctaaacgtgagtactccgtgaaagagatcctaaaattagattcgaaccccagtaaggggaaggacctgtataggagtaacatctcaccattgacatccgaaaaggatctcgacgactttcgcagacgagggtccccggaaatgcctttttaccctcgggtggtataccccattagagcaccactcccggaagacttcctgaaggcttcactggcctatggcatcgaaagacccacctacattacacgaagtcccatacccagctccactacgcccagtcccagtgcacgctcttcccccgaccaaagtctgaaatcttccagcccacattcctctccgggtaacaccgttagccctgttggtccaggttcccaagaacatagggattcttatgcgtacctgaatgcgagctacggcacagaaggactcggatcctaccctggatatgctcctctgccgcacctgccacctgctttcatcccctcgtacaatgctcattaccccaagtttctcctgccgccatacgggatgaactgtaatggactcagcgctgtgtcttccatgaatggcatcaataacttcggactgtttccgaggctttgccccgtgtattccaatcttctgggcggtggttccctgccacaccctatgctgaaccccacttccctgccttccagtttgcctagcgacggtgccaggcggttgctgcaacccgagcatccccgagaagtcctggtccccgctccccactcagcgttcagcttcacaggggctgccgcaagcatgaaggacaaagcgtgctctcccacatcaggcagccccacggccggaactgcagcaacggcggaacacgttgttcagcccaaagcaaccagcgctgccatggccgctccctcatctgatgaggccatgaatctcatcaaaaataaaagaaatatgaccggctataaaactcttccgtacccgctcaagaaacagaatggtaagattaagtacgagtgtaatgtttgcgccaagaccttcggccagctgagcaatttaaaggtccatctgagggtgcactcaggagaacgtccatttaagtgtcaaacctgtaacaaagggtttacgcagttggcccacctgcagaaacattacctagtgcatacaggtgagaagccccacgagtgtcaagtttgtcacaagagattctccagtaccagtaatctgaaaactcacttgcgtctgcactccggcgagaagccgtaccagtgtaaagtgtgcccggctaaattcactcagttcgtgcacctaaagttgcacaagcggctgcacacacgcgagagaccccacaaatgctctcagtgtcacaaaaattatattcacctctgcagcctgaaggtgcatctgaaaggaaattgcgccgcagccccagcgcctggtctgcccctggaagatctgacaaggattaacgaagaaatcgagaaattcgatatctctgataatgcagatcggctggaggacgtggaggatgatatctctgtgatatctgtagttgagaaagaaatcctcgcagtcgttagaaaggaaaaagaggaaacagggctgaaggtgtcactgcaacgtaatatgggaaatggtttactgtcttccgggtgcagcctgtacgagtcctcggatctccctctgatgaaactgccaccaagcaaccctttgccgcttgtccctgttaaagtcaaacaagagaccgttgagccaatggatccatag

SEQ ID NO: 330765 - DNA, 192 bp, Artificial Sequence
  derived and/or modified sequence
atgaaaatggatatggaagacgccgacatgaccttatggaccgaggccgagtttgaagagaaatgcacatacatcgtgaatgaccacccatgggattctggcgctgacggcggaactagtgtgcaggccgaggcttcacttcctcgaaatctgctttttaaatatgccacaaattctgaggaggttatctag

SEQ ID NO: 330766 - DNA, 2367 bp, Artificial Sequence
  derived and/or modified sequence
atgaagatggatatggaggatgctgatatgactttgtggacagaagccgagtttgaagagaaatgcacttacatagtgaatgatcatccatgggactctggagctgatggcggaacgtccgtgcaagccgaagcaagtctgcccaggaacctactgttcaagtacgctaccaattccgaagaagtgattggcgtaatgtctaaggagtatatacctaaaggaaccaggttcggaccattgatcggtgagatttacactaacgatacggtcccaaagaatgctaatcgaaaatacttttggagaatatattctcgtggtgagcttcatcattttatcgatgggttcaacgaagagaagtctaattggatgcggtatgtcaaccccgcacactccccaagagaacagaaccttgccgcttgccagaacggtatgaatatttatttttacactataaagccgatcccagctaaccaggaactgctggtttggtattgccgggatttcgctgaacgcctccactacccttacccaggcgagctcaccatgatgaacctcacccaaacacagtcatccctcaaacaaccctctacagaaaagaatgagctgtgtccaaagaacgtgcccaagagagaatactctgtgaaagagatattgaagctcgacagtaatcctagcaagggaaaggatctctacaggagcaatatatcccccctcacaagcgaaaaggatctggacgacttccgaaggaggggttctccagagatgcccttctaccctagagtagtgtaccccatcagagctccactcccagaggacttcctgaaggcttcccttgcttatgggatagaacggccaacctacattaccagatcccccattcccagcagcaccacaccaagtccgagcgccagatcctcccctgatcagtccctaaagagctcttcgcctcactcctcccccggtaatacagtttcccctgtggggccaggttcgcaggaacaccgggactcttacgcatatttaaatgcttcctatgggacagagggactcggaagttatccgggatacgccccattgccacacttgcccccagcattcattccctcctataacgcacactatcctaaattcctgttaccaccctacggaatgaactgcaatgggctgtccgcagtgtcttccatgaacggcatcaataatttcgggctgttccccaggttgtgccctgtttacagcaacctgctagggggtggctccttgccgactccctgcagtacccccctgctgcccagcagtctgccatcagatggagccaggcgactgttgcagccagaacaccctcgcgaggtactcgtgcctgcaccacacagcgccttcagcttcacgggcgctgccgctagtatgaaggataaagcgtgcagccccacctccgggtcaccgactgctggaacggccgctaccgctgagcacgttgtgcagcccaaagccaccagtgccgcaatggcagccccaagttcagatgaagctatgaatctgatcaaaaacaaaaggaacatgactggttacaagacactgccctacccactcaagaagcagaatggtaagattaagtacgaatgcaatgtgtgcgccaaaacctttggacagctgtctaatttgaaggtccaccttcgggtgcacagcggcgagcggcctttcaagtgccagacctgtaacaaggggttcacccagttagctcatctccaaaagcactatctagttcacacgggcgagaagccccacgagtgtcaggtgtgtcacaagcggttcagcagtacaagcaatctcaagacacacttgagactccactctggcgagaagccttaccaatgtaaagtttgccctgccaagttcactcagtttgtacacctgaaattgcacaagcgacttcatactagagagaggccacataagtgttcccaatgtcacaagaattacatacacctgtgttcccttaaagtgcacctgaaagggaattgtgcagccgctcccgctcctggtcttcccctggaggatctgaccagaatcaatgaagagatcgagaagttcgacatcagcgataacgcagatcgactggaggacgtggaggacgatatcagcgtgattagcgtggtggagaaggaaatcctggcagtcgttagaaaagagaaggaagaaaccgggctcaaggtgtctcttcaacggaacatgggcaacgggctgctttcgtctggctgttcactgtatgaatcaagtgaccttccgttgatgaaactgcctcctagcaaccctctgcctctagtgccagtgaaggtgaagcaagagaccgttgaacctatggacccctag

SEQ ID NO: 330767 - DNA, 2370 bp, Artificial Sequence
  derived and/or modified sequence
atgaagatggacatggaggacgccgacatgaccctgtggaccgaggccgagttcgaggagaagtgcacctacatcgtgaacgaccacccctgggacagcggcgccgacggcggcaccagcgtgcaggccgaggccagcctgcccagaaacctgctgttcaagtacgccaccaacagcgaggaggtgatcggcgtgatgagcaaggagtacatccccaagggcaccagattcggccccctgatcggcgagatctacaccaacgacaccgtgcccaagaacgccaacagaaagtacttctggagaatctacagcagaggcgagctgcaccacttcatcgacggcttcaacgaggagaagagcaactggatgagatacgtgaaccccgcccacagccccagagagcagaacctggccgcctgccagaacggcatgaacatctacttctacaccatcaagcccatccccgccaaccaggagctgctggtgtggtactgcagagacttcgccgagagactgcactacccctaccccggcgagctgaccatgatgaacctgacccagacccagagcagcctgaagcagcccagcaccgagaagaacgagctgtgccccaagaacgtgcccaagagagagtacagcgtgaaggagatcctgaagctggacagcaaccccagcaagggcaaggacctgtacagaagcaacatcagccccctgaccagcgagaaggacctggacgacttcagaagaagaggcagccccgagatgcccttctaccccagagtggtgtaccccatcagagcccccctgcccgaggacttcctgaaggccagcctggcctacggcatcgagagacccacctacatcaccagaagccccatccccagcagcaccacccccagccccagcgccagaagcagccccgaccagagcctgaagagcagcagcccccacagcagccccggcaacaccgtgagccccgtgggccccggcagccaggagcacagagacagctacgcctacctgaacgccagctacggcaccgagggcctgggcagctaccccggctacgcccccctgccccacctgccccccgccttcatccccagctacaacgcccactaccccaagttcctgctgcccccctacggcatgaactgcaacggcctgagcgccgtgagcagcatgaacggcatcaacaacttcggcctgttccccagactgtgccccgtgtacagcaacctgctgggcggcggcagcctgccccaccccatgctgaaccccaccagcctgcccagcagcctgcccagcgacggcgccagaagactgctgcagcccgagcaccccagagaggtgctggtgcccgccccccacagcgccttcagcttcaccggcgccgccgccagcatgaaggacaaggcctgcagccccaccagcggcagccccaccgccggcaccgccgccaccgccgagcacgtggtgcagcccaaggccaccagcgccgccatggccgcccccagcagcgacgaggccatgaacctgatcaagaacaagagaaacatgaccggctacaagaccctgccctaccccctgaagaagcagaacggcaagatcaagtacgagtgcaacgtgtgcgccaagaccttcggccagctgagcaacctgaaggtgcacctgagagtgcacagcggcgagagacccttcaagtgccagacctgcaacaagggcttcacccagctggcccacctgcagaagcactacctggtgcacaccggcgagaagccccacgagtgccaggtgtgccacaagagattcagcagcaccagcaacctgaagacccacctgagactgcacagcggcgagaagccctaccagtgcaaggtgtgccccgccaagttcacccagttcgtgcacctgaagctgcacaagagactgcacaccagagagagaccccacaagtgcagccagtgccacaagaactacatccacctgtgcagcctgaaggtgcacctgaagggcaactgcgccgccgcccccgcccccggcctgcccctggaggacctgaccagaatcaacgaggagatcgagaagttcgacatcagcgacaacgccgacagactggaggacgtggaggacgacatcagcgtgatcagcgtggtggagaaggagatcctggccgtggtgagaaaggagaaggaggagaccggcctgaaggtgagcctgcagagaaacatgggcaacggcctgctgagcagcggctgcagcctgtacgagagcagcgacctgcccctgatgaagctgccccccagcaaccccctgcccctggtgcccgtgaaggtgaagcaggagaccgtggagcccatggacccctag

SEQ ID NO: 330768 - DNA, 192 bp, Artificial Sequence
  derived and/or modified sequence
atgaagatggacatggaggacgccgacatgaccctgtggaccgaggccgagttcgaggagaagtgcacctacatcgtgaacgaccacccctgggacagcggcgccgacggcggcaccagcgtgcaggccgaggccagcctgcccagaaacctgctgttcaagtacgccaccaacagcgaggaggtgatctag

SEQ ID NO: 330769 - DNA, 2367 bp, Artificial Sequence
  derived and/or modified sequence
atgaagatggacatggaggacgccgacatgaccctgtggaccgaggccgagttcgaggagaagtgcacctacatcgtgaacgaccacccctgggacagcggcgccgacggcggcaccagcgtgcaggccgaggccagcctgcccagaaacctgctgttcaagtacgccaccaacagcgaggaggtgatcggcgtgatgagcaaggagtacatccccaagggcaccagattcggccccctgatcggcgagatctacaccaacgacaccgtgcccaagaacgccaacagaaagtacttctggagaatctacagcagaggcgagctgcaccacttcatcgacggcttcaacgaggagaagagcaactggatgagatacgtgaaccccgcccacagccccagagagcagaacctggccgcctgccagaacggcatgaacatctacttctacaccatcaagcccatccccgccaaccaggagctgctggtgtggtactgcagagacttcgccgagagactgcactacccctaccccggcgagctgaccatgatgaacctgacccagacccagagcagcctgaagcagcccagcaccgagaagaacgagctgtgccccaagaacgtgcccaagagagagtacagcgtgaaggagatcctgaagctggacagcaaccccagcaagggcaaggacctgtacagaagcaacatcagccccctgaccagcgagaaggacctggacgacttcagaagaagaggcagccccgagatgcccttctaccccagagtggtgtaccccatcagagcccccctgcccgaggacttcctgaaggccagcctggcctacggcatcgagagacccacctacatcaccagaagccccatccccagcagcaccacccccagccccagcgccagaagcagccccgaccagagcctgaagagcagcagcccccacagcagccccggcaacaccgtgagccccgtgggccccggcagccaggagcacagagacagctacgcctacctgaacgccagctacggcaccgagggcctgggcagctaccccggctacgcccccctgccccacctgccccccgccttcatccccagctacaacgcccactaccccaagttcctgctgcccccctacggcatgaactgcaacggcctgagcgccgtgagcagcatgaacggcatcaacaacttcggcctgttccccagactgtgccccgtgtacagcaacctgctgggcggcggcagcctgcccaccccctgcagcacccccctgctgcccagcagcctgcccagcgacggcgccagaagactgctgcagcccgagcaccccagagaggtgctggtgcccgccccccacagcgccttcagcttcaccggcgccgccgccagcatgaaggacaaggcctgcagccccaccagcggcagccccaccgccggcaccgccgccaccgccgagcacgtggtgcagcccaaggccaccagcgccgccatggccgcccccagcagcgacgaggccatgaacctgatcaagaacaagagaaacatgaccggctacaagaccctgccctaccccctgaagaagcagaacggcaagatcaagtacgagtgcaacgtgtgcgccaagaccttcggccagctgagcaacctgaaggtgcacctgagagtgcacagcggcgagagacccttcaagtgccagacctgcaacaagggcttcacccagctggcccacctgcagaagcactacctggtgcacaccggcgagaagccccacgagtgccaggtgtgccacaagagattcagcagcaccagcaacctgaagacccacctgagactgcacagcggcgagaagccctaccagtgcaaggtgtgccccgccaagttcacccagttcgtgcacctgaagctgcacaagagactgcacaccagagagagaccccacaagtgcagccagtgccacaagaactacatccacctgtgcagcctgaaggtgcacctgaagggcaactgcgccgccgcccccgcccccggcctgcccctggaggacctgaccagaatcaacgaggagatcgagaagttcgacatcagcgacaacgccgacagactggaggacgtggaggacgacatcagcgtgatcagcgtggtggagaaggagatcctggccgtggtgagaaaggagaaggaggagaccggcctgaaggtgagcctgcagagaaacatgggcaacggcctgctgagcagcggctgcagcctgtacgagagcagcgacctgcccctgatgaagctgccccccagcaaccccctgcccctggtgcccgtgaaggtgaagcaggagaccgtggagcccatggacccctag

SEQ ID NO: 330770 - protein, 84 aa, Artificial Sequence
  derived and/or modified sequence
KKSKPKKCVKKFVEYCDVNNDKSISVQELMGCLGVAKEDGKADTKKRHTPRGHAESTSNRQDAMVVSSRPKATTHRKSRTLSRR

SEQ ID NO: 330771 - protein, 448 aa, Artificial Sequence
  derived and/or modified sequence
MLLPQLCWLPLLAGLLPPVPAQKFSALTFLRVDQDKDKDCSLDCAGSPQKPLCASDGRTFLSRCEFQRAKCKDPQLEIAYRGNCKDVSRCVAERKYTQEQARKEFQQVFIPECNDDGTYSQVQCHSYTGYCWCVTPNGRPISGTAVAHKTPRCPGSVNEKLPQREGTGKTDDAAAPALETQPQGDEEDIASRYPTLWTEQVKSRQNKTNKNSVSSCDQEHQSALEEAKQPKNDNVVIPECAHGGLYKPVQCHPSTGYCWCVLVDTGRPIPGTSTRYEQPKCDNTARAHPAKARDLYKGRQLQGCPGAKKHEFLTSVLDALSTDMVHAASDPSSSSGRLSEPDPSHTLEERVVHWYFKLLDKNSSGDIGKKEIKPFKRFLRKKSKPKKCVKKFVEYCDVNNDKSISVQELMGCLGVAKEDGKADTKKRHTPRGHAESTSNRQENPRKEG

SEQ ID NO: 330772 - DNA, 255 bp, Artificial Sequence
  derived and/or modified sequence
aagaagagcaagcccaagaagtgcgtgaagaagttcgtggagtactgcgacgtgaacaacgacaagagcatcagcgtgcaggagctgatgggctgcctgggcgtggccaaggaggacggcaaggccgacaccaagaagagacacacccccagaggccacgccgagagcaccagcaacagacaggacgccatggtggtgagcagcagacccaaggccaccacccacagaaagagcagaaccctgagcagaagatag

SEQ ID NO: 330773 - DNA, 255 bp, Artificial Sequence
  derived and/or modified sequence
aagaagagcaagcctaagaaatgtgtgaagaagttcgtggagtactgcgacgttaacaatgataaatcaatctccgtccaggaattgatggggtgtctgggggtggccaaggaagacggaaaggctgacacaaagaaacgccacactccccgagggcacgctgagagcacaagtaacagacaagatgctatggtggtgagctcgcggcctaaggcaaccacccacaggaaatctcggaccctgtcaagacgctag

SEQ ID NO: 330774 - DNA, 255 bp, Artificial Sequence
  derived and/or modified sequence
aagaagagcaagcccaagaagtgtgtgaagaagtttgtggagtactgtgatgtgaacaatgacaagagcatctctgtgcaggagctgatgggctgcctgggcgtggccaaggaggatggcaaggctgacaccaagaagaggcacaccccccggggccacgccgagagcaccagcaaccggcaggatgccatggtggtgagcagccggcccaaggccaccacccacaggaagagcaggaccctgagcagaagatag

SEQ ID NO: 330775 - DNA, 255 bp, Artificial Sequence
  derived and/or modified sequence
aagaagagcaagcccaagaagtgcgtgaagaagttcgtggagtactgcgacgtgaacaatgataagtccattagcgtgcaagagctaatgggctgtctgggtgtggccaaggaggatggtaaggccgatacaaaaaagagacacactccacgaggacacgccgaaagcacatcaaatcgtcaggacgccatggttgtttctagccggcccaaggctaccacgcaccggaaaagtaggaccctgagtcgccgttag

SEQ ID NO: 330776 - DNA, 255 bp, Artificial Sequence
  derived and/or modified sequence
aagaagagtaagccaaaaaagtgcgtcaaaaaattcgtcgagtactgcgacgtaaataatgacaaatctatctccgttcaggaactcatgggctgtctaggagtggccaaggaagacggaaaagcagacactaaaaaacgccacacacccagaggccatgctgaatcaacctcgaacaggcaggacgccatggtggtgtcatccaggcctaaagccacaacacaccgaaagagtagaaccttatctcggcgatag

SEQ ID NO: 330777 - DNA, 672 bp, Artificial Sequence
  derived and/or modified sequence
aaaaaatcaaagcccaaaaaatgtgtgaagaagtttgttgaatactgtgacgtgaataatgacaaatccatctccgtacaagaactgatgggctgcctgggcgtggcgaaagaggacggcaaagcggacaccaagaaacgccacacccccagaggtcatgctgaaagtacgtctaatagacaggatgcaatggtggtgtcctccagacccaaagccacaacccatcgcaagtcaagaacactttccagaagataaacatgagtgggttcatgtctctctccttcaaagccaggacaaaatccccacttctttgctgccgcgagtcaatttgtgatttattttgtctgcacctgtttgatgccaggtcgacatttcctaaggcaagcccctgtatttgttgtggatttaagtggaggcggccagcacacaccttggatgtaatttaaaaccatttcctgaggaaagatgtgtgatatgctttcctttgtttagcaaatgtttatggttttaactttaaatctcaccgcaaatcacttacacttgaaaacagggctggtctgaaagtaattaccctccctgagtgccaagacctccagaagttgttttcattcccgaatggcaatcactgtactcatgcgctccacgcatcttaaataaactcagttcaaagca

SEQ ID NO: 330778 - protein, 46 aa, Artificial Sequence
  derived and/or modified sequence
MNKDAVQHERGPRTSTIRKQVALYFRGHKEENGAAAHFPSAALPAP

SEQ ID NO: 330779 - DNA, 141 bp, Artificial Sequence
  derived and/or modified sequence
atgaataaagatgctgttcagcacgagcgaggccctaggacaagtactattcgtaaacaagttgcgctgtactttagaggacacaaggaggagaatggcgccgctgctcactttccaagtgctgctctgcccgccccatag

SEQ ID NO: 330780 - DNA, 141 bp, Artificial Sequence
  derived and/or modified sequence
atgaacaaggatgctgtgcagcacgagcggggccccaggaccagcaccatcaggaagcaggtggccctgtacttccggggccacaaggaggagaatggagctgctgcccacttccccagcgctgccctgcctgccccctag

SEQ ID NO: 330781 - DNA, 141 bp, Artificial Sequence
  derived and/or modified sequence
atgaacaaggacgccgtgcagcacgagcggggcccccggaccagcactatccggaagcaggtcgctctgtatttcagaggccacaaggaggagaatggcgccgctgctcattttcccagcgcagccctacccgctccttag

SEQ ID NO: 330782 - DNA, 141 bp, Artificial Sequence
  derived and/or modified sequence
atgaataaggacgccgtgcagcacgagcgaggcccaagaacatccactataagaaaacaagtcgctttatacttcaggggtcataaggaagagaacggcgctgctgcacactttcccagtgccgcattgcccgctccctag

SEQ ID NO: 330783 - DNA, 141 bp, Artificial Sequence
  derived and/or modified sequence
atgaacaaggacgccgtgcagcacgagagaggccccagaaccagcaccatcagaaagcaggtggccctgtacttcagaggccacaaggaggagaacggcgccgccgcccacttccccagcgccgccctgcccgccccctag

SEQ ID NO: 330784 - protein, 152 aa, Artificial Sequence
  derived and/or modified sequence
MAEQVLPQALYLSNMRKAVKIRERTPEDIFKPTNGIIHHFKTMHRYTLEMFRTCQFCPQFREIIHKALIDRNIQATLESQKKLNWCREVRKLVALKTNGDGNCLMHATSQYMWGVQDTDLVLRKALFSTLKETDTRNFKFRWQLESQISGIC

SEQ ID NO: 330785 - DNA, 489 bp, Artificial Sequence
  derived and/or modified sequence
atggccgagcaggtgctgccccaggccctgtacctgagcaacatgagaaaggccgtgaagatcagagagagaacccccgaggacatcttcaagcccaccaacggcatcatccaccacttcaagaccatgcacagatacaccctggagatgttcagaacctgccagttctgcccccagttcagagagatcatccacaaggccctgatcgacagaaacatccaggccaccctggagagccagaagaagctgaactggtgcagagaggtgagaaagctggtggccctgaagaccaacggcgacggcaactgcctgatgcacgccaccagccagtacatgtggggcgtgcaggacaccgacctggtgctgagaaaggccctgttcagcaccctgaaggagaccgacaccagaaacttcaagttcagatggcagctggagagcctgaagagccaggagttcgtggagaccggcctgtgctacgacaccagatag

SEQ ID NO: 330786 - DNA, 297 bp, Artificial Sequence
  derived and/or modified sequence
atggccgagcaggtgctgccccaggccctgtacctgagcaacatgagaaaggccgtgaagatcagagagagaacccccgaggacatcttcaagcccaccaacggcatcatccaccacttcaagaccatgcacagatacaccctggagatgttcagaacctgccagttctgcccccagttcagagagatcatccacaaggccctgatcgacagaaacatccaggccaccctggagagccagaagaagctgaactggtgcagagaggtgagaaagctggtggccctgaagaccaactag

SEQ ID NO: 330787 - DNA, 813 bp, Artificial Sequence
  derived and/or modified sequence
atggccgagcaggtgctgccccaggccctgtacctgagcaacatgagaaaggccgtgaagatcagagagagaacccccgaggacatcttcaagcccaccaacggcatcatccaccacttcaagaccatgcacagatacaccctggagatgttcagaacctgccagttctgcccccagttcagagagatcatccacaaggccctgatcgacagaaacatccaggccaccctggagagccagaagaagctgaactggtgcagagaggtgagaaagctggtggccctgaagaccaacggcgacggcaactgcctgatgcacgccaccagccagtacatgtggggcgtgcaggacaccgacctggtgctgagaaaggccctgttcagcaccctgaaggagaccgacaccagaaacttcaagttcagatggcagctggagagcctgaagagccaggagttcgtggagaccggcctgtgctacgacaccagaaactggaacgacgagtgggacaacctgatcaagatggccagcaccgacacccccatggccagaagcggcctgcagtacaacagcctggaggagatccacatcttcgtgctgtgcaacatcctgagaagacccatcatcgtgatcagcgacaagatgctgagaagcctggagagcggcagcaacttcgcccccctgaaggtgggcggcatctacctgcccctgcactggcccgcccaggagtgctacagataccccatcgtgctgggctacgacagccaccacttcgtgcccctggtgaccctgaaggacagcggccccgacatctag

SEQ ID NO: 330788 - DNA, 459 bp, Artificial Sequence
  derived and/or modified sequence
atggccgagcaggtgctgccccaggccctgtacctgagcaacatgagaaaggccgtgaagatcagagagagaacccccgaggacatcttcaagcccaccaacggcatcatccaccacttcaagaccatgcacagatacaccctggagatgttcagaacctgccagttctgcccccagttcagagagatcatccacaaggccctgatcgacagaaacatccaggccaccctggagagccagaagaagctgaactggtgcagagaggtgagaaagctggtggccctgaagaccaacggcgacggcaactgcctgatgcacgccaccagccagtacatgtggggcgtgcaggacaccgacctggtgctgagaaaggccctgttcagcaccctgaaggagaccgacaccagaaacttcaagttcagatggcagctggagagccagatcagcggcatctgctag

SEQ ID NO: 330789 - DNA, 645 bp, Artificial Sequence
  derived and/or modified sequence
atggccgagcaggtgctgccccaggccctgtacctgagcaacatgagaaaggccgtgaagatcagagagagaacccccgaggacatcttcaagcccaccaacggcatcatccaccacttcaagaccatgcacagatacaccctggagatgttcagaacctgccagttctgcccccagttcagagagatcatccacaaggccctgatcgacagaaacatccaggccaccctggagagccagaagaagctgaactggtgcagagaggtgagaaagctggtggccctgaagaccaacggcgacggcaactgcctgatgcacgccaccagccagtacatgtggggcgtgcaggacaccgacctggtgctgagaaaggccctgttcagcaccctgaaggagaccgacaccagaaacttcaagttcagatggcagctggagagcctgaagagccaggagttcgtggagaccggcctgtgctacgacaccagaaactggaacgacgagtgggacaacctgatcaagtggctgccccagacccacccctggcccgaggtggacttcagcaccacccactggaagaagtacacctacctgagcttcgccaccagcagcgagggccagagcctgagcttccagaccaagtgctag

SEQ ID NO: 330790 - DNA, 2010 bp, Artificial Sequence
  derived and/or modified sequence
atggccgagcaggtgctgccccaggccctgtacctgagcaacatgagaaaggccgtgaagatcagagagagaacccccgaggacatcttcaagcccaccaacggcatcatccaccacttcaagaccatgcacagatacaccctggagatgttcagaacctgccagttctgcccccagttcagagagatcatccacaaggccctgatcgacagaaacatccaggccaccctggagagccagaagaagctgaactggtgcagagaggtgagaaagctggtggccctgaagaccaacggcgacggcaactgcctgatgcacgccaccagccagtacatgtggggcgtgcaggacaccgacctggtgctgagaaaggccctgttcagcaccctgaaggagaccgacaccagaaacttcaagttcagatggcagctggagagcctgaagagccaggagttcgtggagaccggcctgtgctacgacaccagaaactggaacgacgagtgggacaacctgatcaagatggccagcaccgacacccccatggccagaagcggcctgcagtacaacagcctggaggagatccacatcttcgtgctgtgcaacatcctgagaagacccatcatcgtgatcagcgacaagatgctgagaagcctggagagcggcagcaacttcgcccccctgaaggtgggcggcatctacctgcccctgcactggcccgcccaggagtgctacagataccccatcgtgctgggctacgacagccaccacttcgtgcccctggtgaccctgaaggacagcggccccgagatcagagccgtgcccctggtgaacagagacagaggcagattcgaggacctgaaggtgcacttcctgaccgaccccgagaacgagatgaaggagaagctgctgaaggagtacctgatggtgatcgagatccccgtgcagggctgggaccacggcaccacccacctgatcaacgccgccaagctggacgaggccaacctgcccaaggagatcaacctggtggacgactacttcgagctggtgcagcacgagtacaagaagtggcaggagaacagcgagcagggcagaagagagggccacgcccagaaccccatggagcccagcgtgccccagctgagcctgatggacgtgaagtgcgagacccccaactgccccttcttcatgagcgtgaacacccagcccctgtgccacgagtgcagcgagagaagacagaagaaccagaacaagctgcccaagctgaacagcaagcccggccccgagggcctgcccggcatggccctgggcgccagcagaggcgaggcctacgagcccctggcctggaaccccgaggagagcaccggcggcccccacagcgccccccccaccgcccccagccccttcctgttcagcgagaccaccgccatgaagtgcagaagccccggctgccccttcaccctgaacgtgcagcacaacggcttctgcgagagatgccacaacgccagacagctgcacgccagccacgcccccgaccacaccagacacctggaccccggcaagtgccaggcctgcctgcaggacgtgaccagaaccttcaacggcatctgcagcacctgcttcaagagaaccaccgccgaggccagcagcagcctgagcaccagcctgccccccagctgccaccagagaagcaagagcgaccccagcagactggtgagaagccccagcccccacagctgccacagagccggcaacgacgcccccgccggctgcctgagccaggccgccagaacccccggcgacagaaccggcaccagcaagtgcagaaaggccggctgcgtgtacttcggcacccccgagaacaagggcttctgcaccctgttccacagagtgcagagaaagcagaccttctgctgctgcctgagagagagccagagccacagcgtgcaggtgcccgagcaccacagcgtgcccggcgagggcatgagacacccctggaagcaccacgtgtag

SEQ ID NO: 330791 - DNA, 489 bp, Artificial Sequence
  derived and/or modified sequence
atggccgagcaggtgctgccacaggcactttacctcagtaatatgcgaaaggccgtcaaaattagagagcgcactccggaggatatttttaaacccacgaatggcattatacatcatttcaagacgatgcatcgatacacactggagatgtttcgtacgtgtcaattttgtccccagttccgggagattatccataaggcactgattgataggaacatccaggccacgcttgagagccaaaagaagctgaactggtgtcgcgaggtgcggaaactagtagctctgaagactaatggggacggcaactgtctgatgcatgctactagccaatatatgtggggcgtgcaggatactgacctggttctgaggaaggcactgtttagtaccctgaaagaaactgatactaggaactttaagttccgatggcagctggagagtttaaaatcacaggaattcgtggaaacaggactctgttacgatacccggtag

SEQ ID NO: 330792 - DNA, 297 bp, Artificial Sequence
  derived and/or modified sequence
atggctgagcaggtgctacctcaggcactgtacctctcaaacatgcgtaaggccgtcaaaattagggagcgcacacccgaagacatttttaaaccgactaatgggatcattcaccattttaagactatgcatcgctacacactggaaatgttccgcacctgtcagttctgcccacagtttagagagataattcataaggcactcattgatcggaatatccaggcaacactggaatctcagaaaaagctgaattggtgtcgggaggtcagaaaactggtggccctcaaaacgaactag

SEQ ID NO: 330793 - DNA, 813 bp, Artificial Sequence
  derived and/or modified sequence
atggccgaacaagtgctgcctcaggccctttatctgtctaacatgaggaaggctgtgaagatacgggagcggacgcccgaggatatttttaaacccaccaacggcattattcaccattttaaaactatgcatagatacaccctggaaatgttcagaacctgccaattctgtcctcaatttcgagaaattatccataaggccctcatcgatcgaaatatacaggcaacattagagtctcagaaaaaactaaattggtgcagggaagtgcggaaactggtggctctgaagactaatggcgatggtaactgcctcatgcatgctacctcccagtacatgtggggcgtgcaggatacagacttggttctgcggaaagccctgtttagcaccctgaaggagaccgacacacgtaactttaagtttaggtggcagctggagagtcttaagtctcaagagttcgtggagacaggcctatgttatgatactcgaaactggaacgatgagtgggataatttaataaagatggccagtacagatactccaatggcacgctcgggccttcagtacaactcgctggaggagattcacatctttgtactgtgtaacattctgcggcgacctattattgtgatctctgacaagatgctccgctctctcgaatccggcagtaattttgctcccctaaaagtgggtggaatttacctcccattacattggccagcacaggaatgctaccgttatcccatcgtactgggatatgactctcaccacttcgttcctttggtgactctcaaagattccgggccggatatctag

SEQ ID NO: 330794 - DNA, 459 bp, Artificial Sequence
  derived and/or modified sequence
atggccgagcaggtgcttccacaggccctgtacctgagcaatatgagaaaggcggtcaaaatcagagaaaggacgccagaggatatcttcaaacccacaaacggaatcatccaccactttaagaccatgcatcgctataccctcgaaatgtttcgcacatgtcagttctgtccccaatttagagaaattattcacaaagcactgattgatcgcaatatccaagctacacttgagagtcagaagaaactgaattggtgtagagaggtacgcaagctcgtagcccttaaaaccaacggcgacggcaattgtttgatgcacgcgacatcacaatatatgtggggagtacaggatacggatctggtgctgagaaaagctttattctctaccctaaaagagacagacacacggaactttaaattccggtggcaactcgagtcacagatctccggcatctgctag

SEQ ID NO: 330795 - DNA, 645 bp, Artificial Sequence
  derived and/or modified sequence
atggcagagcaggttttaccacaggccctgtacctatcaaacatgaggaaggcggtcaagatccgtgagaggacacccgaagatatttttaagcctactaatggcataatccaccatttcaagaccatgcataggtatacattggagatgtttagaacttgccaattttgtccccagttccgggagattatacacaaggcccttatcgaccgcaatatccaagctaccctagagtcccagaaaaagcttaactggtgtagagaagtacggaaattggtcgcccttaagactaacggtgatggcaactgtctgatgcacgccacctcacagtacatgtggggcgtgcaggacactgacttggttctcaggaaggccttattcagcacccttaaggaaacagatacccggaactttaaatttaggtggcagctggagtcactgaagagtcaggaattcgtagagacaggcctgtgttacgatacacgaaattggaacgatgaatgggacaacctgataaagtggcttccccagacgcatccctggccggaggtagactttagtactactcactggaagaaatacacatatctatcatttgcaaccagcagtgaaggtcagtcattgagttttcagaccaaatgctag

SEQ ID NO: 330796 - DNA, 2010 bp, Artificial Sequence
  derived and/or modified sequence
atggccgaacaggtactgccacaagctctgtatttatctaatatgaggaaagcggttaaaattagggaacggacccctgaagatatctttaagcctaccaacggaattatccatcactttaagacaatgcacagatataccttggaaatgtttagaacctgtcaattttgtccccagtttcgtgaaattattcacaaggctctgattgaccgtaatatacaagccacactggaatcacagaagaaacttaactggtgtagagaagtgcggaagctggtggcgctgaaaaccaacggcgacggtaattgcttaatgcacgctactagtcagtacatgtggggggtgcaggacacggacctggtgttacgcaaggccctcttctctacactgaaagaaaccgatacaaggaatttcaaattccgatggcagctcgaatcactgaaatctcaggagtttgtcgaaactgggttatgctacgatacacgcaactggaatgatgaatgggataatttaatcaagatggcatcgacagacaccccaatggctaggagcggattgcagtacaattctcttgaggagatccacatattcgttctttgcaacattctgaggcgccccataattgtaattagtgataagatgctacgatcgttggagagtggcagcaacttcgcacctctgaaggtcggaggcatctatcttccactccactggcccgcacaagagtgttacagatatccaatcgtgctcggctatgattcccatcatttcgttcccctggtcacactcaaagactccggccccgaaatcagagcagttcctttggttaaccgagacagaggccgcttcgaggatctcaaagttcattttctaactgacccagagaatgaaatgaaggagaaattgctgaaggaatatctaatggttatagaaattcctgttcagggatgggatcatggcaccacccacctcattaacgccgctaagttggacgaggccaacctgccaaaggaaattaacttagtggacgactatttcgaactggtgcagcatgagtacaagaagtggcaggaaaattcagagcaaggaagacgggagggtcacgctcagaatccaatggagccttcggtgccacaactgtctctgatggacgtgaagtgtgaaaccccaaactgccccttcttcatgtcagtcaacactcagccgctgtgtcatgagtgcagtgaaagaaggcagaagaaccagaacaagcttcccaagctgaattccaaacctggccccgaaggtctcccaggcatggcccttggtgcaagtcggggagaagcatatgaacctctagcttggaaccctgaagagagtacaggaggacctcatagtgctccccccaccgccccaagccctttcttattcagtgaaactactgcgatgaaatgcaggagccccggctgcccctttacacttaacgtacagcataacggcttctgcgagcggtgtcataacgctagacagctgcatgccagtcacgctcctgatcataccagacacttagacccgggaaagtgtcaggcttgtttacaggatgtaacacgtacttttaacggcatttgcagcacctgttttaagcgaacaactgccgaagcctctagctccttaagcacgtccctgcctccctcttgccaccagaggtccaagagtgacccttctcgactggtccggtctccgagcccgcactcttgccaccgggctggtaatgacgcccccgccggctgcctctcacaggctgccaggacaccgggggacagaacagggacttcaaagtgtcgcaaggcaggatgtgtatattttggaactccagaaaataagggtttttgtacactctttcacagggtccagcgaaagcagaccttctgttgctgcctacgtgaatcccagtcgcattcagtgcaagtgcctgagcaccattcagttcctggtgaaggaatgagacacccttggaagcatcatgtctag

SEQ ID NO: 330797 - DNA, 489 bp, Artificial Sequence
  derived and/or modified sequence
atggccgagcaggtgctgccccaggccctgtacctgagcaacatgaggaaggctgtgaagatccgggagaggaccccagaggacatcttcaagcccaccaacggcatcatccaccacttcaagaccatgcaccgctacaccctggagatgttccgcacctgccagttctgcccccagttccgggagatcatccacaaggccctgattgacaggaacatccaggccaccctggagagccagaagaagctgaactggtgccgggaggtgaggaagctggtggccctgaagaccaatggagatggcaactgcctgatgcacgccaccagccagtacatgtggggcgtgcaggacacagacctggtgctgaggaaggccctcttcagcaccctgaaggagacagacaccaggaacttcaagttccgctggcagctggagagcctgaagagccaggagtttgtggagaccggcctgtgctatgacaccaggtag

SEQ ID NO: 330798 - DNA, 297 bp, Artificial Sequence
  derived and/or modified sequence
atggccgagcaggtgctgccccaggccctgtacctgagcaacatgaggaaggctgtgaagatccgggagaggaccccagaggacatcttcaagcccaccaacggcatcatccaccacttcaagaccatgcaccgctacaccctggagatgttccgcacctgccagttctgcccccagttccgggagatcatccacaaggccctgattgacaggaacatccaggccaccctggagagccagaagaagctgaactggtgccgggaggtgaggaagctggtggccctgaagaccaactag

SEQ ID NO: 330799 - DNA, 813 bp, Artificial Sequence
  derived and/or modified sequence
atggccgagcaggtgctgccccaggccctgtacctgagcaacatgaggaaggctgtgaagatccgggagaggaccccagaggacatcttcaagcccaccaacggcatcatccaccacttcaagaccatgcaccgctacaccctggagatgttccgcacctgccagttctgcccccagttccgggagatcatccacaaggccctgattgacaggaacatccaggccaccctggagagccagaagaagctgaactggtgccgggaggtgaggaagctggtggccctgaagaccaatggagatggcaactgcctgatgcacgccaccagccagtacatgtggggcgtgcaggacacagacctggtgctgaggaaggccctcttcagcaccctgaaggagacagacaccaggaacttcaagttccgctggcagctggagagcctgaagagccaggagtttgtggagaccggcctgtgctatgacaccaggaactggaatgatgagtgggacaacctgatcaagatggccagcacagacacccccatggcccggagcggcctgcagtacaacagcctggaggagatccacatctttgtgctgtgcaacatcctgcggcggcccatcatcgtcatcagtgacaagatgctgcggagcctggagagcggcagcaactttgcccccctgaaggtgggcggcatctacctgcccctgcactggccagcccaggagtgctaccgctaccccatcgtgctgggctatgacagccaccactttgtgcccctggtgaccctgaaggacagcggccctgacatctag

SEQ ID NO: 330800 - DNA, 459 bp, Artificial Sequence
  derived and/or modified sequence
atggccgagcaggtgctgccccaggccctgtacctgagcaacatgaggaaggctgtgaagatccgggagaggaccccagaggacatcttcaagcccaccaacggcatcatccaccacttcaagaccatgcaccgctacaccctggagatgttccgcacctgccagttctgcccccagttccgggagatcatccacaaggccctgattgacaggaacatccaggccaccctggagagccagaagaagctgaactggtgccgggaggtgaggaagctggtggccctgaagaccaatggagatggcaactgcctgatgcacgccaccagccagtacatgtggggcgtgcaggacacagacctggtgctgaggaaggccctcttcagcaccctgaaggagacagacaccaggaacttcaagttccgctggcagctggagagccagatcagcggcatctgctag

SEQ ID NO: 330801 - DNA, 645 bp, Artificial Sequence
  derived and/or modified sequence
atggccgagcaggtgctgccccaggccctgtacctgagcaacatgaggaaggctgtgaagatccgggagaggaccccagaggacatcttcaagcccaccaacggcatcatccaccacttcaagaccatgcaccgctacaccctggagatgttccgcacctgccagttctgcccccagttccgggagatcatccacaaggccctgattgacaggaacatccaggccaccctggagagccagaagaagctgaactggtgccgggaggtgaggaagctggtggccctgaagaccaatggagatggcaactgcctgatgcacgccaccagccagtacatgtggggcgtgcaggacacagacctggtgctgaggaaggccctcttcagcaccctgaaggagacagacaccaggaacttcaagttccgctggcagctggagagcctgaagagccaggagtttgtggagaccggcctgtgctatgacaccaggaactggaatgatgagtgggacaacctgatcaagtggctgccccagacccacccctggccagaggtggacttcagcaccacccactggaagaagtacacctacctgagctttgccaccagcagcgagggccagagcctgtccttccagaccaagtgctag

SEQ ID NO: 330802 - DNA, 2010 bp, Artificial Sequence
  derived and/or modified sequence
atggccgagcaggtgctgccccaggccctgtacctgagcaacatgaggaaggctgtgaagatccgggagaggaccccagaggacatcttcaagcccaccaacggcatcatccaccacttcaagaccatgcaccgctacaccctggagatgttccgcacctgccagttctgcccccagttccgggagatcatccacaaggccctgattgacaggaacatccaggccaccctggagagccagaagaagctgaactggtgccgggaggtgaggaagctggtggccctgaagaccaatggagatggcaactgcctgatgcacgccaccagccagtacatgtggggcgtgcaggacacagacctggtgctgaggaaggccctcttcagcaccctgaaggagacagacaccaggaacttcaagttccgctggcagctggagagcctgaagagccaggagtttgtggagaccggcctgtgctatgacaccaggaactggaatgatgagtgggacaacctgatcaagatggccagcacagacacccccatggcccggagcggcctgcagtacaacagcctggaggagatccacatctttgtgctgtgcaacatcctgcggcggcccatcatcgtcatcagtgacaagatgctgcggagcctggagagcggcagcaactttgcccccctgaaggtgggcggcatctacctgcccctgcactggccagcccaggagtgctaccgctaccccatcgtgctgggctatgacagccaccactttgtgcccctggtgaccctgaaggacagcggccctgagatccgggctgtgcccctggtgaacagagaccggggccgctttgaggacctgaaggtgcacttcctgacagatcctgaaaatgagatgaaggagaagctgctgaaggagtacctgatggtgattgagatccctgtgcagggctgggaccacggcaccacccacctgatcaatgctgccaagctggatgaggccaacctgcccaaggagatcaacctggtggatgactactttgagctggtgcagcacgagtacaagaagtggcaggagaacagcgagcagggccggcgggagggccacgcccagaaccccatggagcccagcgtgccccagctgagcctgatggatgtgaagtgtgagacccccaactgccccttcttcatgtctgtgaacacccagcccctgtgccacgagtgcagcgagcggcggcagaagaaccagaacaagctgcccaagctgaacagcaagccaggccctgagggcctgcccggcatggccctgggcgccagcagaggagaggcctatgagcccctggcctggaaccctgaggagagcactggaggcccccacagcgccccacccacagcccccagccccttcctgttcagcgagaccacagccatgaagtgccgcagccctggctgccccttcaccctgaatgtgcagcacaacggcttctgtgagcgctgccacaatgcccggcagctgcacgccagccacgccccagaccacaccaggcacctggaccccgggaagtgccaggcctgcctgcaggatgtgaccaggaccttcaacggcatctgcagcacctgcttcaagaggaccacagctgaggccagcagcagcctgagcaccagcctgccccccagctgccaccagaggagcaagagtgaccccagccggctggtgcgcagccccagcccccacagctgccacagagctggaaatgatgccccagctggctgcctgagccaggccgcccggacccctggggacagaacaggcaccagcaagtgcaggaaggccggctgtgtgtacttcggcaccccagaaaataaaggcttctgcaccctcttccaccgggtgcagaggaagcagaccttctgctgctgcctgcgggagagccagagccacagcgtgcaggtgcctgagcaccacagcgtgcctggagagggcatgaggcacccctggaagcaccacgtgtag

SEQ ID NO: 330803 - DNA, 489 bp, Artificial Sequence
  derived and/or modified sequence
atggccgagcaggtgctgccccaggccctgtacctgagcaacatgcggaaggctgtgaaaattagggagagaacacctgaagatattttcaagccaacgaatggaattatccaccatttcaaaaccatgcacagatacactcttgagatgttccgtacctgtcaattttgtcctcagttccgcgaaatcattcacaaagctttgattgatagaaatatacaggctacactagagtcccagaagaagctaaattggtgccgggaggtccgcaaactggtagcactgaagactaacggggacgggaattgtctaatgcacgctacttcgcagtacatgtggggcgtccaggatacggacttagtgcttaggaaagccctcttcagtacactaaaggaaactgacacccggaactttaaatttcgatggcagctggaaagtctcaagtctcaggagttcgttgaaaccgggctctgctatgatacgaggtag

SEQ ID NO: 330804 - DNA, 297 bp, Artificial Sequence
  derived and/or modified sequence
atggccgagcaggtgctgccccaggccctgtacctgagcaacatgcgcaaggcggtgaagatcagagaacgcacacccgaggacattttcaagcctaccaacggtataatacatcattttaagacaatgcacagatacaccctcgagatgtttcgaacctgtcagttctgtccccaatttagggagatcatccacaaggctctgattgataggaatatacaggctacccttgagagccagaagaagctgaactggtgcagggaagtcaggaaactcgtggcactgaaaacaaattag

SEQ ID NO: 330805 - DNA, 813 bp, Artificial Sequence
  derived and/or modified sequence
atggccgagcaggtgctgccccaggccctgtacctgagcaacatgcggaaagcggtgaaaattagggagcggactcctgaggatatatttaagccgacaaatgggatcattcaccattttaaaaccatgcatcggtatacgctggaaatgttcagaacatgccaattttgtcctcaattccgcgagataattcacaaagctctgattgatcgaaatatccaggctacactggaatctcagaaaaagttgaattggtgcagagaggtgcgaaagttggtcgcccttaagacaaatggagatgggaactgtctcatgcacgccacctcacagtacatgtggggggtgcaggatacagatctcgtgctccgaaaagcccttttctcgaccctgaaggagactgatacaagaaatttcaaatttagatggcagctagagtccctgaaatcccaggagttcgtagagaccggactttgttacgatacccgcaactggaatgatgagtgggataacctgatcaagatggccagcactgatacacccatggcgaggtcagggctgcagtacaacagtctggaggaaattcatatattcgtgctttgcaacatcctccggcggccaattatagtaatcagtgataagatgttgcgctccctggagtctgggtcaaactttgccccactgaaggttggcggaatttatttacccttgcactggcctgcccaggaatgttatcgctatcccattgttctgggctacgactctcaccatttcgttccactggtcactttgaaggatagcggtcccgacatctag

SEQ ID NO: 330806 - DNA, 459 bp, Artificial Sequence
  derived and/or modified sequence
atggccgagcaggtgctgccccaggccctgtacctgagcaacatgcgtaaggctgttaaaatccgggaaagaactcccgaggatatctttaaaccaaccaacggcatcatccaccactttaagaccatgcatcggtatacgctagagatgttcagaacctgccagttctgcccccagttccgggagattattcacaaagcactgatagaccgaaatattcaggcaactcttgagtcccaaaaaaagctgaattggtgtcgagaagtgagaaaactggtcgcactgaaaacgaacggtgacggcaactgtctgatgcatgcgacttcacaatacatgtggggtgtacaggataccgacttagtcctgcgaaaggctctgtttagcactctgaaagaaaccgacacacgcaatttcaagtttcgctggcagttggaaagtcaaatctcgggtatttgctag

SEQ ID NO: 330807 - DNA, 645 bp, Artificial Sequence
  derived and/or modified sequence
atggccgagcaggtgctgccccaggccctgtacctgagcaacatgaggaaagctgtgaagataagggagcgaactccggaagacatcttcaaacccaccaatgggattatccaccactttaagactatgcacagatataccctggagatgttccggacctgccaattttgcccacaattcagagagattatccataaagccctcatcgaccgaaatattcaggccacacttgaatcccaaaaaaagctgaactggtgccgtgaagtgaggaaactcgttgcacttaagacgaatggagatggcaactgcctcatgcatgccacctcccagtacatgtggggcgtccaggatactgatctggtgcttcgaaaggccttgttctccacactcaaagagaccgacactcgtaacttcaaatttcgttggcaacttgaaagcctcaagagccaggagttcgtggagaccggcctctgttacgacacaagaaactggaacgacgaatgggacaatcttatcaaatggctgcctcagacacatccatggccggaagtggatttcagtaccacccattggaaaaaatatacatatctatcgtttgctacatcctcagaagggcagagcctgtcgtttcagacaaagtgctag

SEQ ID NO: 330808 - DNA, 2010 bp, Artificial Sequence
  derived and/or modified sequence
atggccgagcaggtgctgccccaggccctgtacctgagcaacatgcgtaaggctgtcaagatacgcgagaggacgcctgaggacatcttcaagcctactaacggcatcatccatcatttcaagaccatgcatcgatatacactggagatgttccggacctgccagttctgcccccagtttagggagatcattcacaaagccctgatcgaccggaacattcaagcaacactggaatctcagaaaaagctgaactggtgtcgggaggtcaggaaactagtggcactgaaaacaaatggggacggtaactgcctcatgcatgctacgtcacagtatatgtggggggtccaagacactgacttggttctccgtaaagccttgttctctaccttgaaggagactgacacccgcaatttcaaattccgatggcagttggaatccctgaagtcacaggaatttgtggagacaggtctgtgctacgatactcggaactggaatgacgagtgggacaatttgatcaagatggcgtccaccgatacgcccatggcgagatcaggactacagtacaacagtctggaggagattcacatctttgtcctgtgcaacattctgcggagaccaatcatcgttatcagcgacaagatgttacgcagcctggagagtgggagcaatttcgcacctctgaaggtcggcggcatttaccttcccctccactggcctgctcaggaatgctaccgatacccgattgtgctggggtacgactcccatcattttgtacctctggttaccctcaaagactctgggcctgaaatccgagcagtgccgctcgtcaatagggatcggggacggttcgaggatctaaaagtccactttctcaccgaccccgagaacgaaatgaaagaaaagctgctgaaagagtacctaatggtaattgagatccctgtgcaggggtgggatcacggaaccacccacctaattaacgccgcaaaactggatgaggccaatctgcctaaagaaattaaccttgttgatgattacttcgaactcgtccaacacgagtacaaaaagtggcaagagaacagcgagcaaggaagaagggagggacatgcacagaatccaatggagccatctgttccgcagctgtcgcttatggacgtaaagtgtgagacaccgaattgcccctttttcatgagtgttaacacacagcctctgtgccacgagtgctcggaacgcagacagaagaatcagaataaacttcctaaattgaactcaaaaccaggcccagaggggctgcccgggatggcactgggggcatccaggggagaagcttacgaacccctggcgtggaacccagaagagtctacaggaggcccccactctgccccccctaccgcgccatcgccctttctgttctctgagacaactgccatgaagtgtcgaagcccaggatgtccatttacactgaacgtccagcataatggcttttgcgagcggtgccacaacgcaaggcaattgcacgcatctcacgctcccgatcatacaaggcatctcgaccccggaaagtgccaggcatgccttcaggacgtcaccaggacattcaacggcatctgttcgacttgttttaaaaggacaacggcagaggcctcttcctcacttagtacttccttaccaccctcttgtcaccagaggagcaaaagcgaccccagcagactggttcgatccccgagcccccactcgtgccacagggccggcaatgacgctccggccgggtgtctgtcgcaagccgcacggaccccgggagatcggactgggactagcaaatgcaggaaagcaggatgcgtctattttggcaccccggagaataagggcttttgtaccttgttccatcgcgtgcagcggaaacaaacattctgctgctgcttgagagaatcccagtcacatagtgtgcaggtgccggagcatcatagcgtacccggggaaggaatgagacatccgtggaagcaccacgtatag

SEQ ID NO: 330809 - DNA, 489 bp, Artificial Sequence
  derived and/or modified sequence
atggctgaacaggtattgccgcaagcgctctacctgtccaatatgcggaaagcagtgaaaatacgggaaaggactccagaagatatcttcaaaccaacgaacggaatcatccaccacttcaaaaccatgcatagatatactctcgaaatgttcagaacgtgccaattttgtccccagttccgcgagattatacacaaggccctgatcgaccggaacatccaagccaccctggaatctcagaaaaagctgaattggtgtcgggaggtgcgcaaattagtcgccctcaagactaatggggatggtaattgcctgatgcacgccacctcacaatatatgtggggggtccaggacaccgatctggtgttgagaaaagctctattctccaccctgaaggagactgacacacggaattttaagttccgttggcagctagagagcctcaagtcacaggagttcgtcgaaaccggcctctgttacgataccaggtag

SEQ ID NO: 330810 - DNA, 297 bp, Artificial Sequence
  derived and/or modified sequence
atggccgagcaggtcttgccgcaggctctttacctgagcaatatgaggaaggccgtcaagatccgtgaaaggacacctgaggatatattcaaacctaccaacggaattatccatcacttcaagacaatgcaccgatatactcttgagatgttccgaacctgtcagttctgcccccagttcagggaaattatccataaagccctcattgatcggaatattcaagccaccttagagtcccagaaaaaactcaattggtgtagagaggtgcgcaaactggtcgcccttaaaaccaattag

SEQ ID NO: 330811 - DNA, 813 bp, Artificial Sequence
  derived and/or modified sequence
atggcggaacaggtgctgccgcaggccctgtacctttccaatatgaggaaggccgtgaagattcgggagaggacgcctgaagacatcttcaagcccaccaacggaatcatccatcactttaaaacgatgcacagatacacccttgagatgttccggacttgtcagttctgcccacagttccgtgagatcatccacaaagcgctaatcgacaggaacatccaagctactctagagtcccagaagaaacttaactggtgtcgtgaggtgcgcaaattagtggccttaaagacaaacggggatgggaactgtttgatgcacgccacctcacagtacatgtggggggtccaggacaccgatctcgttcttaggaaggctctgttttccaccctgaaagagaccgatactcgcaacttcaaatttcggtggcagctggagtcactgaagtcccaggagtttgtggaaaccggactctgctacgatacacggaactggaatgacgagtgggataatctgattaaaatggcatcgactgacacacccatggcacgatctggtcttcagtacaatagcctggaagaaatccacatttttgtgctctgtaacattctcagaagacccattatcgtcatttccgacaaaatgctgcgatccttagagagtggaagcaatttcgcccctctcaaggtcggtggcatctacctgcccctgcactggcccgcacaagagtgttatcggtatccgatagtgcttggatatgacagtcaccattttgtcccgttagtcacgctgaaagactcaggacctgatatctag

SEQ ID NO: 330812 - DNA, 459 bp, Artificial Sequence
  derived and/or modified sequence
atggcagaacaggtacttccacaggcactgtatctgagcaatatgcgcaaagcagtgaagatcagggagcgtacccctgaagacatcttcaagccaaccaacggcattatccaccacttcaagacaatgcatcgctacacactcgagatgtttcggacatgccagttctgcccccagtttagagaaattatccacaaagctctgatagacaggaacattcaggcaaccttggaaagtcagaagaaactgaattggtgtagggaggtcaggaaattggtcgccttgaaaactaacggtgacggaaactgcctgatgcatgccacttcccaatacatgtggggagttcaggatactgacctggtgttgagaaaagccctgttctctaccctgaaagagaccgatacacgaaattttaaatttcgctggcagcttgaaagtcagatttctggtatctgctag

SEQ ID NO: 330813 - DNA, 645 bp, Artificial Sequence
  derived and/or modified sequence
atggcagagcaggtgctgccacaggctctctacctgtccaatatgagaaaagctgtgaaaatcagggaacgcacccctgaggatatctttaaacctaccaatgggatcatacaccacttcaaaactatgcatcgctacaccctggagatgttcagaacgtgtcaattctgtccacaatttcgggaaattatccacaaggccctgatagatagaaatattcaggcaactctcgagtctcagaagaagttgaactggtgccgtgaagttcgaaaacttgtcgctttgaagaccaacggtgatggcaattgtttgatgcacgccacatctcagtatatgtggggggtgcaggacaccgaccttgtgttgcggaaggcgttgttctcgaccttgaaggaaacggatacccgcaactttaagttccggtggcaactggagtctctcaaaagccaggaattcgttgaaaccggtctgtgctatgacactaggaactggaatgatgaatgggacaaccttatcaagtggttgccccagacccatccctggcccgaagtcgattttagtacaactcactggaagaagtacacctacctgtctttcgcgaccagctcagaaggtcagtccctatcttttcaaactaagtgttag

SEQ ID NO: 330814 - DNA, 2010 bp, Artificial Sequence
  derived and/or modified sequence
atggcagaacaggtgctacctcaggccttgtacctttccaatatgcggaaagccgtgaaaatcagagagagaaccccggaagatatttttaagcctaccaacgggattattcaccactttaagaccatgcacaggtacaccctggaaatgttccggacgtgccagttctgcccccagttccgcgagatcattcataaggccctgattgacaggaatatccaggcaacactggaaagccagaaaaagctgaactggtgcagagaggtgcggaagttagtcgccctcaaaactaacggtgacggcaattgcctgatgcatgctaccagccagtacatgtggggtgtccaggacaccgatcttgtactgcgtaaggccctcttttccactcttaaagaaacagatactcggaactttaaattcagatggcagctagagtctctgaagtcccaggaattcgtggagaccggtctgtgctatgacactagaaactggaacgatgagtgggacaacctgattaaaatggccagtaccgacacacccatggctcgcagtggactgcaatataacagtctcgaagagatccacattttcgtgttgtgcaatattctgaggagacctatcatcgtgatctcagacaagatgctccgatctcttgaaagcggctccaactttgcccctctgaaagtggggggtatatacttaccccttcactggccagcacaagaatgctatcgataccccatcgttttgggctacgactcacaccactttgtgcccttggtgactctgaaggacagtggccctgagattcgggcagtccctctggtgaaccgggaccgcggtcggtttgaggatcttaaagtgcattttctgactgatcccgaaaacgagatgaaggagaagctgctgaaggagtatctgatggtcatcgaaatcccagtacagggctgggaccacggaacgacgcatctcatcaacgccgctaagcttgacgaggcgaacctgcccaaggagatcaacctggtagacgactatttcgaattggtgcagcatgagtataagaaatggcaggagaattctgagcagggcaggagagagggccatgcacagaatcccatggaaccatcagtgcctcagctgtctcttatggacgtgaagtgtgaaactcctaactgtccctttttcatgagtgtgaacacacaaccgttatgccatgagtgtagtgaacggcgtcagaaaaaccagaacaagctgccaaagctcaacagtaagccgggacctgaaggattaccaggaatggcgctgggcgcttcccgcggtgaagcttatgagccacttgcttggaaccccgaggaatccactggaggtccccacagcgcaccacctaccgccccttccccctttctcttcagcgagaccaccgccatgaagtgtcggtctcccggttgcccttttacattaaacgtccagcacaacggcttctgcgagcgctgccacaatgccagacaactgcacgcatctcacgcgcctgaccacactaggcatcttgaccccggaaagtgccaggcgtgtctgcaggacgttactaggacctttaacggtatatgttcgacctgcttcaaacgcaccacagctgaggcttcttcgagcttgtcgacatcgctgcctcccagctgccaccagcggagtaaaagtgaccccagccggcttgtgaggtctcctagcccacactcgtgccaccgagccggtaatgacgcgccagcaggctgtctgtctcaggctgctcggaccccaggagatagaacaggcacaagcaagtgcaggaaagccggatgcgtgtactttgggacaccagaaaataaagggttttgcaccctgtttcacagggtgcaacgaaaacagacattttgctgttgtctgagggagtcccagtcccactccgtgcaggtgcccgagcatcacagcgtgcccggtgagggtatgagacatccatggaagcatcacgtctag

SEQ ID NO: 330815 - DNA, 698 bp, Artificial Sequence
  derived and/or modified sequence
gcggccgccaagagagatcacacccccagccgaccctgccagcgagcgagcccgaccccaggcgtccatggagcgtcgcctccgcccggtccctgccccgacccccgcctgcggcgcgctcctgccttgaccaggacttgggactttgcgaaaggatcgcggggcccggagaggtaaccgccgcgcctcccggagaggtgttggagagcacaatggctgaacaagtccttcctcaggctttgtatttgagcaatatgcggaaagctgtgaagatacgggagagaactccagaagacatttttaaacctactaatgggatcattcatcattttaaaaccatgcaccgatacacactggaaatgttcagaacttgccagttttgtcctcagtttcgggagatcatccacaaagccctcatcgacagaaacatccaggccaccctggaaagccagaagaaactcaactggtgtcgagaagtccggaagcttgtggcgctgaaaacgaacggtgacggcaattgcctcatgcatgccacttctcagtacatgtggggcgttcaggacacagacttggtactgaggaaggcgctgttcagcacgctcaaggaaacagacacacgcaactttaaattccgctggcaactggagtctctcaaatctcaggaatttgttgaaacggggctttgctatgatactcgg

SEQ ID NO: 330816 - DNA, 421 bp, Artificial Sequence
  derived and/or modified sequence
gggcctacaacccgcatacaactgaaacggggcaaagcagactgcgcagtctgcagtcttcgtggcgggccaagcgagcttggagcccgcgggggcggagcggtgagagcggccgccaagagagatcacacccccagccgaccctgccagcgagcgagcccgaccccaggcgtccatggagcgtcgcctccgcccggtccctgccccgacccccgcctgcggcgcgctcctgccttgaccaggacttgggactttgcgaaaggatcgcggggcccggagaggtaaccgccgcgcctcccggagaggtaaccgccgcgcctcccggagaggtgttggagagcacaatggctgaacaagtccttcctcaggctttgtatttgagcaatatgcggaaagctgtgaagatacgggagagaactcc

SEQ ID NO: 330817 - DNA, 465 bp, Artificial Sequence
  derived and/or modified sequence
accgcagtcaagggctgcgggtgcatgttgggcagcgacccccgggctggcaccgtctacctggcgttggttttgcagcgctcctggactgggagtttgttggacgtttctgtctgggttttgaagtgctgggagttgaggtcactgctgcagaggtgttggagagcacaatggctgaacaagtccttcctcaggctttgtatttgagcaatatgcggaaagctgtgaagatacgggagagaactccagaagacatttttaaacctactaatgggatcattcatcattttaaaaccatgcaccgatacacactggaaatgttcagaacttgccagttttgtcctcagtttcgggagatcatccacaaagccctcatcgacagaaacatccaggccaccctggaaagccagaagaaactcaactggtgtcgagaagtccggaagcttgtggcgctgaaaacgaacg

SEQ ID NO: 330818 - DNA, 827 bp, Artificial Sequence
  derived and/or modified sequence
aggtgttggagagcacaatggctgaacaagtccttcctcaggctttgtatttgagcaatatgcggaaagctgtgaagatacgggagagaactccagaagacatttttaaacctactaatgggatcattcatcattttaaaaccatgcaccgatacacactggaaatgttcagaacttgccagttttgtcctcagtttcgggagatcatccacaaagccctcatcgacagaaacatccaggccaccctggaaagccagaagaaactcaactggtgtcgagaagtccggaagcttgtggcgctgaaaacgaacggtgacggcaattgcctcatgcatgccacttctcagtacatgtggggcgttcaggacacagacttggtactgaggaaggcgctgttcagcacgctcaaggaaacagacacacgcaactttaaattccgctggcaactggagtctctcaaatctcaggaatttgttgaaacggggctttgctatgatactcggaactggaatgatgaatgggacaatcttatcaaaatggcttccacagacacacccatggcccgaagtggacttcagtacaactcactggaagaaatacacatatttgtcctttgcaacatcctcagaaggccaatcattgtcatttcagacaaaatgctaagaagtttggaatcaggttccaatttcgcccctttgaaagtgggtggaatttacttgcctctccactggcctgcccaggaatgctacagataccccattgttctcggctatgacagccatcattttgtacccttggtgaccctgaaggacagtgggcctgatata

SEQ ID NO: 330819 - DNA, 459 bp, Artificial Sequence
  derived and/or modified sequence
atggctgaacaagtccttcctcaggctttgtatttgagcaatatgcggaaagctgtgaagatacgggagagaactccagaagacatttttaaacctactaatgggatcattcatcattttaaaaccatgcaccgatacacactggaaatgttcagaacttgccagttttgtcctcagtttcgggagatcatccacaaagccctcatcgacagaaacatccaggccaccctggaaagccagaagaaactcaactggtgtcgagaagtccggaagcttgtggcgctgaaaacgaacggtgacggcaattgcctcatgcatgccacttctcagtacatgtggggcgttcaggacacagacttggtactgaggaaggcgctgttcagcacgctcaaggaaacagacacacgcaactttaaattccgctggcaactggagtctcaaatctcaggaatttgttga

SEQ ID NO: 330820 - DNA, 2010 bp, Artificial Sequence
  derived and/or modified sequence
atggctgaacaagtccttcctcaggctttgtatttgagcaatatgcggaaagctgtgaagatacgggagagaactccagaagacatttttaaacctactaatgggatcattcatcattttaaaaccatgcaccgatacacactggaaatgttcagaacttgccagttttgtcctcagtttcgggagatcatccacaaagccctcatcgacagaaacatccaggccaccctggaaagccagaagaaactcaactggtgtcgagaagtccggaagcttgtggcgctgaaaacgaacggtgacggcaattgcctcatgcatgccacttctcagtacatgtggggcgttcaggacacagacttggtactgaggaaggcgctgttcagcacgctcaaggaaacagacacacgcaactttaaattccgctggcaactggagtctctcaaatctcaggaatttgttgaaacggggctttgctatgatactcggaactggaatgatgaatgggacaatcttatcaaaatggcttccacagacacacccatggcccgaagtggacttcagtacaactcactggaagaaatacacatatttgtcctttgcaacatcctcagaaggccaatcattgtcatttcagacaaaatgctaagaagtttggaatcaggttccaatttcgcccctttgaaagtgggtggaatttacttgcctctccactggcctgcccaggaatgctacagataccccattgttctcggctatgacagccatcattttgtacccttggtgaccctgaaggacagtgggcctgaaatccgagctgttccacttgttaacagagaccggggaagatttgaagacttaaaagttcactttttgacagatcctgaaaatgagatgaaggagaagctcttaaaagagtacttaatggtgatagaaatccccgtccaaggctgggaccatggcacaactcatctcatcaatgccgcaaagttggatgaagctaacttaccaaaagaaatcaatctggtagatgattactttgaacttgttcagcatgagtacaagaaatggcaggaaaacagcgagcaggggaggagagaggggcacgcccagaatcccatggaaccttccgtgccccagctttctctcatggatgtaaaatgtgaaacgcccaactgccccttcttcatgtctgtgaacacccagcctttatgccatgagtgctcagagaggcggcaaaagaatcaaaacaaactcccaaagctgaactccaagccgggccctgaggggctccctggcatggcgctcggggcctctcggggagaagcctatgagcccttggcgtggaaccctgaggagtccactggggggcctcattcggccccaccgacagcacccagcccttttctgttcagtgagaccactgccatgaagtgcaggagccccggctgccccttcacactgaatgtgcagcacaacggattttgtgaacgttgccacaacgcccggcaacttcacgccagccacgccccagaccacacaaggcacttggatcccgggaagtgccaagcctgcctccaggatgttaccaggacatttaatgggatctgcagtacttgcttcaaaaggactacagcagaggcctcctccagcctcagcaccagcctccctccttcctgtcaccagcgttccaagtcagatccctcgcggctcgtccggagcccctccccgcattcttgccacagagctggaaacgacgcccctgctggctgcctgtctcaagctgcacggactcctggggacaggacggggacgagcaagtgcagaaaagccggctgcgtgtattttgggactccagaaaacaagggcttttgcacactgtttcatcgagtacagagaaaacaaacattttgctgctgcctcagggaaagtcagtcccacagcgtccaggttccagaacaccattccgtgcctggggagggaatgcggcacccttggaagcaccatgtttga

SEQ ID NO: 330821 - protein, 420 aa, Artificial Sequence
  derived and/or modified sequence
MPGGCSRGPAAGDGRLRLARLALVLLGWVSSSSPTSSASSFSSSAPFLASAVSAQPPLPDQCPALCECSEAARTVKCVNRNLTEVPTDLPAYVRNLFLTGNQLAVLPAGAFARRPPLAELAALNLSGSRLDEVRAGAFEHLPSLRQLDLSHNPLADLSPFAFSGSNASVSAPSPLVELILNHIVPPEDERQNRSFEGMVVAALLAGRALQGLRRLELASNHFLYLPRDVLAQLPSLRHLDLSNNSLVSLTYVSFRNLTHLESLHLEDNALKVLHNGTLAELQGLPHIRVFLDNNPWVCDCHMADMVTWLKETEVVQGKDRLTCAYPEKMRNRVLLELNSADLDCDPILPPSLQTSYVFLGIVLALIGAIFLLVLYLNRKGIKKWMHNIRDACRDHMEGYHYRYEINADPRLTNLSSNSDV

SEQ ID NO: 330822 - DNA, 1263 bp, Artificial Sequence
  derived and/or modified sequence
atgcccggcggctgcagcagaggccccgccgccggcgacggcagactgagactggccagactggccctggtgctgctgggctgggtgagcagcagcagccccaccagcagcgccagcagcttcagcagcagcgcccccttcctggccagcgccgtgagcgcccagccccccctgcccgaccagtgccccgccctgtgcgagtgcagcgaggccgccagaaccgtgaagtgcgtgaacagaaacctgaccgaggtgcccaccgacctgcccgcctacgtgagaaacctgttcctgaccggcaaccagctggccgtgctgcccgccggcgccttcgccagaagaccccccctggccgagctggccgccctgaacctgagcggcagcagactggacgaggtgagagccggcgccttcgagcacctgcccagcctgagacagctggacctgagccacaaccccctggccgacctgagccccttcgccttcagcggcagcaacgccagcgtgagcgcccccagccccctggtggagctgatcctgaaccacatcgtgccccccgaggacgagagacagaacagaagcttcgagggcatggtggtggccgccctgctggccggcagagccctgcagggcctgagaagactggagctggccagcaaccacttcctgtacctgcccagagacgtgctggcccagctgcccagcctgagacacctggacctgagcaacaacagcctggtgagcctgacctacgtgagcttcagaaacctgacccacctggagagcctgcacctggaggacaacgccctgaaggtgctgcacaacggcaccctggccgagctgcagggcctgccccacatcagagtgttcctggacaacaacccctgggtgtgcgactgccacatggccgacatggtgacctggctgaaggagaccgaggtggtgcagggcaaggacagactgacctgcgcctaccccgagaagatgagaaacagagtgctgctggagctgaacagcgccgacctggactgcgaccccatcctgccccccagcctgcagaccagctacgtgttcctgggcatcgtgctggccctgatcggcgccatcttcctgctggtgctgtacctgaacagaaagggcatcaagaagtggatgcacaacatcagagacgcctgcagagaccacatggagggctaccactacagatacgagatcaacgccgaccccagactgaccaacctgagcagcaacagcgacgtgtag

SEQ ID NO: 330823 - DNA, 1263 bp, Artificial Sequence
  derived and/or modified sequence
atgcctggaggttgtagccggggacccgcggctggggacggccgcctccgcctggccagattagccctggtgctcctcggatgggtgagctcttcatctcctacctccagcgcctcttcgttctctagtagtgcacccttcctggcctcagccgtgtccgctcagcctcccctaccagaccaatgtccggccctctgcgaatgttcggaagccgcgagaactgtaaagtgtgtgaataggaacctcacagaagtgcccacagacctgcctgcatacgtgcgcaacctctttctgacgggcaatcaattggcggtgttgccagccggtgctttcgcccggcgcccgccattagctgagctggccgctttaaacctgtcagggtcaagactggatgaggtgagagccggggccttcgaacacctacccagtcttcggcagctcgaccttagtcacaacccacttgccgacctcagtccctttgccttctccgggagcaacgcaagtgtttctgcacccagcccactcgtagagttgatactgaaccatatcgttccgcctgaagatgagagacagaaccgcagttttgaaggaatggtcgtcgcagctctgcttgctggtagagccctacagggcttgcgcaggttagaactggcatcaaaccattttctgtacctgccccgggacgtgctagctcagctcccctcccttagacatctcgacctgagcaataacagcttagtgtcactgacctacgtctcctttaggaaccttacacacctggaaagcctccacctggaggataatgccctgaaagtactccataatggcacactagcagagctgcagggcttgcctcacatacgtgtgtttcttgacaacaacccttgggtgtgcgattgtcacatggctgatatggtgacatggctgaaagaaactgaggtggtgcagggaaaggatcggctcacttgcgcttaccctgagaaaatgagaaatcgggtcctgcttgagcttaactctgccgacctggactgtgaccccattttacccccttccctgcaaacctcgtatgtgtttctcggcatcgtgctcgctctgattggagccatatttctgcttgttctgtacttaaacaggaaagggataaagaagtggatgcacaatattagggatgcctgccgcgaccacatggagggctaccattacagatatgaaattaacgctgaccccaggctgaccaacctttcctctaattctgacgtatag

SEQ ID NO: 330824 - DNA, 1263 bp, Artificial Sequence
  derived and/or modified sequence
atgcctggaggctgttctcgggggcccgcagccggagacggaaggctgcggttggctcggctagccctggtcctgttgggatgggtctcgtctagctctccgacctccagtgccagctctttctcaagcagcgccccctttctggccagcgctgttagtgctcagcccccactgcccgatcagtgtccggcactgtgcgagtgtagcgaagcagcccgaactgttaagtgcgtaaatcggaatctaactgaagttcctacggatctgcctgcttatgtaaggaacctgttcctgaccggaaaccaactggcagtgcttcctgcgggagccttcgcaagacgccctccactggccgagcttgccgcattgaatctgtccggctctcgactagatgaggtgagggcaggtgccttcgaacacctgccctctctgagacagctcgatctctcccataatccgctcgcagatctgtccccgttcgcttttagcggatcaaatgccagcgtttcagccccttcccccctggtggaactgatcttaaaccacatagtgccaccggaagacgaacgccagaaccggtcttttgagggaatggtcgtcgccgccctcctggcaggtagggcgctgcagggtttacgaagactggagctggccagcaaccattttctgtatctacctcgagacgttctggctcagctgccaagccttagacatcttgatctgtctaataatagtctcgtgagtcttacatatgtgtcattcagaaacctgacccatctagaaagcttgcatcttgaggataacgccctcaaggtcctccataatgggaccctcgctgagctgcagggtcttccccacataagagtcttcctcgataacaatccttgggtgtgcgactgtcatatggccgacatggtgacctggctcaaagagactgaagtggtccaaggcaaagatcgcctcacctgtgcgtatccagaaaagatgcgaaaccgcgtgctgcttgaactcaattctgccgatttagactgtgaccccatcttgcctcccagccttcagacaagctacgtgttcttaggcattgtacttgccctaatcggcgcgatctttctgttagtcctttatctgaacaggaagggaattaaaaaatggatgcacaatatcagagacgcgtgcagggatcacatggaaggataccattaccggtatgagatcaatgccgatcctcgacttactaacctctctagtaacagcgacgtgtag

SEQ ID NO: 330825 - DNA, 1263 bp, Artificial Sequence
  derived and/or modified sequence
atgccggggggctgttccagaggtccagccgctggcgatggtcgcttaaggctggccaggctggccctcgtgctgctgggatgggtgtcctcctcttctccaacaagctctgcctccagcttttcctcaagcgccccctttctcgcatctgcagtaagtgcccagcctccgcttccggaccagtgtccagcactctgcgagtgtagtgaggcagctcgcaccgtgaaatgcgtcaatcgtaacctgacagaagtgcctacagatctgccagcttacgtgcgcaatctgtttttaaccggcaatcaattagctgtgctgcccgcaggagccttcgctcgccgccctcctctggccgaactggccgcactgaacctttcgggttcaagactggacgaagtccgggccggcgcattcgagcatctccccagtctgcggcaattggatctcagccataaccctcttgctgacctcagtcctttcgccttcagtgggagtaacgccagtgtctcggcgccatcaccactggtcgagctgattttgaaccatattgtgccccccgaggacgagcggcagaaccgatcttttgaaggtatggttgtggctgctttgctcgctggacgcgctcttcagggcttgaggagactggagttagcatccaaccattttctctacctgccacgggacgttctcgcccagctaccttccctccggcatctggatctctccaataattctctagtgtcccttacttatgtaagttttagaaatttgacacacttagagtctctacacttggaggacaacgcgcttaaagtgctgcacaacggcacactggccgaactgcagggattgccacacatccgagttttcctggataacaacccctgggtgtgtgactgccacatggctgatatggtcacgtggctgaaagagaccgaggtcgtgcagggcaaagatcgcttgacttgtgcatatcctgaaaagatgcgcaatcgagtgttacttgagcttaactccgcagaccttgattgcgatccgatcctgcctcctagcctccagaccagttacgttttcttgggtatagtcctggctctcattggagccatttttctgctggtcctctacctcaatcggaaaggcatcaagaagtggatgcataacattagggacgcctgccgggatcacatggaaggataccactacaggtacgaaattaacgccgacccgcgtctcaccaacctgtccagcaactcagatgtgtag

SEQ ID NO: 330826 - DNA, 1263 bp, Artificial Sequence
  derived and/or modified sequence
atgcctgggggctgcagccggggccctgctgctggagatggccgcctgcggctggcccggctggccctggtgctgctgggctgggtgagcagcagcagccccaccagcagcgccagcagcttcagcagcagcgcccccttcctggccagcgctgtgtctgcccagccccccctgcctgaccagtgcccagccctgtgtgaatgttctgaggccgccaggacagtgaagtgtgtgaacagaaacctgacagaggtgcccacagacctgcctgcctacgtgaggaacctcttcctgactggaaaccagctggccgtgctgcctgctggggcctttgcccggcggccccccctggccgagctggccgccctgaacctgagcggcagccggctggatgaggtgcgggccggggcctttgagcacctgcccagcctgcggcagctggacctgagccacaaccccctggccgacctgagcccctttgccttcagcggcagcaatgcctctgtgtctgcccccagccccctggtggagctgatcctgaaccacatcgtgcccccagaagatgagcggcagaacagaagctttgagggcatggtggtggccgccctgctggccggccgggccctgcagggcctgcggcggctggagctggccagcaaccacttcctgtacctgcccagagatgtgctggcccagctgcccagcctgcggcacctggacctgagcaacaacagcctggtgtccctgacctacgtgtccttcaggaacctgacccacctggagagcctgcacctggaggacaatgccctgaaggtgctgcacaacggcaccctggccgagctgcagggcctgccccacatccgggtcttcctggacaacaacccctgggtgtgtgactgccacatggctgacatggtgacctggctgaaggagacagaggtggtgcagggcaaggaccggctgacctgtgcctacccagagaagatgaggaacagagtgctgctggagctgaacagcgctgacctggactgtgaccccatcctgccccccagcctgcagaccagctatgtgttcctgggcatcgtgctggccctgattggagccatcttcctgctggtgctgtacctgaacaggaagggcatcaagaagtggatgcacaacatcagagatgcctgccgggaccacatggagggctaccactaccgctatgagatcaatgctgacccccggctgaccaacctgagcagcaacagtgatgtgtag

SEQ ID NO: 330827 - DNA, 1263 bp, Artificial Sequence
  derived and/or modified sequence
atgcccggcggctgcagccggggccccgccgccggcgacggccggctccgccttgcccgcctggcccttgttttgttgggatgggtgagcagcagcagccccacaagctctgcatctagtttctccagctcggctccgttcctggctagcgcagtaagtgcccaaccccctcttcctgaccagtgtcccgcactatgcgaatgttcagaggctgcaagaacagtcaaatgtgtgaacaggaatttaaccgaggttcctacggacctgccggcctatgtcagaaatctcttcctgacaggcaatcagttggccgtgcttcctgcgggagcctttgcccgcaggccacccctggcggagttggccgctctcaatctgtctggatctcggctggacgaggtcagggcgggcgccttcgagcacttaccatcccttcgacagttggacttgtctcataatcccctggccgacctctccccgtttgcattcagcggctccaatgcttctgtgagcgcgccgagccctcttgtggagctgattttgaaccacattgtccccccagaggatgaacggcagaatcggtctttcgaggggatggtagtggccgccctcctggctggccgggcccttcagggactgaggaggctggaactggcctccaatcacttcctatatttacctcgtgatgtgctggcccagcttcccagtctgcgtcatttggatctctccaacaacagcttagtgagcttgacctatgttagtttccgtaatcttacacaccttgaatctctgcatcttgaggataatgctctcaaagtccttcacaatggcacgcttgcagaactgcagggtctgcctcacattcgtgttttcctcgataacaatccgtgggtgtgtgactgccacatggctgacatggtcacgtggcttaaggagacagaggtagtgcaggggaaggaccgcttgacttgcgcctatcccgagaagatgcggaacagagtgttacttgaactgaattcagccgacctggattgtgaccccatacttcccccctcattacagacctcttacgtatttctaggaattgtcttggctctcataggagcgatattcctgttagtgttgtatctcaatcggaaaggcatcaaaaagtggatgcataacattagggatgcttgccgcgaccacatggagggctatcattataggtatgaaatcaacgcagatcctcgtctgaccaacttgtcgtcaaactctgacgtctag

SEQ ID NO: 330828 - DNA, 1263 bp, Artificial Sequence
  derived and/or modified sequence
atgcccggcggctgcagccggggccccgccgccggcgacggccggctcagactggccagattggcactggtgctgttgggttgggtatcttcgagtagtcccacatcttcggcctccagcttcagctcatcagcgccgtttctcgcctctgctgtgtccgctcagcctccacttccagatcagtgcccagccctgtgtgaatgttctgaggccgcccgtactgtgaaatgtgtgaatcgtaacctaacagaggtgcccaccgatttgcccgcctatgttagaaacctatttcttacaggcaaccagcttgcagtcctccctgctggggccttcgcgaggcgcccccctctggcagaattggcggcccttaatctaagtgggtccaggctcgatgaggttagggctggcgccttcgaacacctgccttcgctgcgacagctggacttatctcacaacccactcgctgatctgagtcccttcgctttttctggctctaatgcatccgtcagtgcaccttcacctcttgtagaactgatactgaatcacattgtacctccagaggatgagcggcaaaaccgctctttcgagggtatggtcgtagcagcccttttagcaggcagagcactgcaaggtttaaggaggctggagttggcttccaatcatttcctttatctgccccgggatgtcctcgcacagctgcccagtctccgccacctggatctctctaacaattccctggttagtctgacctacgtctcttttaggaatctgacacatctagagagtttacacctggaggataacgcactaaaagttttgcacaatggcaccttagcagaactgcaggggctaccacatattagagtattcctggacaacaatccctgggtttgtgactgtcacatggcggacatggtgacatggctcaaagagactgaagtcgtccagggcaaggataggctcacatgtgcttatcctgagaaaatgcgaaatcgggtactgctggaactgaactcagcagacctggactgcgaccccatcctgcccccttcactccagaccagctatgtctttctgggaattgttttagccctcatcggagcaatcttcctcctggtcttatacctaaataggaaaggtattaaaaaatggatgcacaacatacgtgacgcatgcagggaccacatggaaggctaccactatcggtatgagatcaatgctgatcctaggctaaccaatttatcctccaatagtgacgtctag

SEQ ID NO: 330829 - DNA, 1263 bp, Artificial Sequence
  derived and/or modified sequence
atgcccggcggctgcagccggggccccgccgccggcgacggccggctgaggttagctaggttggcattggtcctgttggggtgggtgagtagcagctcgcctactagctctgcttctagcttttcctcctctgctcctttcctggcctccgcagttagtgctcagcctcccctgcccgatcagtgccccgccctgtgcgaatgttccgaggccgcaagaaccgttaaatgcgttaacaggaatctgaccgaggtgcccactgatcttcccgcatacgtcagaaacctgtttttaactggcaatcagctggcggtcctgccagccggcgcatttgctaggagacccccactagcagaattagcagccttaaacctttctggtagtaggctggacgaagttagagccggcgccttcgagcacttgccaagtttaagacagcttgatttaagccataacccgctggcggacctgtcacctttcgccttctctggtagtaatgccagtgtgtcagccccgagcccgcttgtggagcttattctcaaccatatcgttccaccggaggacgaaaggcagaaccgtagttttgagggcatggtggtcgccgccctgctggcgggcagggctttgcagggacttcgcagactggagttggcatcaaaccatttcctgtatttaccgcgcgatgtcctcgcacagctgccctctcttagacatctggacctgagcaacaattcactggtttccctgacatatgtgtctttccgaaacctaacgcacctcgagtccttgcatctggaggataatgcactcaaggtcttgcataacggaaccctcgccgagttgcaaggactgccacatattcgggtgttcctcgataacaatccttgggtgtgcgattgccacatggccgatatggtcacatggctgaaggagactgaggtggtacagggtaaggaccgcctgacctgtgcctacccggaaaaaatgaggaaccgtgtgctcttggagcttaattccgccgacctcgactgcgaccccatcttacccccctccctgcagaccagttacgtgtttctggggattgtgctggcgctaatcggcgcgatattcctgcttgtcctgtatctgaacaggaaaggaattaagaagtggatgcacaatatccgggacgcctgcagggatcacatggagggttaccactatagatatgagatcaacgccgacccgcgcctgacgaacctttcgagcaattccgatgtttag

SEQ ID NO: 330830 - DNA, 1263 bp, Artificial Sequence
  derived and/or modified sequence
atgccgggtggctgttctcgaggtcccgctgcaggcgacggaagattacggctggcccgtcttgctctggttctcctggggtgggtctcttcgagctcccccaccagcagcgcgagttcctttagttccagcgctccctttctcgcctctgccgtctctgcccagccacctctgcccgatcagtgccccgcactgtgcgagtgcagtgaggcagctcgcacggttaagtgcgtcaaccgcaacctgacagaagtgcccaccgatctgcccgcttatgtccgcaacctcttcctgaccggcaaccagttggcagtgcttcctgcaggagcttttgctaggcgaccccctcttgcggagctcgccgctttgaacctctccggatccagactggacgaagtccgcgcaggcgctttcgagcatcttccatcgctgagacagctggatttgtctcataacccgctagccgacctgtcgccttttgcgttttccggcagtaacgcctctgtgagtgctcccagcccactagtggaactaatccttaaccacatcgtaccccctgaagatgagcgtcagaacaggtccttcgagggtatggtggtggcggctttgctggcagggagagctttgcagggattgcgtcgcttagagcttgcgtccaaccattttctttatctgccacgggatgttcttgcccaactcccaagtttgagacatttagatctatctaacaacagtcttgtttcccttacttacgttagcttcaggaacctcacccatctagaatccctacacctcgaagataacgctctgaaggtgctccataatggaacactggcagagttacagggactccctcatattagggtctttctagacaataacccatgggtttgtgattgccacatggcagacatggtcacgtggctgaaggaaacagaggtggttcagggcaaagatcggctaacctgcgcatatccggaaaagatgcggaatcgagtcctgctagagttgaacagcgccgatctggactgcgaccctatactgccaccctctctccagacatcttacgtgttcctcggcatcgtactggcactgataggcgcaattttcctcctggttctctatttaaacaggaaagggatcaagaaatggatgcacaatatccgggatgcctgtcgggaccatatggaaggctatcactaccgatacgagattaacgctgatcctcggttgacaaacttgagtagtaattccgacgtgtag

SEQ ID NO: 330831 - DNA, 1263 bp, Artificial Sequence
  derived and/or modified sequence
atgcctggtgggtgtagcaggggtccggctgctggcgatgggcgtcttcggctggccaggcttgctctggtcttactcgggtgggtgagctcttcatcacctacaagcagcgccagcagcttttctagcagcgcgccattcttagcgtctgccgtgtctgcccagccccctctgcccgatcagtgtcctgccctctgcgaatgttccgaggctgcgaggacagtaaagtgcgtcaaccgtaatctgacagaagtgcctacagacctgcccgcttatgtgaggaacctcttcctgacaggaaatcagctcgcagtcctacctgcaggcgcattcgccaggcggcctcctctcgcagaactcgccgctcttaacctttctggttcgaggttggatgaggtgcgagccggtgccttcgaacatctcccgagtctccgccagctggacctttctcacaaccccctagcggatctaagtccattcgcgttttccggatctaatgcatcagtctccgctccttctcctctcgtggaactcattctgaatcatatcgtgcccccagaagacgagcgccagaataggagcttcgagggtatggttgtcgcggcacttctcgccggacgcgcactccagggactacggagactcgagctagcttctaaccactttctctatctgccaagggatgtactggcgcaactgcctagccttcgtcatttggacttgtccaacaacagtctggtcagtctgacatatgtgtcattcagaaacctgacccatctagaatctctacacctcgaggataatgctctgaaggtactccacaatgggacccttgcagagttgcagggcctcccccatatccgtgtcttcctggacaataatccatgggtgtgtgactgccacatggctgacatggtcacatggctgaaagagaccgaggtggttcagggaaaagaccggctaacatgcgcttaccccgagaagatgcgaaaccgggtgctgctggaactgaattccgctgacctggactgtgatcctattttaccaccttccctgcagacgagctacgtattcctaggtatcgtactcgcactaatcggtgccatctttctgctggtgttatacttgaacagaaaaggtattaaaaagtggatgcacaacattagggatgcctgccgtgaccacatggagggctaccactacaggtacgagatcaacgcagatcccaggctaacaaacctcagttccaacagtgacgtgtag

SEQ ID NO: 330832 - DNA, 1263 bp, Artificial Sequence
  derived and/or modified sequence
atgcctggaggttgctcacgcggtcccgcagccggtgatggcagactccgcttggctcggctggccctggtgctgctaggttgggtgtcctccagttccccaacctcgagtgctagttctttttctagcagcgcacccttcctggcctccgctgtgagtgcacaaccaccactgcccgaccagtgtcctgccctctgtgagtgctcagaggcagctcgtacagtaaaatgcgtaaatcggaatctcactgaggtccctacggacctgcccgcttatgtgcggaatcttttcctgaccggcaaccagctcgcagtgctgccagcgggagccttcgcccgacgcccaccactagccgagttggccgcacttaatctgtccggaagtcgactcgatgaggtccgagccggtgcgttcgagcaccttcctagcttgcgccagctcgacttgtctcacaatcctttagcagatctttcaccctttgcttttagcgggagcaacgcctcagtttccgcgccatccccattggtggagttgattcttaaccatatagtaccgcctgaagacgaacgccagaacaggagcttcgaggggatggtagtcgccgcactcctcgctggaagggccttgcaggggctccgaaggctcgagttggcttcaaaccactttctttacttgcccagggatgtactggctcagcttccttcgctgaggcacctggacctctctaataatagcttagttagccttacgtacgttagctttcggaatttgacccatttggaatcccttcacttggaggataatgctctgaaggtcctgcataacggaactctagctgaactacagggattaccccacatccgcgtgtttctcgataacaacccatgggtgtgcgattgtcatatggcagacatggtaacttggctgaaggaaactgaagtcgtgcagggaaaagaccgactgacatgcgcatatccagagaagatgcgcaacagggtccttttggagcttaacagcgccgatcttgattgtgacccaatacttccaccttccttgcagaccagctacgtgttcctgggaatagtgcttgctctcataggcgctatttttctcctggtgctctacctgaacagaaagggcataaagaagtggatgcacaacatcagagatgcgtgtcgggatcatatggagggatatcactatagatatgaaatcaacgcggacccacgccttacgaacctgtcaagcaacagtgatgtctag

SEQ ID NO: 330833 - DNA, 6484 bp, Artificial Sequence
  derived and/or modified sequence
gttaatttccaccaggaggaggcgcgcagcccagctcccctagtctctcttcttaaatccccctacctacggctgccgaggttggccgcgcgtcgggaatctccccgacagtcctggccctcccccgccccccgggttggtttttcccagctgcggaggttgggaggttgggccaggggctggggtgcgaagagagtcggcgcccgcaacgcggagccgggaagtcgtcgctactctggtggaactcagagttggttctggaggcggcggacgcggaggtccctcagaggatccagcgaggggcgccaacaagaggcgaagaggtggcaccagggcggcggcaggaagaggagcgggagcaggagcgcggagcggagcgtcccgacccgccgtgcgtactttctggagggaaggggcgggggaatcggcccctgagggaagcgcccggtggcgagggggttagccaagttccggctgcggcgccactccctcggttccacgagaggaaagttttttttttccagacgcttccgccggctcgcgccctccgggcccagcctcccgagccttcggagcgggcgccgtcccagcccagctccggggaaacgcgagccgcgatgcctggggggtgctcccggggccccgccgccggggacgggcgtctgcggctggcgcgactagcgctggtactcctgggctgggtctcctcgtcttctcccacctcctcggcatcctccttctcctcctcggcgccgttcctggcttccgccgtgtccgcccagcccccgctgccggaccagtgccccgcgctgtgcgagtgctccgaggcagcgcgcacagtcaagtgcgttaaccgcaatctgaccgaggtgcccacggacctgcccgcctacgtgcgcaacctcttccttaccggcaaccagctggccgtgctccctgccggcgccttcgcccgccggccgccgctggcggagctggccgcgctcaacctcagcggcagccgcctggacgaggtgcgcgcgggcgccttcgagcatctgcccagcctgcgccagctcgacctcagccacaacccactggccgacctcagtcccttcgctttctcgggcagcaatgccagcgtctcggcccccagtccccttgtggaactgatcctgaaccacatcgtgccccctgaagatgagcggcagaaccggagcttcgagggcatggtggtggcggccctgctggcgggccgtgcactgcaggggctccgccgcttggagctggccagcaaccacttcctttacctgccgcgggatgtgctggcccaactgcccagcctcaggcacctggacttaagtaataattcgctggtgagcctgacctacgtgtccttccgcaacctgacacatctagaaagcctccacctggaggacaatgccctcaaggtccttcacaatggcaccctggctgagttgcaaggtctaccccacattagggttttcctggacaacaatccctgggtctgcgactgccacatggcagacatggtgacctggctcaaggaaacagaggtagtgcagggcaaagaccggctcacctgtgcatatccggaaaaaatgaggaatcgggtcctcttggaactcaacagtgctgacctggactgtgacccgattcttcccccatccctgcaaacctcttatgtcttcctgggtattgttttagccctgataggcgctattttcctcctggttttgtatttgaaccgcaaggggataaaaaagtggatgcataacatcagagatgcctgcagggatcacatggaagggtatcattacagatatgaaatcaatgcggaccccagattaacgaacctcagttctaactcggatgtctgagaaatattagaggacagaccaaggacaactctgcatgagatgtagacttaagctttatccctactaggcttgctccactttcatcctccactatagatacaacggactttgactaaaagcagtgaaggggatttgcttccttgttatgtaaagtttctcggtgtgttctgttaatgtaagacgatgaacagttgtgtatagtgttttaccctcttctttttcttggaactcctcaacacgtatggagggatttttcaggtttcagcatgaacatgggcttcttgctgtctgtctctctctcagtacagttcaaggtgtagcaagtgtacccacacagatagcattcaacaaaagctgcctcaactttttcgagaaaaatactttattcataaatatcagttttattctcatgtacctaagttgtggagaaaataattgcatcctataaactgcctgcagacgttagcaggctcttcaaaataactccatggtgcacaggagcacctgcatccaagagcatgcttacattttactgttctgcatattacaaaaaataacttgcaacttcataacttctttgacaaagtaaattacttttttgattgcagtttatatgaaaatgtactgatttttttttaataaactgcatcgagatccaaccgactgaattgttaaaaaaaaaaaaaataaagattcttaaaagaattacagtgtgtgcaagtttgctttgaaaaaaggatgaagggcaggagtattcaatggtcttggttccgatgataattattacttaacatagctgagaatcaaactgtagcaatgtctaatataaatagacttgggagatcgttttgaaatggtggatccttttagtatttaaatggagagtttgagtattcatgtgactgtatggtcccaaagttaatgctatttatgaaacagttttgtaagaacataatgaagttggtaaaagctaagcgttctgcacaataaacagttcccagtttggggctttttcaaggctaatgaagttattgttggtctagaaaaatagtatttacttaataaaactctgtttgaaattgttctgtggatttttagagcagaatttgaaacaaatgtaatgcaaataaatataaagataaagtgtcttaaagacaatattctgaaataaaagatataaaatataatttaaaaaatatttctcaatgtcttaatgtaaattgaaacttagattttcttgaggatattttcaaaaaaacatttaaagtggaacataaatgttctttagtttatcagagacccagctaatatgtttaaaaagttgacttgacatggttgaatatgaacttgaggaaataaccacagataaatgtctacatctgtaaacacgtgtctcaagtatttataggttcttatcttcagttcagtgtttaagaatttgaggatattttgattttagctaagctgttcataatgtaagtatatacacctttgtgaagaataaatcacatttaggtgtaaatacaggcaatcattaattgatacatccataatatacaaggcttttattattttttcagtttattatctgtcatttaatctgaaaagtaaattccattaatcagtcttcaggctcttttatcaagtgatttaaatgtagccattattgcttaactgaaagtattaggtaaacttgcatcagtaagtcttagggcttgcttttcctttgaactggttatgtccttcagtgctttatgtttgaaataaaatctacattttcatatttttataaataaaataggatcagatagtattttaggttctagaaatctttgctgattccttctttgaattaaattcagaaattttcaaagtagggctaaaaataagtaaatcttcctttttataggttagaatatatagtcagaatacaaagctgtaattccttaaattccatcaggcttgttttgtgaaatatagtatttattatttaagggttatatttcagatcctataattacctcagaaaaagctaaatatttggcacttaaaattccatcaaacagtttaagtgttcatcagaaattcctaaactgtctggttgccattatttggtaagaacaatgagatactaatctgtcaaaaatagtgaccactatcttagtaaactgttgatggacttagtaagtcttctgatattgtaggaaacaaattataatattgatagagcctctattgagaagaattgtttcttcatcacatgataatctaacagtttaaagtggagctttatctaagaaccagggaagcagtagattcattagtctagcttttctcatcaactctttgaagcaatgatgaatctgataaagtgaagccaagttttccctgttaggtagatggcttctttgaagttataatttattgcttctttttcatccccctacttattctcttgtttggactttccaattgctactgctttgttttccatcacatcactccttcctgttctccaaaatatggaaataaaaaagtcaattaaaagaacaccttattcttaagataaaaaattgttattatttgacaactaattaatgttttgcagccctaatattcttaagtctataagcttataaaacattctaagttccttggaagatagaggctatataaattcaataagtataagggaatatgggaaaaataaaagtatcactttatttaaaaataagacaagtctgtttgttttaaatactgttcttactattaatgcattgttgactctagaaacctgcaagtatccatttttaaaattttattttagttggtaatactctttattactgaacgtaaaattttcaacataaaacacccttcatttatcctttacaagtttcatttgaagaaagttagaaaaaatacttagaaattcaaggacttgatatatcccttaatttagaaagctattcaactatcccataaatttctatttaaagtagcaaaaattttaggataatacagctatttggccctgaattataactgccccctttgattgtaaccattcagtttgcagcattcgtttttgtaatagcagtttggctgctatgggtgtgattcaatggtaacctacaaggcaaatttgtacaggagctgacagatttttctaacaaaataaggagactttgaagcacattgaataggagtttttaaatgaataggattttttaaaggaaaaagagtaggagcttgggggggaaggctggttgaaataaatgagcaaatcacaaataataaatcctttagaaataccttgattggcagtaagtgtggattatgctcatctcagtatttaattagaaataacttacctttgtcttttgtctttttaattaaagtggctgtaaaaaagaaggtccagatgaactgagattgtttgcttaggaattctgttttactcttttccttttacctgatgttctaaaacagggcttaccttgttgaggaccttagaggctttgcaattctagattgtgattctttcatatcattttagtttttctcccaagactacactaaaggagacatcacgagatttgcaaggttaaaaacaattctgcacgtgcttcctcctgctcccaaatccggtcatccacctttcagagcagcaccgtaaagtgaagacagacatttattagatgaaattctggtttcacttttacacttgtgcaagcatttttaacagtaaaggagaggaaagggaggaatttatatttctagataatatatgaaaattaccttgatattgtatttttaagatctttcaccaatactgcagtgctgcactagaaataattagtttaagaaaatacattcaacattgtccaggtgatcctgtcaccttttagatgacgaaaaacatcttgaggatgttttgtacagttattttcccattgttactcttagagacttttgtttcaaaaaggcaggctcattttattttgttttatcttagaacattttagcagctctttgtcatgggttaaaaaaatctagaattaaaaaaatgtttaatatatgatttatataattttgacaagaatacaaattcttagtcgttcaaaattggaagcgctcttagaagtgtcaagctcagctttccattccacaaatgaagtaactggtaactgtgacttattatgttatacagtgacagttattatgttatacagtgtcagttatacagtgacaaccaggacaaaatcctagggttctagattccccttctggtgctctttttaccagatgatggcattactaattgcctaccttgaggcctttgaaatcaccatgtctgataaaaacatgcaattgctttggtgaatttgtttgttttattgttgttgctttgagtgaatgcttcagtttgctctagattttactttgttaaaaattaccatgttttaacccccgaaaacatttaatgtttttgaaatgattttttcataacaatcttatgagtctattatataataggaagtattttggaaatttaatggtgatatttctttggaaaagaaaaataaaaactctggaatgca

SEQ ID NO: 330834 - DNA, 3392 bp, Artificial Sequence
  derived and/or modified sequence
tttctctctctctctctcttaaagttggcgcgctctcttcacaagttccatcactacccaagaagtgagggggcgggggggacaggcgggaaggcattaattacacctaaatctgaagtttgcggcctcaagtaccactttgatggggagagcttctgaagcttccatacaacctgccgtgcctttgctgctgccgcagtagattttcagctcatttctttctgctgctgcttcgcgctgctctgtcatgcctaaatctatctcgtcactgccaaaggtgcctgaatcagggtgaattccacgagattcaccagcggttttgctccagtccaaggaggaggcgcgcagcccagctcccctagtctctcttcttaaatccccctacctacggctgccgaggttggccgcgcgtcgggaatctccccgacagtcctggccctcccccgccccccgggttggtttttcccagctgcggaggttgggaggttgggccaggggctggggtgcgaagagagtcggcgcccgcaacgcggagccgggaagtcgtcgctactctggtggaactcagagttggttctggaggcggcggacgcggaggtccctcagaggatccagcgaggggcgccaacaagaggcgaagaggtggcaccagggcggcggcaggaagaggagcgggagcaggagcgcggagcggagcgtcccgacccgccgtgcgtactttctggagggaaggggcgggggaatcggcccctgagggaagcgcccggtggcgagggggttagccaagttccggctgcggcgccactccctcggttccacgagaggaaagttttttttttccagacgcttccgccggctcgcgccctccgggcccagcctcccgagccttcggagcgggcgccgtcccagcccagctccggggaaacgcgagccgcgatgcctggggggtgctcccggggccccgccgccggggacgggcgtctgcggctggcgcgactagcgctggtactcctgggctgggtctcctcgtcttctcccacctcctcggcatcctccttctcctcctcggcgccgttcctggcttccgccgtgtccgcccagcccccgctgccggaccagtgccccgcgctgtgcgagtgctccgaggcagcgcgcacagtcaagtgcgttaaccgcaatctgaccgaggtgcccacggacctgcccgcctacgtgcgcaacctcttccttaccggcaaccagctggccgtgctccctgccggcgccttcgcccgccggccgccgctggcggagctggccgcgctcaacctcagcggcagccgcctggacgaggtgcgcgcgggcgccttcgagcatctgcccagcctgcgccagctcgacctcagccacaacccactggccgacctcagtcccttcgctttctcgggcagcaatgccagcgtctcggcccccagtccccttgtggaactgatcctgaaccacatcgtgccccctgaagatgagcggcagaaccggagcttcgagggcatggtggtggcggccctgctggcgggccgtgcactgcaggggctccgccgcttggagctggccagcaaccacttcctttacctgccgcgggatgtgctggcccaactgcccagcctcaggcacctggacttaagtaataattcgctggtgagcctgacctacgtgtccttccgcaacctgacacatctagaaagcctccacctggaggacaatgccctcaaggtccttcacaatggcaccctggctgagttgcaaggtctaccccacattagggttttcctggacaacaatccctgggtctgcgactgccacatggcagacatggtgacctggctcaaggaaacagaggtagtgcagggcaaagaccggctcacctgtgcatatccggaaaaaatgaggaatcgggtcctcttggaactcaacagtgctgacctggactgtgacccgattcttcccccatccctgcaaacctcttatgtcttcctgggtattgttttagccctgataggcgctattttcctcctggttttgtatttgaaccgcaaggggataaaaaagtggatgcataacatcagagatgcctgcagggatcacatggaagggtatcattacagatatgaaatcaatgcggaccccagattaacgaacctcagttctaactcggatgtctgagaaatattagaggacagaccaaggacaactctgcatgagatgtagacttaagctttatccctactaggcttgctccactttcatcctccactatagatacaacggactttgactaaaagcagtgaaggggatttgcttccttgttatgtaaagtttctcggtgtgttctgttaatgtaagacgatgaacagttgtgtatagtgttttaccctcttctttttcttggaactcctcaacacgtatggagggatttttcaggtttcagcatgaacatgggcttcttgctgtctgtctctctctcagtacagttcaaggtgtagcaagtgtacccacacagatagcattcaacaaaagctgcctcaactttttcgagaaaaatactttattcataaatatcagttttattctcatgtacctaagttgtggagaaaataattgcatcctataaactgcctgcagacgttagcaggctcttcaaaataactccatggtgcacaggagcacctgcatccaagagcatgcttacattttactgttctgcatattacaaaaaataacttgcaacttcataacttctttgacaaagtaaattacttttttgattgcagtttatatgaaaatgtactgatttttttttaataaactgcatcgagatccaaccgactgaattgttaaaaaaaaaaaaaataaagattcttaaaagaattacagtgtgtgcaagtttgctttgaaaaaaggatgaagggcaggagtattcaatggtcttggttccgatgataattattacttaacatagctgagaatcaaactgtagcaatgtctaatataaatagacttgggagatcgttttgaaatggtggatccttttagtatttaaatggagagtttgagtattcatgtgactgtatggtcccaaagttaatgctatttatgaaacagttttgtaagaacataatgaagttggtaaaagctaagcgttctgcacaataaacagttcccagtttggggctttttcaaggctaatgaagttattgttggtctagaaaaatagtatttacttaataaaactctgtttgaaattgttctgtggatttttagagcagaatttgaaacaaatgtaatgcaaataaatataaagataaagtgtcttaaagacaatattctgaaataaaagatataaaatataatttaaa

SEQ ID NO: 330835 - DNA, 2881 bp, Artificial Sequence
  derived and/or modified sequence
acccggaggccgaccttccgccgaggcggtgcaggaaggaacgggagagggagaagtttggtagggaaggaattggggattaagcggtccctcagaggatccagcgaggggcgccaacaagaggcgaagaggtggcaccagggcggcggcaggaagaggagcgggagcaggagcgcggagcggagcgtcccgacccgccgtgcgtactttctggagggaaggggcgggggaatcggcccctgagggaagcgcccggtggcgagggggttagccaagttccggctgcggcgccactccctcggttccacgagaggaaagttttttttttccagacgcttccgccggctcgcgccctccgggcccagcctcccgagccttcggagcgggcgccgtcccagcccagctccggggaaacgcgagccgcgatgcctggggggtgctcccggggccccgccgccggggacgggcgtctgcggctggcgcgactagcgctggtactcctgggctgggtctcctcgtcttctcccacctcctcggcatcctccttctcctcctcggcgccgttcctggcttccgccgtgtccgcccagcccccgctgccggaccagtgccccgcgctgtgcgagtgctccgaggcagcgcgcacagtcaagtgcgttaaccgcaatctgaccgaggtgcccacggacctgcccgcctacgtgcgcaacctcttccttaccggcaaccagctggccgtgctccctgccggcgccttcgcccgccggccgccgctggcggagctggccgcgctcaacctcagcggcagccgcctggacgaggtgcgcgcgggcgccttcgagcatctgcccagcctgcgccagctcgacctcagccacaacccactggccgacctcagtcccttcgctttctcgggcagcaatgccagcgtctcggcccccagtccccttgtggaactgatcctgaaccacatcgtgccccctgaagatgagcggcagaaccggagcttcgagggcatggtggtggcggccctgctggcgggccgtgcactgcaggggctccgccgcttggagctggccagcaaccacttcctttacctgccgcgggatgtgctggcccaactgcccagcctcaggcacctggacttaagtaataattcgctggtgagcctgacctacgtgtccttccgcaacctgacacatctagaaagcctccacctggaggacaatgccctcaaggtccttcacaatggcaccctggctgagttgcaaggtctaccccacattagggttttcctggacaacaatccctgggtctgcgactgccacatggcagacatggtgacctggctcaaggaaacagaggtagtgcagggcaaagaccggctcacctgtgcatatccggaaaaaatgaggaatcgggtcctcttggaactcaacagtgctgacctggactgtgacccgattcttcccccatccctgcaaacctcttatgtcttcctgggtattgttttagccctgataggcgctattttcctcctggttttgtatttgaaccgcaaggggataaaaaagtggatgcataacatcagagatgcctgcagggatcacatggaagggtatcattacagatatgaaatcaatgcggaccccagattaacgaacctcagttctaactcggatgtctgagaaatattagaggacagaccaaggacaactctgcatgagatgtagacttaagctttatccctactaggcttgctccactttcatcctccactatagatacaacggactttgactaaaagcagtgaaggggatttgcttccttgttatgtaaagtttctcggtgtgttctgttaatgtaagacgatgaacagttgtgtatagtgttttaccctcttctttttcttggaactcctcaacacgtatggagggatttttcaggtttcagcatgaacatgggcttcttgctgtctgtctctctctcagtacagttcaaggtgtagcaagtgtacccacacagatagcattcaacaaaagctgcctcaactttttcgagaaaaatactttattcataaatatcagttttattctcatgtacctaagttgtggagaaaataattgcatcctataaactgcctgcagacgttagcaggctcttcaaaataactccatggtgcacaggagcacctgcatccaagagcatgcttacattttactgttctgcatattacaaaaaataacttgcaacttcataacttctttgacaaagtaaattacttttttgattgcagtttatatgaaaatgtactgatttttttttaataaactgcatcgagatccaaccgactgaattgttaaaaaaaaaaaaaataaagattcttaaaagaattacagtgtgtgcaagtttgctttgaaaaaaggatgaagggcaggagtattcaatggtcttggttccgatgataattattacttaacatagctgagaatcaaactgtagcaatgtctaatataaatagacttgggagatcgttttgaaatggtggatccttttagtatttaaatggagagtttgagtattcatgtgactgtatggtcccaaagttaatgctatttatgaaacagttttgtaagaacataatgaagttggtaaaagctaagcgttctgcacaataaacagttcccagtttggggctttttcaaggctaatgaagttattgttggtctagaaaaatagtatttacttaataaaactctgtttgaaattgttctgtggatttttagagcagaatttgaaacaaatgtaatgcaaataaatataaagataaagtgtcttaaagacaatattctgaaataaaagatataaaatataatttaaa

SEQ ID NO: 330836 - DNA, 309 bp, Artificial Sequence
  derived and/or modified sequence
atgctgagcgaggaggagaaggaggagctgaaggccgagctggtgcagctggaggacgagatcaccaccctgagacaggtgctgagcgccaaggagagacacctggtggagatcaagcagaagctgggcatgaacctgatgaacgagctgaagcagaacttcagcaagagctggcacgacatgcagaccaccaccgcctacaagaagacccacgagaccctgagccacgccggccagaaggccaccgccgccttcagcaacgtgggcaccgccatcagcaagaagttcggcgacatgagaagaaagtag

SEQ ID NO: 330837 - DNA, 279 bp, Artificial Sequence
  derived and/or modified sequence
atgctgagcgaggaggagaaggaggagctgaaggccgagctggtgcagctggaggacgagatcaccaccctgagacaggtgctgagcgccaaggagagacacctggtggagatcaagcagaagctgggcatgaacctgatgaacgagctgaagcagaacttcagcaagagctggcacgacatgcagaccaccaccgcctacaagaagacccacgagaccctgagccacgccggccagaaggccaccgccgccttcagcaacgtgggcaccgccatctag

SEQ ID NO: 330838 - DNA, 309 bp, Artificial Sequence
  derived and/or modified sequence
atgctgagcgaggaagagaaagaggaattgaaggccgagctggttcagctagaggatgaaatcacaaccctgcgacaagtgctgagcgcgaaggagagacacctggttgagatcaagcagaagctgggtatgaacctgatgaatgaattgaagcagaatttctccaagagttggcacgacatgcagaccacaacagcatacaagaagacccacgaaactttgtcacacgcagggcagaaggcaacagctgcttttagcaacgttggaaccgcaatcagtaagaaatttggagacatgcggagaaaatag

SEQ ID NO: 330839 - DNA, 309 bp, Artificial Sequence
  derived and/or modified sequence
atgctcagtgaagaagagaaggaggagctgaaggcagaactggtgcaactcgaggacgaaatcactaccctgcgacaggtgctatcagccaaagagaggcatctcgttgagataaagcagaaattgggaatgaacctcatgaacgaactcaaacagaacttcagtaagtcttggcacgacatgcaaaccacaaccgcgtataagaagactcacgaaactctctcccacgccggtcagaaagcaaccgctgctttcagcaacgttgggaccgcaatctcaaagaagtttggggacatgaggagaaaatag

SEQ ID NO: 330840 - DNA, 309 bp, Artificial Sequence
  derived and/or modified sequence
atgctgtctgaagaagaaaaagaggagctaaaagcagaactggttcagctggaggacgagatcactacgctgagacaggtgttgagcgcaaaagaacgccaccttgtagaaatcaagcagaagctggggatgaacttgatgaatgaactgaaacagaatttctcgaagagctggcacgacatgcagactacaaccgcatacaagaagacccatgaaactctgtcacacgccggacagaaagcaacagccgccttttctaatgtcggcactgctatttccaagaaattcggcgacatgaggaggaaatag

SEQ ID NO: 330841 - DNA, 279 bp, Artificial Sequence
  derived and/or modified sequence
atgttgagtgaggaggagaaggaagaactcaaagccgagctcgtgcagcttgaggatgaaatcactactctccgtcaggtcctcagcgccaaagagaggcatcttgtggagataaagcagaaactcggaatgaacctgatgaacgagttgaagcagaatttctcgaaaagctggcacgatatgcaaacaactaccgcttacaagaaaacacatgagactctttcacacgctgggcaaaaggccacagcagccttctccaacgtgggcacagcgatttag

SEQ ID NO: 330842 - DNA, 309 bp, Artificial Sequence
  derived and/or modified sequence
atgctgtctgaggaggagaaggaggagctgaaggccgagctggtgcagctggaggatgagatcaccaccctgcggcaggtgctgagcgccaaggagcggcacctggtggagatcaagcagaagctgggcatgaacctgatgaatgagctgaagcagaacttcagcaagtcctggcatgacatgcagaccaccacagcctacaagaagacccatgagaccctgagccatgctggccagaaggccacagctgccttcagcaatgtgggcacagccatcagcaagaagtttggagacatgaggaggaagtag

SEQ ID NO: 330843 - DNA, 279 bp, Artificial Sequence
  derived and/or modified sequence
atgctgtctgaggaggagaaggaggagctgaaggccgagctggtgcagctggaggatgagatcaccaccctgcggcaggtgctgagcgccaaggagcggcacctggtggagatcaagcagaagctgggcatgaacctgatgaatgagctgaagcagaacttcagcaagtcctggcatgacatgcagaccaccacagcctacaagaagacccatgagaccctgagccatgctggccagaaggccacagctgccttcagcaatgtgggcacagccatctag

SEQ ID NO: 330844 - DNA, 309 bp, Artificial Sequence
  derived and/or modified sequence
atgctgagcgaggaggagaaggaggagctgaaggccgagctggtgcaactggaagatgaaatcaccaccctcagacaggtgctgtctgccaaggagcggcatctcgtggagattaagcagaagttaggcatgaacctcatgaacgagctcaaacaaaactttagcaaatcgtggcacgatatgcaaacaacaacagcttacaaaaaaacccatgagacattgtcacatgctgggcagaaagccaccgctgccttttctaacgtcgggacagccatttctaaaaagttcggggacatgcggcgcaagtag

SEQ ID NO: 330845 - DNA, 309 bp, Artificial Sequence
  derived and/or modified sequence
atgctgagcgaggaggagaaggaggagctgaaggccgagctggtgcagctcgaagatgagatcacgactttaaggcaggtcctcagtgcgaaggagaggcaccttgtggaaatcaagcagaagctcggaatgaacttgatgaatgagctgaaacagaatttttcaaagagttggcatgacatgcagaccactaccgcctacaaaaagactcacgagaccctgtctcatgcaggtcagaaggctactgccgctttttcaaacgtaggtacagctattagcaagaagttcggagacatgaggaggaagtag

SEQ ID NO: 330846 - DNA, 309 bp, Artificial Sequence
  derived and/or modified sequence
atgctgagcgaggaggagaaggaggagctgaaggccgagctggtgcagcttgaggatgaaataactaccctgagacaggtgctgtcagcgaaagaacggcacttggtcgagatcaagcagaaattgggcatgaaccttatgaatgaattaaagcagaacttctccaaaagctggcacgacatgcagacaaccactgcatataagaagacacacgagacgcttagtcatgctgggcaaaaagctacggccgccttttcaaatgtcggcaccgcaatctctaagaaattcggtgacatgaggaggaaatag

SEQ ID NO: 330847 - DNA, 279 bp, Artificial Sequence
  derived and/or modified sequence
atgctgagcgaggaggagaaggaggagctgaaggccgagctggtgcagcttgaggacgaaataacaaccctgaggcaggtactgtcagccaaggaaaggcacttagtagagattaagcagaagttaggcatgaatttaatgaatgagctgaagcagaatttcagcaaaagttggcatgatatgcagaccaccaccgcctacaagaagacccacgaaacactgtctcacgcagggcagaaagccaccgcagccttttcaaacgtgggaaccgctatttag

SEQ ID NO: 330848 - DNA, 309 bp, Artificial Sequence
  derived and/or modified sequence
atgctctccgaggaggagaaagaagaactaaaagccgagttagtgcagttagaggatgagatcacaacactccgccaggtgttgagcgccaaggagcgccacctcgtggaaatcaagcagaagttaggcatgaaccttatgaacgaactgaaacagaacttctcaaaatcctggcacgacatgcagacaactaccgcttataagaagacacacgagactctgtcccatgccggtcagaaggcaaccgccgctttttctaatgtgggaactgcaattagtaaaaaatttggtgacatgaggagaaagtag

SEQ ID NO: 330849 - DNA, 309 bp, Artificial Sequence
  derived and/or modified sequence
atgctgagcgaagaggagaaggaggagctcaaagccgagctggttcagctagaagacgagattaccactctcagacaggtcctatcggccaaagaacgtcaccttgtcgaaattaaacaaaaactcgggatgaacctaatgaacgagcttaaacagaacttttctaaatcttggcatgacatgcagaccacgactgcctataaaaagacccacgagacccttagccacgcagggcagaaagctaccgctgcatttagcaatgtcgggacagcgattagcaagaagttcggggacatgcgcaggaagtag

SEQ ID NO: 330850 - DNA, 309 bp, Artificial Sequence
  derived and/or modified sequence
atgctcagtgaagaggaaaaggaggaactcaaggccgagctggtacagttagaagacgaaatcaccaccctacgccaggtgttatcggccaaggaacgccatctggtcgaaatcaagcaaaagttggggatgaacctgatgaatgagctcaaacagaacttcagcaaaagctggcatgatatgcagacaactactgcctacaagaaaactcatgagaccttgtcccatgcgggtcaaaaggccactgccgcttttagcaatgtggggaccgctatttctaaaaagtttggggacatgcgtcggaagtag

SEQ ID NO: 330851 - DNA, 279 bp, Artificial Sequence
  derived and/or modified sequence
atgctgtctgaggaggaaaaagaagaattaaaagccgagctggtgcagttagaagacgaaataactactctcagacaagtcctaagcgccaaagagagacacctggttgaaatcaagcagaagctgggcatgaatctgatgaatgagctgaaacagaatttttctaagtcatggcacgatatgcagacgacaacagcctataaaaagacacatgaaacactatcccacgccggacaaaaagccacagcagcattttcaaacgtcgggacagccatttag

SEQ ID NO: 330852 - protein, 857 aa, Artificial Sequence
  derived and/or modified sequence
MESEDLSGRELTIDSIMNKVRDIKNKFKNEDLTDELSLNKISADTTDNSGTVNQIMMMANNPEDWLSLLLKLEKNSVPLSDALLNKLIGRYSQAIEALPPDKYGQNESFARIQVRFAELKAIQEPDDARDYFQMARANCKKFAFVHISFAQFELSQGNVKKSKQLLQKAVERGAVPLEMLEIALRNLNLQKKQLLSEEEKKNLSASTVLTAQESFSGSLGHLQNRNNSCDSRGQTTKARFLYGENMPPQDAEIGYRNSLRQTNKTKQSCPFGRVPVNLLNSPDCDVKTDDSVVPCFMKRQTSRSECRDLVVPGSKPSGNDSCELRNLKSVQNSHFKEPLVSDEKSSELIITDSITLKNKTESSLLAKLEETKEYQEPEVPESNQKQWQSKRKSECINQNPAASSNHWQIPELARKVNTEQKHTTFEQPVFSVSKQSPPISTSKWFDPKSICKTPSSNTLDDYMSCFRTPVVKNDFPPACQLSTPYGQPACFQQQQHQILATPLQNLQVLASSSANECISVKGRIYSILKQIGSGGSSKVFQVLNEKKQIYAIKYVNLEEADNQTLDSYRNEIAYLNKLQQHSDKIIRLYDYEITDQYIYMVMECGNIDLNSWLKKKKSIDPWERKSYWKNMLEAVHTIHQHGIVHSDLKPANFLIVDGMLKLIDFGIANQMQPDTTSVVKDSQVGTVNYMPPEAIKDMSSSRENGKSKSKISPKSDVWSLGCILYYMTYGKTPFQQIINQISKLHAIIDPNHEIEFPDIPEKDLQDVLKCCLKRDPKQRISIPELLAHPYVQIQTHPVNQMAKGTTEEMKYVLGQLVGLNSPNSILKAAKTLYEHYSGGESHNSSSSKTFEKKRGKK

SEQ ID NO: 330853 - protein, 139 aa, Artificial Sequence
  derived and/or modified sequence
MESEDLSGRELTIDSIMNKVRDIKNKFKNEDLTDELSLNKISADTTDNSGTVNQIMMMANNPEDWLSLLLKLEKNSVPLSDALLNKLIGRYSQAIEALPPDKYGQNESFARIQVRFAELKAIQEPDDARDYFQMARANC

SEQ ID NO: 330854 - protein, 176 aa, Artificial Sequence
  derived and/or modified sequence
MESEDLSGRELTIDSIMNKVRDIKNKFKNEDLTDELSLNKISADTTDNSGTVNQIMMMANNPEDWLSLLLKLEKNSVPLSDALLNKLIGRYSQAIEALPPDKYGQNESFARIQVRFAELKAIQEPDDARDYFQMARANCKKFAFVHISFAQFELSQGNVKKSKQLLQKAVERGAVP

SEQ ID NO: 330855 - protein, 150 aa, Artificial Sequence
  derived and/or modified sequence
MESEDLSGRELTIDSIMNKVRDIKNKFKNEDLTDELSLNKISADTTDNSGTVNQIMMMANNPEDWLSLLLKLEKNSVPLSDALLNKLIGRYSQAIEALPPDKYGQNESFARIQVRFAELKAIQEPDDARDYFQMARANCKKFAFVHISFA

SEQ ID NO: 330856 - DNA, 2574 bp, Artificial Sequence
  derived and/or modified sequence
atggagagcgaggacctgagcggcagagagctgaccatcgacagcatcatgaacaaggtgagagacatcaagaacaagttcaagaacgaggacctgaccgacgagctgagcctgaacaagatcagcgccgacaccaccgacaacagcggcaccgtgaaccagatcatgatgatggccaacaaccccgaggactggctgagcctgctgctgaagctggagaagaacagcgtgcccctgagcgacgccctgctgaacaagctgatcggcagatacagccaggccatcgaggccctgccccccgacaagtacggccagaacgagagcttcgccagaatccaggtgagattcgccgagctgaaggccatccaggagcccgacgacgccagagactacttccagatggccagagccaactgcaagaagttcgccttcgtgcacatcagcttcgcccagttcgagctgagccagggcaacgtgaagaagagcaagcagctgctgcagaaggccgtggagagaggcgccgtgcccctggagatgctggagatcgccctgagaaacctgaacctgcagaagaagcagctgctgagcgaggaggagaagaagaacctgagcgccagcaccgtgctgaccgcccaggagagcttcagcggcagcctgggccacctgcagaacagaaacaacagctgcgacagcagaggccagaccaccaaggccagattcctgtacggcgagaacatgcccccccaggacgccgagatcggctacagaaacagcctgagacagaccaacaagaccaagcagagctgccccttcggcagagtgcccgtgaacctgctgaacagccccgactgcgacgtgaagaccgacgacagcgtggtgccctgcttcatgaagagacagaccagcagaagcgagtgcagagacctggtggtgcccggcagcaagcccagcggcaacgacagctgcgagctgagaaacctgaagagcgtgcagaacagccacttcaaggagcccctggtgagcgacgagaagagcagcgagctgatcatcaccgacagcatcaccctgaagaacaagaccgagagcagcctgctggccaagctggaggagaccaaggagtaccaggagcccgaggtgcccgagagcaaccagaagcagtggcagagcaagagaaagagcgagtgcatcaaccagaaccccgccgccagcagcaaccactggcagatccccgagctggccagaaaggtgaacaccgagcagaagcacaccaccttcgagcagcccgtgttcagcgtgagcaagcagagcccccccatcagcaccagcaagtggttcgaccccaagagcatctgcaagacccccagcagcaacaccctggacgactacatgagctgcttcagaacccccgtggtgaagaacgacttcccccccgcctgccagctgagcaccccctacggccagcccgcctgcttccagcagcagcagcaccagatcctggccacccccctgcagaacctgcaggtgctggccagcagcagcgccaacgagtgcatcagcgtgaagggcagaatctacagcatcctgaagcagatcggcagcggcggcagcagcaaggtgttccaggtgctgaacgagaagaagcagatctacgccatcaagtacgtgaacctggaggaggccgacaaccagaccctggacagctacagaaacgagatcgcctacctgaacaagctgcagcagcacagcgacaagatcatcagactgtacgactacgagatcaccgaccagtacatctacatggtgatggagtgcggcaacatcgacctgaacagctggctgaagaagaagaagagcatcgacccctgggagagaaagagctactggaagaacatgctggaggccgtgcacaccatccaccagcacggcatcgtgcacagcgacctgaagcccgccaacttcctgatcgtggacggcatgctgaagctgatcgacttcggcatcgccaaccagatgcagcccgacaccaccagcgtggtgaaggacagccaggtgggcaccgtgaactacatgccccccgaggccatcaaggacatgagcagcagcagagagaacggcaagagcaagagcaagatcagccccaagagcgacgtgtggagcctgggctgcatcctgtactacatgacctacggcaagacccccttccagcagatcatcaaccagatcagcaagctgcacgccatcatcgaccccaaccacgagatcgagttccccgacatccccgagaaggacctgcaggacgtgctgaagtgctgcctgaagagagaccccaagcagagaatcagcatccccgagctgctggcccacccctacgtgcagatccagacccaccccgtgaaccagatggccaagggcaccaccgaggagatgaagtacgtgctgggccagctggtgggcctgaacagccccaacagcatcctgaaggccgccaagaccctgtacgagcactacagcggcggcgagagccacaacagcagcagcagcaagaccttcgagaagaagagaggcaagaagtag

SEQ ID NO: 330857 - DNA, 2574 bp, Artificial Sequence
  derived and/or modified sequence
atggaaagcgaggacctaagcggcagagagttaaccatcgattctattatgaacaaggtgcgagacattaaaaataagtttaaaaatgaagacctgacagacgagctgtctcttaacaagatttccgctgatacaaccgacaacagcgggaccgtcaatcaaattatgatgatggccaataaccctgaagactggctgtcgctgctgctaaagctcgagaaaaatagcgtccctctaagcgacgctctactgaacaaactaattggcaggtattctcaagccattgaagcgctgcctcccgataagtacgggcaaaatgaatcttttgcccgcatccaggtgcggttcgccgagttgaaagcaattcaggaaccagatgacgcgcgtgactacttccagatggcgagggccaactgcaagaagttcgcgttcgtccatatctctttcgcccagtttgaactatctcagggcaatgtgaagaagagcaagcagcttctgcagaaggcagtggaacgtggcgctgtgccgcttgagatgcttgagatcgcactgcgcaacctgaatctccaaaagaaacaattgctcagcgaggaagagaagaaaaacctctccgcatcaaccgtgctcactgcacaggaatctttcagcggatccctggggcacctgcaaaaccgcaacaactcctgcgactctagaggacagacgacaaaagctcggtttctgtacggggagaacatgcctccccaggatgccgaaatcgggtatcgaaattccctgcggcagacaaacaaaaccaaacaatcctgccccttcggccgggtaccagtgaacctgctgaactcacccgattgcgacgtgaagaccgacgacagcgtggtgccttgtttcatgaaaaggcagacctcacggagtgagtgccgggatctggtggtacctggctcaaagccatctggcaacgattcctgtgagctcaggaaccttaagagcgttcagaactcccacttcaaggagccgctggtctcggacgagaaatccagtgaactaattattaccgactcgattacccttaagaataagaccgagagctccttactggccaaactggaagaaacaaaggagtatcaggaacctgaggtgcccgagagcaatcaaaagcagtggcagtctaaacgaaaatcagagtgtattaaccaaaatcccgcagcatccagcaatcactggcaaatcccggagctggccagaaaagtcaataccgaacaaaagcatacaactttcgaacaaccagttttcagtgtgtccaaacagagtcccccaatcagcacgtccaagtggttcgatcccaaaagtatctgcaagacaccatcatcaaacactcttgatgactatatgtcttgttttcgcacacctgtcgtaaaaaacgactttcctcccgcctgtcagctcagcacaccttacgggcaacccgcttgtttccagcagcagcagcaccagattctggcaacacccttacagaaccttcaggtcctagcttcttctagtgcaaacgagtgtatctccgtgaagggccgcatttacagtattctgaaacagatcggctcgggcggttcttcgaaggtgtttcaggtcctcaacgaaaagaagcaaatctacgcaataaaatacgtgaatctcgaagaagctgacaaccagacactggattcgtataggaacgaaatcgcttacctgaataagttgcaacagcactcagataaaattatcagactctatgactatgaaattactgatcagtacatctatatggtgatggagtgcggtaatattgatcttaactcatggctcaagaagaagaagagcatagatccgtgggagcgcaagagctattggaagaatatgctcgaggccgtccatacaatacaccagcacggaatcgtgcacagcgacctgaaacctgcgaatttcctgatcgtggacgggatgctcaaacttattgactttggaatagcaaaccagatgcaacctgataccacctcagtggttaaggactcccaggtcgggactgtgaactacatgccgccagaggctatcaaagacatgagctcgagccgcgagaatgggaaatctaagtctaagatttcccccaagagtgacgtgtggagcctagggtgtatcctgtattacatgacctacgggaagaccccctttcagcagatcattaatcagatttctaagctgcatgcaattatcgacccaaatcatgaaatcgaattccccgatattccagagaaagacctccaggatgtgctgaaatgttgcttgaagcgggaccccaagcagcgaatttctatcccagagctgctcgcgcatccctacgtacagatccagacccacccggtcaaccagatggccaaaggcacgacagaggagatgaagtatgttctgggccaacttgtggggctgaactcaccgaattctatactaaaggctgccaagactttgtacgagcactattccgggggagaatcacacaatagttctagcagcaagactttcgagaagaaacgaggcaaaaagtag

SEQ ID NO: 330858 - DNA, 2574 bp, Artificial Sequence
  derived and/or modified sequence
atggagagcgaggacctgagcggccgggagctgaccatcgacagcatcatgaacaaggtgcgggacatcaagaacaagttcaagaatgaagacctgacagatgagctgagcctgaacaagatctctgctgacaccacagacaacagcggcaccgtgaaccagatcatgatgatggccaacaaccctgaggactggctgagcctgctgctgaagctggagaagaacagcgtgcccctgagtgatgccctgctgaacaagctgattggccgctacagccaggccatcgaggccctgcccccagacaagtatggccagaatgaaagctttgcccgcatccaggtgcgctttgctgagctgaaggccatccaggagccagatgatgcccgggactacttccagatggcccgggccaactgcaagaagtttgcctttgtgcacatcagctttgcccagtttgagctgagccagggcaatgtgaagaagagcaagcagctgctgcagaaggctgtggagagaggagctgtgcccctggagatgctggagatcgccctgaggaacctgaacctgcagaagaagcagctgctgtctgaggaggagaagaagaacctgagcgccagcacagtgctgacagcccaggagagcttcagcggcagcctgggccacctgcagaacagaaacaacagctgtgacagccggggccagaccaccaaggcccgcttcctgtatggagagaacatgccaccccaggatgctgagatcggctacagaaacagcctgcggcagaccaacaagaccaagcagagctgccccttcggccgggtgcctgtgaacctgctgaacagcccagactgtgatgtgaagacagatgattctgtggtgccctgcttcatgaagaggcagaccagccgctcagaatgtcgggacctggtggtgcccggcagcaagcccagcggaaatgacagctgtgagctgaggaacctgaagtctgtgcagaacagccacttcaaggagcccctggtgtctgatgagaagagcagcgagctgatcatcacagacagcatcaccctgaagaacaagacagagagcagcctgctggccaagctggaggagaccaaggagtaccaggagcctgaggtgcctgagagcaaccagaagcagtggcagagcaagaggaagtctgagtgcatcaaccagaacccagctgccagcagcaaccactggcagatccctgagctggccaggaaggtgaacacagagcagaagcacaccacctttgagcagcccgtcttctctgtgtccaagcagagcccccccatcagcaccagcaagtggtttgaccccaagagcatctgcaagacccccagcagcaacaccctggatgactacatgagctgcttccgcacccctgtggtgaagaatgacttccccccagcctgccagctgagcaccccctacggccagcctgcctgcttccagcagcagcagcaccagatcctggccacccccctgcagaacctgcaggtgctggccagcagcagcgccaatgaatgcatctctgtgaagggccgcatctacagcatcctgaagcagatcggcagcggcggcagcagcaaggtgttccaggtgctgaatgagaagaagcagatctatgccatcaagtatgtgaacctggaggaggccgacaaccagaccctggacagctacagaaatgagatcgcctacctgaacaagctgcagcagcacagcgacaagatcatccggctgtatgactatgagatcacagaccagtacatctacatggtgatggagtgtggcaacatcgacctgaacagctggctgaagaagaagaagagcattgacccctgggagaggaagagctactggaagaacatgctggaggccgtgcacaccatccaccagcacggcatcgtgcacagcgacctgaagccagccaacttcctgattgtggatggcatgctgaagctgattgactttggaattgccaaccagatgcagcctgacaccacctctgtggtgaaggacagccaggtgggcaccgtgaactacatgcctcctgaggccatcaaggacatgagcagcagcagagaaaatggcaagagcaagagcaagatcagccccaagagtgatgtgtggagcctgggctgcatcctgtactacatgacctacggcaagacccccttccagcagatcatcaaccagatcagcaagctgcacgccatcatcgaccccaaccacgagattgagttcccagacatccctgagaaggacctgcaggatgtgctgaagtgctgcctgaagagggaccccaagcagaggatcagcatccctgagctgctggcccacccctacgtgcagatccagacccaccctgtgaaccagatggccaagggcaccacagaggagatgaagtatgtgctgggccagctggtgggcctgaacagccccaacagcatcctgaaggccgccaagaccctgtatgagcactacagcggcggggagagccacaacagcagcagcagcaagacctttgagaagaagaggggcaagaagtag

SEQ ID NO: 330859 - DNA, 2574 bp, Artificial Sequence
  derived and/or modified sequence
atggagagcgaggacctgagcggccgggagctgaccatcgacagcataatgaacaaggtgcgagacatcaagaataaatttaagaatgaggatcttacagacgaactgagtctgaataaaatttctgcagataccactgacaattcaggcacggtgaaccagatcatgatgatggctaacaaccctgaggattggcttagtctgctcttgaaactcgagaagaatagcgtaccactgtcagacgcgctgctgaataaactgattggacggtactctcaggccatcgaggctttgccccccgacaagtacggccagaacgaaagcttcgcccgcattcaagtgcggttcgctgagctgaaagctatacaagaaccggacgacgccagggattatttccagatggcccgggctaattgtaagaaattcgcatttgtgcatatcagttttgctcagttcgaactgtcccagggcaatgttaagaagagcaagcagctgctgcagaaggccgtggagcggggcgccgtccctctcgagatgctcgagattgcacttcgtaatctcaacttacaaaagaagcaactgctgtctgaggaagaaaaaaagaacttgtcagccagcactgtattgacagcccaggaaagctttagtggaagcctcgggcatctgcaaaaccggaacaatagctgtgattctcgcggacagacaacaaaggctcggtttttgtatggagaaaatatgccaccccaagatgcagagattgggtaccgcaattcactgcgtcagacaaataaaactaagcaatcttgcccctttgggcgcgtaccagtgaacctgttaaatagtccagactgtgatgtcaaaacggatgattctgtggtgccctgctttatgaagaggcagacctctaggagcgaatgcagggatttggtcgtcccgggatcaaagccgtcaggaaatgactcatgtgaacttcgcaatctgaaatccgtgcagaatagccacttcaaagaacccctggtctccgatgagaagtcctctgaactgataattactgactccatcactctgaaaaataaaactgaatcttcccttctggctaaattagaagaaaccaaagagtaccaggagcccgaagtgcctgaaagcaaccagaagcaatggcagtcaaaacgcaagtcagagtgtatcaatcaaaacccagccgctagcagtaaccattggcagattccagaacttgcaaggaaagtgaacacagagcagaagcacactacattcgagcagcctgtgttttccgtctccaaacagtcccctcccatatctacctccaagtggttcgatcctaagagtatctgcaagaccccgtcatccaacacactggatgactatatgagttgcttcaggactcccgtggtgaagaacgacttcccgcctgcctgtcagctgtccactccttacggccaaccagcatgctttcagcagcagcagcaccagattctggccacccctttgcaaaatctgcaggtgcttgccagctcttcggccaacgaatgtattagcgtgaagggccggatttattcaatcctgaaacaaataggttctggcggtagcagcaaggtgtttcaggtattgaacgagaagaagcaaatctacgccatcaaatacgtgaacttggaggaagctgataatcagaccctggactcgtatcgaaacgaaatcgcatatctgaataagctccagcaacatagtgataaaataattaggctgtatgactacgaaattaccgatcagtacatctacatggttatggaatgtggcaacattgatctgaatagctggctgaaaaaaaaaaagtctattgatccgtgggagcgaaagagttattggaaaaatatgctcgaagctgttcacactatccatcaacatggcattgtccactctgacttgaaacccgcaaactttctaatcgttgacggaatgcttaaacttattgacttcggcatcgccaatcaaatgcagccagatacaacgagtgttgtaaaggactcacaagtgggtactgtgaactatatgcctccagaagcgattaaagacatgtcctcatccagggaaaatggcaagtctaaaagcaaaatctctcctaaatcagatgtgtggagcctgggttgcatcttgtactatatgacgtatggcaagaccccattccagcagatcatcaatcaaatctccaaactgcacgctatcatcgaccccaaccacgagatcgagttcccagacatccccgagaaagatctccaagacgttctgaagtgctgccttaagcgtgatcctaaacagcgaatttctatcccagagttactggctcacccttatgtgcagatccagacccacccggtgaatcagatggccaaagggacaacagaagagatgaagtacgtgctcgggcagcttgtgggcctcaactcccccaatagcattctcaaggcagccaagacactttacgagcactattcaggtggggaaagccataatagttcttcctcgaaaaccttcgagaaaaagcgaggtaagaaatag

SEQ ID NO: 330860 - DNA, 2574 bp, Artificial Sequence
  derived and/or modified sequence
atggagtccgaagatctgagtggcagggagttaaccatagatagcattatgaacaaggtgagagacattaagaacaagtttaagaatgaggatctcaccgacgaactgtcattgaataagatctcggccgatacaactgacaacagtggtacggtgaatcagatcatgatgatggctaataaccccgaagattggttatcgctgctcctcaagcttgaaaaaaactctgtcccactgtccgacgcactgctgaacaagctcattgggcgttactctcaggcgattgaagccctgccgcctgataaatacgggcagaacgagtccttcgccaggatacaggtgaggttcgctgaattaaaagcgattcaggagcccgacgatgctcgtgattactttcagatggcaagagccaattgcaaaaaatttgccttcgtccatatctccttcgcccagttcgagctgagccagggaaacgtcaaaaagagcaagcaactgctccagaaggctgtcgagaggggggcagttccactggagatgctcgagattgccctgcgcaacctcaacctgcagaaaaaacagctcctgagcgaggaggagaaaaagaacctgtcggcctcaactgttctgactgcccaagagagttttagcgggtcactcggtcacctgcagaatcgaaacaatagctgtgattccagaggtcagaccaccaaggcaaggtttctatacggggagaacatgcccccacaagatgctgaaatcggttaccgtaactccctgaggcagaccaataagacaaaacagagctgcccttttggaagagtgccagtgaatctcctaaacagtcctgactgtgatgttaaaaccgatgattccgttgtgccctgtttcatgaaaaggcagaccagtcggagtgaatgccgcgacctggtggtacctgggtcaaagcctagcggcaatgacagctgcgagctccggaatctgaaatctgtacagaatagccacttcaaggaacctttggtctccgacgagaagagcagtgagttgattattactgactctattacactgaagaataagaccgagtcctcactcctggccaagctggaggagactaaggagtatcaggagccagaagtgccagagagtaatcagaaacagtggcagagcaaaagaaagagtgaatgtattaatcagaaccctgcagcttcttcaaatcactggcaaatacctgaacttgcccgaaaagttaataccgagcagaagcataccactttcgaacagccggtgttctctgtttcaaagcagtcgcctcctataagcacctctaaatggttcgatccgaagtccatttgcaaaacgcccagttctaatacgctggacgactacatgtcatgtttcagaactccggtggttaaaaatgattttccacctgcctgccagctcagtacaccttatggacagcctgcatgctttcagcagcaacagcaccagatacttgccactcctctgcagaacttgcaggtgctggcctccagctccgccaacgagtgcatctcagttaaaggaagaatctacagtattctcaaacagattgggagcggcggtagctcaaaggtattccaggtgctgaatgaaaaaaaacagatttacgcaattaaatatgtcaatctggaagaggcagacaaccagacattggactcataccggaacgaaattgcttatctgaacaagctgcagcaacactctgataaaattattcgcctgtatgactatgagataactgaccagtacatttacatggtgatggaatgcgggaatatcgacttgaactcttggttgaagaagaagaaatccatcgacccttgggagaggaaaagttattggaaaaacatgctggaagcagtccataccatccaccagcacggcattgtgcactcggatcttaagccagccaacttccttatcgtcgatggaatgctcaaactcatagattttggcattgccaaccagatgcagccagatacaaccagtgtcgttaaggatagtcaagtggggacggttaattatatgcctcccgaggcgattaaggacatgagtagttctagggagaacggcaagtccaagagcaagatttctcccaaatctgacgtgtggtctctgggctgcatactctactatatgacatatggaaagaccccgttccagcagatcatcaaccagatcagtaaactacacgccattatagatccaaaccatgagatcgaattcccagacattccggagaaggacttacaagacgtcttgaagtgctgtctgaagcgagaccccaagcagcgaatcagcattccagaactcttggctcacccttatgttcagattcagacacaccccgttaatcagatggccaagggtacaaccgaggagatgaagtacgtgctaggtcagctcgtcgggctcaattcccctaatagcatcctgaaagccgcaaagaccctgtacgaacattacagcggaggcgaaagtcataacagcagctcgtcgaagaccttcgagaaaaagagagggaaaaaatag

SEQ ID NO: 330861 - DNA, 3010 bp, Artificial Sequence
  derived and/or modified sequence
agcattgaccaataggagaccgtagtgatagcgacggggaaattcaaacgtgtttgcggaaaggagtttgggttccatcttttcatttccccagcgcagctttctgtagaaatggaatccgaggatttaagtggcagagaattgacaattgattccataatgaacaaagtgagagacattaaaaataagtttaaaaatgaagaccttactgatgaactaagcttgaataaaatttctgctgatactacagataactcgggaactgttaaccaaattatgatgatggcaaacaacccagaggactggttgagtttgttgctcaaactagagaaaaacagtgttccgctaagtgatgctcttttaaataaattgattggtcgttacagtcaagcaattgaagcgcttcccccagataaatatggccaaaatgagagttttgctagaattcaagtgagatttgctgaattaaaagctattcaagagccagatgatgcacgtgactactttcaaatggccagagcaaactgcaagaaatttgcttttgttcatatatcttttgcacaatttgaactgtcacaaggtaatgtcaaaaaaagtaaacaacttcttcaaaaagctgtagaacgtggagcagtaccactagaaatgctggaaattgccctgcggaatttaaacctccaaaaaaagcagctgctttcagaggaggaaaagaagaatttatcagcatctacggtattaactgcccaagaatcattttccggttcacttgggcatttacagaataggaacaacagttgtgattccagaggacagactactaaagccaggtttttatatggagagaacatgccaccacaagatgcagaaataggttaccggaattcattgagacaaactaacaaaactaaacagtcatgcccatttggaagagtcccagttaaccttctaaatagcccagattgtgatgtgaagacagatgattcagttgtaccttgttttatgaaaagacaaacctctagatcagaatgccgagatttggttgtgcctggatctaaaccaagtggaaatgattcctgtgaattaagaaatttaaagtctgttcaaaatagtcatttcaaggaacctctggtgtcagatgaaaagagttctgaacttattattactgattcaataaccctgaagaataaaacggaatcaagtcttctagctaaattagaagaaactaaagagtatcaagaaccagaggttccagagagtaaccagaaacagtggcaatctaagagaaagtcagagtgtattaaccagaatcctgctgcatcttcaaatcactggcagattccggagttagcccgaaaagttaatacagagcagaaacataccacttttgagcaacctgtcttttcagtttcaaaacagtcaccaccaatatcaacatctaaatggtttgacccaaaatctatttgtaagacaccaagcagcaataccttggatgattacatgagctgttttagaactccagttgtaaagaatgactttccacctgcttgtcagttgtcaacaccttatggccaacctgcctgtttccagcagcaacagcatcaaatacttgccactccacttcaaaatttacaggttttagcatcttcttcagcaaatgaatgcatttcggttaaaggaagaatttattccatattaaagcagataggaagtggaggttcaagcaaggtatttcaggtgttaaatgaaaagaaacagatatatgctataaaatatgtgaacttagaagaagcagataaccaaactcttgatagttaccggaacgaaatagcttatttgaataaactacaacaacacagtgataagatcatccgactttatgattatgaaatcacggaccagtacatctacatggtaatggagtgtggaaatattgatcttaatagttggcttaaaaagaaaaaatccattgatccatgggaacgcaagagttactggaaaaatatgttagaggcagttcacacaatccatcaacatggcattgttcacagtgatcttaaaccagctaactttctgatagttgatggaatgctaaagctaattgattttgggattgcaaaccaaatgcaaccagatacaacaagtgttgttaaagattctcaggttggcacagttaattatatgccaccagaagcaatcaaagatatgtcttcctccagagagaatgggaaatctaagtcaaagataagccccaaaagtgatgtttggtccttaggatgtattttgtactatatgacttacgggaaaacaccatttcagcagataattaatcagatttctaaattacatgccataattgatcctaatcatgaaattgaatttcccgatattccagagaaagatcttcaagatgtgttaaagtgttgtttaaaaagggacccaaaacagaggatatccattcctgagctcctggctcatccatatgttcaaattcaaactcatccagttaaccaaatggccaagggaaccactgaagaaatgaaatatgttctgggccaacttgttggtctgaattctcctaactccattttgaaagctgctaaaactttatatgaacactatagtggtggtgaaagtcataattcttcatcctccaagacttttgaaaaaaaaaggggaaaaaaatgatttgcagttattcgtaatgtcagataccacctataaaatatattggactgttatactcttgaatccctgtggaaatctacatttgaagacaacatcactctgaagtgttatcagcaaaaaaaattcagtagattatctttaaaagaaaactgtaaaaatagcaaccacttatggcactgtatatattgtagacttgttttctctgttttatgctcttgtgtaatctacttgacatcattttactcttggaatagtgggtggatagcaagtatattctaaaaaactttgtaaataaagttttgtggctaaaatgacactaacattt

SEQ ID NO: 330862 - protein, 856 aa, Artificial Sequence
  derived and/or modified sequence
MESEDLSGRELTIDSIMNKVRDIKNKFKNEDLTDELSLNKISADTTDNSGTVNQIMMMANNPEDWLSLLLKLEKNSVPLSDALLNKLIGRYSQAIEALPPDKYGQNESFARIQVRFAELKAIQEPDDARDYFQMARANCKKFAFVHISFAQFELSQGNVKKSKQLLQKAVERGAVPLEMLEIALRNLNLQKKQLLSEEEKKNLSASTVLTAQESFSGSLGHLQNRNNSCDSRGQTTKARFLYGENMPPQDAEIGYRNSLRQTNKTKQSCPFGRVPVNLLNSPDCDVKTDDSVVPCFMKRQTSRSECRDLVVPGSKPSGNDSCELRNLKSVQNSHFKEPLVSDEKSSELIITDSITLKNKTESSLLAKLEETKEYQEPEVPESNQKQWQSKRKSECINQNPAASSNHWQIPELARKVNTEKHTTFEQPVFSVSKQSPPISTSKWFDPKSICKTPSSNTLDDYMSCFRTPVVKNDFPPACQLSTPYGQPACFQQQQHQILATPLQNLQVLASSSANECISVKGRIYSILKQIGSGGSSKVFQVLNEKKQIYAIKYVNLEEADNQTLDSYRNEIAYLNKLQQHSDKIIRLYDYEITDQYIYMVMECGNIDLNSWLKKKKSIDPWERKSYWKNMLEAVHTIHQHGIVHSDLKPANFLIVDGMLKLIDFGIANQMQPDTTSVVKDSQVGTVNYMPPEAIKDMSSSRENGKSKSKISPKSDVWSLGCILYYMTYGKTPFQQIINQISKLHAIIDPNHEIEFPDIPEKDLQDVLKCCLKRDPKQRISIPELLAHPYVQIQTHPVNQMAKGTTEEMKYVLGQLVGLNSPNSILKAAKTLYEHYSGGESHNSSSSKTFEKKRGKK

SEQ ID NO: 330863 - DNA, 420 bp, Artificial Sequence
  derived and/or modified sequence
atggagagcgaggacctgagcggcagagagctgaccatcgacagcatcatgaacaaggtgagagacatcaagaacaagttcaagaacgaggacctgaccgacgagctgagcctgaacaagatcagcgccgacaccaccgacaacagcggcaccgtgaaccagatcatgatgatggccaacaaccccgaggactggctgagcctgctgctgaagctggagaagaacagcgtgcccctgagcgacgccctgctgaacaagctgatcggcagatacagccaggccatcgaggccctgccccccgacaagtacggccagaacgagagcttcgccagaatccaggtgagattcgccgagctgaaggccatccaggagcccgacgacgccagagactacttccagatggccagagccaactgctag

SEQ ID NO: 330864 - DNA, 531 bp, Artificial Sequence
  derived and/or modified sequence
atggagagcgaggacctgagcggcagagagctgaccatcgacagcatcatgaacaaggtgagagacatcaagaacaagttcaagaacgaggacctgaccgacgagctgagcctgaacaagatcagcgccgacaccaccgacaacagcggcaccgtgaaccagatcatgatgatggccaacaaccccgaggactggctgagcctgctgctgaagctggagaagaacagcgtgcccctgagcgacgccctgctgaacaagctgatcggcagatacagccaggccatcgaggccctgccccccgacaagtacggccagaacgagagcttcgccagaatccaggtgagattcgccgagctgaaggccatccaggagcccgacgacgccagagactacttccagatggccagagccaactgcaagaagttcgccttcgtgcacatcagcttcgcccagttcgagctgagccagggcaacgtgaagaagagcaagcagctgctgcagaaggccgtggagagaggcgccgtgccctag

SEQ ID NO: 330865 - DNA, 453 bp, Artificial Sequence
  derived and/or modified sequence
atggagagcgaggacctgagcggcagagagctgaccatcgacagcatcatgaacaaggtgagagacatcaagaacaagttcaagaacgaggacctgaccgacgagctgagcctgaacaagatcagcgccgacaccaccgacaacagcggcaccgtgaaccagatcatgatgatggccaacaaccccgaggactggctgagcctgctgctgaagctggagaagaacagcgtgcccctgagcgacgccctgctgaacaagctgatcggcagatacagccaggccatcgaggccctgccccccgacaagtacggccagaacgagagcttcgccagaatccaggtgagattcgccgagctgaaggccatccaggagcccgacgacgccagagactacttccagatggccagagccaactgcaagaagttcgccttcgtgcacatcagcttcgcctag

SEQ ID NO: 330866 - DNA, 2571 bp, Artificial Sequence
  derived and/or modified sequence
atggagagcgaggacctgagcggcagagagctgaccatcgacagcatcatgaacaaggtgagagacatcaagaacaagttcaagaacgaggacctgaccgacgagctgagcctgaacaagatcagcgccgacaccaccgacaacagcggcaccgtgaaccagatcatgatgatggccaacaaccccgaggactggctgagcctgctgctgaagctggagaagaacagcgtgcccctgagcgacgccctgctgaacaagctgatcggcagatacagccaggccatcgaggccctgccccccgacaagtacggccagaacgagagcttcgccagaatccaggtgagattcgccgagctgaaggccatccaggagcccgacgacgccagagactacttccagatggccagagccaactgcaagaagttcgccttcgtgcacatcagcttcgcccagttcgagctgagccagggcaacgtgaagaagagcaagcagctgctgcagaaggccgtggagagaggcgccgtgcccctggagatgctggagatcgccctgagaaacctgaacctgcagaagaagcagctgctgagcgaggaggagaagaagaacctgagcgccagcaccgtgctgaccgcccaggagagcttcagcggcagcctgggccacctgcagaacagaaacaacagctgcgacagcagaggccagaccaccaaggccagattcctgtacggcgagaacatgcccccccaggacgccgagatcggctacagaaacagcctgagacagaccaacaagaccaagcagagctgccccttcggcagagtgcccgtgaacctgctgaacagccccgactgcgacgtgaagaccgacgacagcgtggtgccctgcttcatgaagagacagaccagcagaagcgagtgcagagacctggtggtgcccggcagcaagcccagcggcaacgacagctgcgagctgagaaacctgaagagcgtgcagaacagccacttcaaggagcccctggtgagcgacgagaagagcagcgagctgatcatcaccgacagcatcaccctgaagaacaagaccgagagcagcctgctggccaagctggaggagaccaaggagtaccaggagcccgaggtgcccgagagcaaccagaagcagtggcagagcaagagaaagagcgagtgcatcaaccagaaccccgccgccagcagcaaccactggcagatccccgagctggccagaaaggtgaacaccgagaagcacaccaccttcgagcagcccgtgttcagcgtgagcaagcagagcccccccatcagcaccagcaagtggttcgaccccaagagcatctgcaagacccccagcagcaacaccctggacgactacatgagctgcttcagaacccccgtggtgaagaacgacttcccccccgcctgccagctgagcaccccctacggccagcccgcctgcttccagcagcagcagcaccagatcctggccacccccctgcagaacctgcaggtgctggccagcagcagcgccaacgagtgcatcagcgtgaagggcagaatctacagcatcctgaagcagatcggcagcggcggcagcagcaaggtgttccaggtgctgaacgagaagaagcagatctacgccatcaagtacgtgaacctggaggaggccgacaaccagaccctggacagctacagaaacgagatcgcctacctgaacaagctgcagcagcacagcgacaagatcatcagactgtacgactacgagatcaccgaccagtacatctacatggtgatggagtgcggcaacatcgacctgaacagctggctgaagaagaagaagagcatcgacccctgggagagaaagagctactggaagaacatgctggaggccgtgcacaccatccaccagcacggcatcgtgcacagcgacctgaagcccgccaacttcctgatcgtggacggcatgctgaagctgatcgacttcggcatcgccaaccagatgcagcccgacaccaccagcgtggtgaaggacagccaggtgggcaccgtgaactacatgccccccgaggccatcaaggacatgagcagcagcagagagaacggcaagagcaagagcaagatcagccccaagagcgacgtgtggagcctgggctgcatcctgtactacatgacctacggcaagacccccttccagcagatcatcaaccagatcagcaagctgcacgccatcatcgaccccaaccacgagatcgagttccccgacatccccgagaaggacctgcaggacgtgctgaagtgctgcctgaagagagaccccaagcagagaatcagcatccccgagctgctggcccacccctacgtgcagatccagacccaccccgtgaaccagatggccaagggcaccaccgaggagatgaagtacgtgctgggccagctggtgggcctgaacagccccaacagcatcctgaaggccgccaagaccctgtacgagcactacagcggcggcgagagccacaacagcagcagcagcaagaccttcgagaagaagagaggcaagaagtag

SEQ ID NO: 330867 - DNA, 420 bp, Artificial Sequence
  derived and/or modified sequence
atggagtccgaagacctcagcggaagggagctcacaatcgatagcataatgaacaaagtgagggatatcaaaaataagttcaagaacgaagatttgactgacgaattatcgctcaataaaatcagtgctgatacaaccgataatagcggcactgttaatcagattatgatgatggcgaataatcccgaggattggctctccctcctcctcaaactggaaaaaaatagtgtccccctttcagacgcattgctaaacaaactgattggccgctacagtcaagccatcgaagccctgccacccgataagtacggacagaacgagtcatttgctaggattcaggtgcgctttgcggagctgaaagctattcaggaaccagacgacgctagagactatttccaaatggcgagggccaactgttag

SEQ ID NO: 330868 - DNA, 531 bp, Artificial Sequence
  derived and/or modified sequence
atggaatctgaggacctgtctgggcgagaattgaccatagatagcataatgaacaaggtgagagatattaagaataagtttaaaaatgaggacctgaccgacgagctttccctgaataagattagcgcggatactacggataattccggcacggtcaaccagatcatgatgatggccaataatcccgaagactggctgtcgttgctcctcaaactcgaaaaaaattccgtaccgctctccgacgccctgctgaataaacttatagggaggtactcgcaggctatagaagctttgccccctgataagtacggccagaacgaatctttcgcacgtatccaggtccgattcgcagaattaaaggctatacaggagcccgatgacgctcgcgactactttcagatggcacgcgctaattgtaaaaaatttgcgtttgtgcacattagtttcgcgcagttcgaacttagccagggaaatgtcaagaagagcaagcaactgctgcagaaagcagtggaacgcggagcagttccttag

SEQ ID NO: 330869 - DNA, 453 bp, Artificial Sequence
  derived and/or modified sequence
atggagtcagaggacctttcaggacgggagctgaccatcgattccattatgaataaggtgcgagacataaagaataaattcaagaatgaagacctcaccgacgaactgtccctgaataagatttcagccgataccacagacaattcagggacagtcaaccagattatgatgatggccaataaccctgaagactggctgtctctccttctgaaactagagaaaaactcagtccccctcagcgacgccttactgaacaaactgataggtcgctatagtcaagcaatagaagccctgccacctgataagtacgggcagaacgagtctttcgccagaattcaggttcgttttgccgagttgaaagctatacaggagcctgacgatgcccgcgactacttccagatggccagggccaactgtaagaagttcgccttcgtccacatttctttcgcgtag

SEQ ID NO: 330870 - DNA, 2571 bp, Artificial Sequence
  derived and/or modified sequence
atggaatccgaggatctgtcgggcagggagctcaccatcgacagtatcatgaacaaagtccgagacatcaaaaacaaattcaagaacgaagacctgactgacgagctgagtctgaataagatctccgcagacacaaccgataatagcggtacagtgaaccagattatgatgatggccaacaaccccgaagattggctgtctctcttgctgaaactcgagaagaattctgttcctctgtccgatgcactgctgaacaagctaatcgggaggtactctcaagcgatcgaggccctgcccccagacaagtatgggcagaatgaaagctttgccagaattcaggtgcggtttgccgaattgaaagctatacaggagcccgatgatgctagagactacttccagatggcacgggcaaattgtaaaaaatttgcttttgtgcacatctctttcgctcaatttgagctgtctcagggaaatgtgaaaaagtctaagcaactcctccagaaggctgtagagagaggcgccgtccctctagagatgctggagattgccctgaggaatcttaatctgcaaaagaaacaactgcttagtgaggaggagaagaagaacctgtctgcctccacagtactgaccgcccaggagtctttcagcggtagcctgggtcacctacaaaaccgaaataatagctgcgacagtcgagggcagacgactaaggcgaggttcttgtatggtgagaacatgcctccccaggacgctgagatcggatatcgcaatagtcttaggcagaccaataaaacgaaacagtcttgcccattcggccgcgtcccagtaaacctacttaactccccagactgtgacgttaagacggacgattccgttgtcccctgcttcatgaaaaggcagaccagcaggagtgaatgcagggatctagtggttccaggatccaaacccagcggcaacgacagttgcgagcttcgaaatcttaaaagtgtgcaaaactcacactttaaggaacccctggtctccgatgagaaaagttccgagctcatcatcaccgattccattacactcaaaaacaaaacggagtcttccctgcttgctaaactggaagagactaaggagtaccaggagcctgaagtaccggagtccaaccagaagcagtggcagtctaagcggaaaagtgagtgcatcaatcagaatcctgcagcctcatccaaccattggcagatcccagaactggccagaaaagtgaatacggaaaagcacaccacatttgagcagccagtattctctgtgtctaagcaatcgccacccatctccaccagtaaatggtttgacccaaagtcaatctgtaaaacaccgtcttcaaacaccctggatgattatatgtcctgtttcagaactccggttgtaaagaacgattttcctccagcctgccaattatccactccctatggccaacccgcatgttttcagcagcagcagcatcaaatcttagccaccccacttcagaacttgcaggtgctggcctcgtccagtgctaatgaatgtattagtgtcaaaggccggatttattctatcctgaaacagattggcagcggtggtagcagcaaagtcttccaggtgctaaacgagaagaagcagatctacgccatcaagtatgtgaatctagaggaggctgacaaccagacattagattcctataggaacgagatcgcatatttgaacaaactgcaacagcacagcgacaagattatcaggctgtatgattatgagataactgaccagtacatatacatggtgatggagtgcggtaatattgatctgaatagttggttgaagaaaaaaaaatccattgatccgtgggagcgcaagtcatactggaagaacatgcttgaagccgtgcacacgatacaccaacacggcattgttcatagcgacctgaagcctgcaaatttcctcatcgtggatggaatgcttaagctcattgatttcggtatcgcaaatcagatgcagccagacaccacgtcagtggtgaaggactcacaggtcggaacagtgaattacatgccccctgaggccataaaagacatgtcatcatcccgggagaacgggaaatccaagtctaagatatcccctaaaagcgatgtttggagcctgggttgcatcctgtactatatgacctatggcaagacaccgtttcagcagattatcaaccagatctcaaaactgcacgccatcatcgatcccaaccatgagattgagttcccagacataccggaaaaagatctacaggacgtgcttaaatgttgtcttaagcgggacccaaaacaacggatttcgattccagagctcttggcccatccatacgtgcaaatccagacacatccagtcaaccagatggccaaggggaccacagaggagatgaagtatgtgcttggacaacttgtaggcctaaattctccaaattccatcctcaaagcagcaaagacactgtatgaacattactccgggggcgagagccataactccagctcatcaaaaacattcgagaaaaaacgcggaaagaagtag

SEQ ID NO: 330871 - DNA, 420 bp, Artificial Sequence
  derived and/or modified sequence
atggagagcgaggacctgagcggccgggagctgaccatcgacagcatcatgaacaaggtgcgggacatcaagaacaagttcaagaatgaagacctgacagatgagctgagcctgaacaagatctctgctgacaccacagacaacagcggcaccgtgaaccagatcatgatgatggccaacaaccctgaggactggctgagcctgctgctgaagctggagaagaacagcgtgcccctgagtgatgccctgctgaacaagctgattggccgctacagccaggccatcgaggccctgcccccagacaagtatggccagaatgaaagctttgcccgcatccaggtgcgctttgctgagctgaaggccatccaggagccagatgatgcccgggactacttccagatggcccgggccaactgctag

SEQ ID NO: 330872 - DNA, 531 bp, Artificial Sequence
  derived and/or modified sequence
atggagagcgaggacctgagcggccgggagctgaccatcgacagcatcatgaacaaggtgcgggacatcaagaacaagttcaagaatgaagacctgacagatgagctgagcctgaacaagatctctgctgacaccacagacaacagcggcaccgtgaaccagatcatgatgatggccaacaaccctgaggactggctgagcctgctgctgaagctggagaagaacagcgtgcccctgagtgatgccctgctgaacaagctgattggccgctacagccaggccatcgaggccctgcccccagacaagtatggccagaatgaaagctttgcccgcatccaggtgcgctttgctgagctgaaggccatccaggagccagatgatgcccgggactacttccagatggcccgggccaactgcaagaagtttgcctttgtgcacatcagctttgcccagtttgagctgagccagggcaatgtgaagaagagcaagcagctgctgcagaaggctgtggagagaggagctgtgccctag

SEQ ID NO: 330873 - DNA, 453 bp, Artificial Sequence
  derived and/or modified sequence
atggagagcgaggacctgagcggccgggagctgaccatcgacagcatcatgaacaaggtgcgggacatcaagaacaagttcaagaatgaagacctgacagatgagctgagcctgaacaagatctctgctgacaccacagacaacagcggcaccgtgaaccagatcatgatgatggccaacaaccctgaggactggctgagcctgctgctgaagctggagaagaacagcgtgcccctgagtgatgccctgctgaacaagctgattggccgctacagccaggccatcgaggccctgcccccagacaagtatggccagaatgaaagctttgcccgcatccaggtgcgctttgctgagctgaaggccatccaggagccagatgatgcccgggactacttccagatggcccgggccaactgcaagaagtttgcctttgtgcacatcagctttgcctag

SEQ ID NO: 330874 - DNA, 2571 bp, Artificial Sequence
  derived and/or modified sequence
atggagagcgaggacctgagcggccgggagctgaccatcgacagcatcatgaacaaggtgcgggacatcaagaacaagttcaagaatgaagacctgacagatgagctgagcctgaacaagatctctgctgacaccacagacaacagcggcaccgtgaaccagatcatgatgatggccaacaaccctgaggactggctgagcctgctgctgaagctggagaagaacagcgtgcccctgagtgatgccctgctgaacaagctgattggccgctacagccaggccatcgaggccctgcccccagacaagtatggccagaatgaaagctttgcccgcatccaggtgcgctttgctgagctgaaggccatccaggagccagatgatgcccgggactacttccagatggcccgggccaactgcaagaagtttgcctttgtgcacatcagctttgcccagtttgagctgagccagggcaatgtgaagaagagcaagcagctgctgcagaaggctgtggagagaggagctgtgcccctggagatgctggagatcgccctgaggaacctgaacctgcagaagaagcagctgctgtctgaggaggagaagaagaacctgagcgccagcacagtgctgacagcccaggagagcttcagcggcagcctgggccacctgcagaacagaaacaacagctgtgacagccggggccagaccaccaaggcccgcttcctgtatggagagaacatgccaccccaggatgctgagatcggctacagaaacagcctgcggcagaccaacaagaccaagcagagctgccccttcggccgggtgcctgtgaacctgctgaacagcccagactgtgatgtgaagacagatgattctgtggtgccctgcttcatgaagaggcagaccagccgctcagaatgtcgggacctggtggtgcccggcagcaagcccagcggaaatgacagctgtgagctgaggaacctgaagtctgtgcagaacagccacttcaaggagcccctggtgtctgatgagaagagcagcgagctgatcatcacagacagcatcaccctgaagaacaagacagagagcagcctgctggccaagctggaggagaccaaggagtaccaggagcctgaggtgcctgagagcaaccagaagcagtggcagagcaagaggaagtctgagtgcatcaaccagaacccagctgccagcagcaaccactggcagatccctgagctggccaggaaggtgaacacagagaagcacaccacctttgagcagcctgtgttttctgtgtccaagcagagcccccccatcagcaccagcaagtggtttgaccccaagagcatctgcaagacccccagcagcaacaccctggatgactacatgagctgcttccgcacccctgtggtgaagaatgacttccccccagcctgccagctgagcaccccctacggccagcctgcctgcttccagcagcagcagcaccagatcctggccacccccctgcagaacctgcaggtgctggccagcagcagcgccaatgaatgcatctctgtgaagggccgcatctacagcatcctgaagcagatcggcagcggcggcagcagcaaggtgttccaggtgctgaatgagaagaagcagatctatgccatcaagtatgtgaacctggaggaggccgacaaccagaccctggacagctacagaaatgaaattgcctacctgaacaagctgcagcagcacagcgacaagatcatccggctgtatgactatgagatcacagaccagtacatctacatggtgatggagtgtggcaacatcgacctgaacagctggctgaagaagaagaagagcattgacccctgggagaggaagagctactggaagaacatgctggaggccgtgcacaccatccaccagcacggcatcgtgcacagcgacctgaagccagccaacttcctgattgtggatggcatgctgaagctgattgactttggcatcgccaaccagatgcagcctgacaccacctctgtggtgaaggacagccaggtgggcaccgtgaactacatgcctcctgaggccatcaaggacatgagcagcagccgggagaatggcaagagcaagagcaagatcagccccaagagtgatgtgtggagcctgggctgcatcctgtactacatgacctacggcaagacccccttccagcagatcatcaaccagatcagcaagctgcacgccatcatcgaccccaaccatgaaattgagttcccagacatccctgagaaggacctgcaggatgtgctgaagtgctgcctgaagagggaccccaagcagaggatcagcatccctgagctgctggcccacccctacgtgcagatccagacccaccctgtgaaccagatggccaagggcaccacagaggagatgaagtatgtgctgggccagctggtgggcctgaacagccccaacagcatcctgaaggccgccaagaccctgtatgagcactacagcggcggggagagccacaacagcagcagcagcaagacctttgagaagaagaggggcaagaagtag

SEQ ID NO: 330875 - DNA, 420 bp, Artificial Sequence
  derived and/or modified sequence
atggagagcgaggacctgagcggccgggagctgaccatcgacagcatcatgaacaaagtccgcgatattaaaaacaagttcaagaacgaagatctgacagacgagctttcactgaacaaaattagcgccgataccaccgataactctggtactgtcaaccagattatgatgatggcaaataatccagaagattggctctctctgctgctcaagctggaaaagaacagcgtccccctttcagacgcattactgaacaaactgatcggccgttatagtcaagcgatcgaagcactgcctcccgacaaatatggccagaatgaatccttcgccaggatccaggtcagatttgccgaactgaaagcaatccaggagccagatgatgcccgggattatttccagatggctcgcgccaattgttag

SEQ ID NO: 330876 - DNA, 531 bp, Artificial Sequence
  derived and/or modified sequence
atggagagcgaggacctgagcggccgggagctgaccatcgacagcataatgaacaaggtgcgggacatcaagaacaagtttaagaatgaggacctgacagatgagctgagcttaaataagatcagtgctgacactacagataattccggaaccgtgaatcaaattatgatgatggctaacaatccagaggattggctgtctctcctgctgaaactggaaaaaaattcagttccactctcggatgctctgttaaataagctcatcgggaggtactcccaggccattgaagccctaccgcccgataaatatggccagaatgagagttttgccagaatccaggtgcgttttgctgagctgaaggctattcaggaacccgacgatgccagggattactttcagatggcacgcgccaattgtaagaaattcgcctttgtccacatctcctttgctcaatttgagctcagccagggaaacgtaaagaagtctaagcagctgctccaaaaggccgtggaacggggcgccgtgccgtag

SEQ ID NO: 330877 - DNA, 453 bp, Artificial Sequence
  derived and/or modified sequence
atggagagcgaggacctgagcggccgggagctgaccatcgacagcatcatgaacaaggtgagagacatcaagaataagttcaagaacgaggacctcacagatgagttgagtttgaacaaaatcagtgctgacacgacagacaattccggcaccgtgaaccagattatgatgatggctaataatccagaggactggctgtcactgctgctgaaactcgagaagaactccgtgccgcttagtgacgcgctgctcaataaactgattggcaggtactctcaagcgatagaggcactcccacctgacaaatatggccagaatgagagttttgcaaggatccaggtgcgattcgccgagctcaaagccatccaagaaccagacgacgcacgtgactacttccaaatggcacgtgccaactgtaagaagtttgccttcgttcacatctcattcgcatag

SEQ ID NO: 330878 - DNA, 2571 bp, Artificial Sequence
  derived and/or modified sequence
atggagagcgaggacctgagcggccgggagctgaccatcgacagcatcatgaataaagtgagggacattaagaataagttcaagaacgaagaccttacagatgagttatctttgaacaagatatccgccgatactactgacaacagcggcactgtgaatcagatcatgatgatggccaataaccccgaggattggctgtctctgctcctcaagctagagaaaaattctgtcccactttccgatgccctgctcaacaaacttatcggccgatatagccaagcgattgaggcacttcctcccgataaatatggacagaacgagagtttcgctagaattcaggtgcgtttcgccgagcttaaagcgatccaagaacccgacgacgcacgtgactacttccaaatggcaagggcgaattgcaaaaagtttgcttttgtccatatctcctttgcccagttcgaactgtcacaggggaatgtcaaaaagtctaagcaattactccaaaaagcggtggaaagaggggcagtgccattggagatgctggagattgctttgagaaacctgaacctccagaagaaacaattactgtctgaagaagagaaaaagaatctgagcgcatctaccgtgttgactgcccaagagagctttagcgggtctctgggtcacttacaaaacagaaataattcctgcgacagtcgggggcagaccacaaaagcccgatttctatacggagagaacatgcctcctcaggacgctgagatcggatacagaaatagcctgagacaaaccaacaaaactaagcaaagttgtcccttcggccgcgtgccggtgaatcttttaaactccccggattgcgacgtgaagaccgatgactcagtggtgccgtgcttcatgaaacggcagactagtagaagcgagtgcagggacctcgtggtgcctggatctaagcccagcggaaatgactcttgtgaattgagaaacctgaaatctgtgcagaactcccattttaaggaaccactggtcagcgatgagaaatcatccgaacttattatcaccgacagcataacactcaaaaataagaccgaatcctcacttctggccaaactggaggagactaaggaatatcaggagcctgaggtgcccgagtccaaccagaagcaatggcaatccaaacggaagtccgagtgtatcaaccagaaccccgctgcctccagcaaccactggcaaattcccgaactggcaaggaaagttaatactgagaaacacactacattcgagcagcctgtgttttctgtcagcaaacagtcacccccgatctccaccagtaaatggttcgatccgaagtcaatttgtaaaactccgtcgtcaaacacactcgatgattacatgtcttgcttccgaacgcctgtcgttaagaacgactttcctccggcttgtcagctgagcacgccttatggccagccagcctgcttccagcaacaacagcatcaaatcttagctactccattgcagaaccttcaggtgcttgcctcaagcagcgccaatgaatgcatttccgtcaaagggcgaatctactctatcctcaaacagattgggtctggcggtagttccaaagtcttccaggtgttgaatgagaagaagcagatatatgcaatcaaatacgttaatctagaggaagcagacaatcagacgttagacagctatagaaatgaaattgcctaccttaataagctccaacagcattccgacaagataattcgcctctatgactatgagattaccgaccagtatatatacatggtcatggagtgtggaaatatagacctgaatagctggctgaagaagaaaaagtccatcgacccctgggaaagaaaaagttattggaaaaacatgctagaagctgttcataccatccatcaacacggaatcgtgcacagcgacctgaaaccagcgaacttcttgatcgtggacgggatgctgaaactgattgatttcggaatcgccaaccagatgcaaccagacacaaccagtgttgtgaaagattctcaagtggggaccgtgaactacatgccacccgaggcaatcaaggatatgtcttccagcagggagaacggcaaatccaagagcaagatcagtcccaagagcgacgtgtggtcgcttggctgcattttatactatatgacctacggcaagactcccttccagcagatcatcaatcagatctccaagctccacgcgataatagatccaaaccacgagattgagtttcccgacatccctgaaaaggacctccaggatgtgctgaaatgctgcctgaagcgcgatccaaaacaaagaattagtatccccgagttgctggcacatccttatgtgcagattcagacacatccagttaaccagatggcaaaggggaccacagaagagatgaaatacgtccttggccaactggtggggctgaattcacctaattctattctcaaagcagcaaaaactctatatgagcactactccggcggcgaaagtcataactcgtccagcagtaagacgttcgaaaagaaacgaggcaagaagtag

SEQ ID NO: 330879 - DNA, 420 bp, Artificial Sequence
  derived and/or modified sequence
atggaatctgaggacctgtcagggagagagctcacaattgattctattatgaataaggtgagggacatcaagaataagtttaagaacgaagacctgaccgacgagctatccttgaataagatctctgctgacactaccgataattccggcaccgtgaaccagattatgatgatggctaataatccagaggattggctgagccttcttctgaagctcgagaaaaacagcgtgccacttagtgacgcactcttgaataagttaatcgggcgttactcacaggcgattgaggctctcccccctgacaagtacggccaaaatgagagcttcgcaaggatacaagtaaggttcgccgagctgaaagccattcaagaaccggatgacgcacgggactactttcagatggcccgagctaattgctag

SEQ ID NO: 330880 - DNA, 531 bp, Artificial Sequence
  derived and/or modified sequence
atggaatccgaggatctgagcggccgtgagctcacaatagattcaattatgaacaaagttagggatattaaaaacaagtttaaaaatgaagatctaaccgatgaactaagtctcaataaaattagcgccgacaccactgataacagcggcacagtgaaccaaattatgatgatggcaaacaatcctgaagactggctgtcattgctgttgaagcttgaaaagaattctgtccccctttcagatgccctgcttaacaagctgattgggcgatacagccaggccattgaagccttgccccctgacaaatatggacagaacgaaagcttcgccagaattcaggttcgattcgctgaactcaaagcgatccaggagcccgacgacgccagggattattttcagatggcaagagctaactgtaagaaatttgcatttgtgcacatcagtttcgcacagttcgaattaagccaaggcaatgttaaaaagtctaaacagcttctgcagaaagctgttgagcgcggagcagtcccgtag

SEQ ID NO: 330881 - DNA, 453 bp, Artificial Sequence
  derived and/or modified sequence
atggagtctgaggatctcagcgggagagagctgactatcgactcaatcatgaacaaggtgagagacatcaagaacaagttcaagaacgaagatcttacggatgaactatcactcaataagatatccgccgatacaacagataattccggcacggtgaaccagatcatgatgatggccaataatcctgaggactggctgtcccttctgctgaagttggagaaaaatagcgtacctttgagtgatgccctgctgaacaaactcattggtcggtactctcaggcaattgaggcattgccccctgataagtacggacaaaacgaatcattcgctagaattcaggttcgatttgctgagctaaaagctatccaagagcccgacgacgctagagattacttccaaatggccagggcgaattgcaaaaagtttgcttttgtccatatctccttcgcatag

SEQ ID NO: 330882 - DNA, 2571 bp, Artificial Sequence
  derived and/or modified sequence
atggagagcgaagatttgagcggcagggagctgaccatagattcaatcatgaacaaagtgagggacatcaaaaataagttcaaaaacgaagacctgacagacgaactgtccttaaacaaaatttcagcggacacaaccgacaacagcgggactgtgaaccaaataatgatgatggcgaacaaccccgaggactggctatccctgcttctcaagctcgaaaagaactccgttcccttgtctgacgccttattgaataaacttattggccgatatagtcaggccatcgaagcactgccccctgacaagtatggccagaacgaatccttcgctcgtatacaggttcgcttcgcagaactgaaggccattcaggaacccgacgacgctcgggattactttcagatggcgcgtgctaattgtaagaagttcgccttcgtgcatatatcatttgctcagtttgaactgtcacaggggaacgttaaaaagagcaagcagctactacagaaagcggtcgagcggggtgctgtacctctcgagatgctcgaaatcgccctgaggaacctgaacttacagaagaaacagctgcttagcgaggaggagaaaaaaaacctcagcgccagcacagtgctcaccgctcaggagagtttttcaggttccttgggacatctccagaaccggaacaattcctgtgactcgcggggacaaactaccaaagcacgatttttatatggcgaaaacatgccaccccaagacgctgaaatagggtatcgtaattccctgaggcagacaaacaagacgaagcagtcatgcccctttggcagggtcccggtgaatctgttgaactcacccgattgcgatgtcaagacagacgatagcgtggttccctgttttatgaagcggcagaccagccgcagcgagtgcagggatctggtggtccccggttccaagccctctggaaatgacagctgtgagctccggaacctgaaaagcgtgcaaaacagccacttcaaagagcccctggtctccgatgaaaagtcctccgaactgattataacggatagcataactcttaagaataagacggaaagcagccttctagccaaactagaagagacgaaagaataccaagaacctgaggtacctgagtcaaaccagaaacagtggcaaagcaagagaaaatcggaatgtattaaccaaaaccccgcagccagctcaaaccattggcagatcccagaactggcacgaaaggtcaataccgagaagcatactacgttcgaacaacctgtcttcagtgtcagcaagcagagtccgcctatctccacaagcaagtggtttgaccccaaatccatatgcaaaactccaagttccaatacactcgacgattatatgtcctgttttcgaacgcccgtcgttaagaatgatttccccccagcctgtcagctgtccacaccatatgggcagcccgcttgttttcagcaacagcagcatcagatactcgctacccctctgcagaatctccaggttctagcttcaagtagcgccaacgaatgcatctccgtcaaaggacggatctatagcatcctgaagcagattgggagcgggggatcatctaaggtcttccaggtgcttaatgaaaagaagcaaatttacgcaattaaatacgtgaatctggaggaggcagacaaccagacgctggacagctatcgtaatgaaattgcctacttgaacaaattgcagcagcactccgacaaaattatcagattatacgactacgagatcactgatcagtatatttacatggttatggaatgcggcaacattgacttaaacagttggctgaaaaagaagaagagtatcgacccgtgggaacggaaaagttattggaagaatatgcttgaggccgtccacacgatccaccaacacgggattgtgcactcagatctgaagcccgctaactttcttattgttgatggcatgttgaaactaatcgactttggaatcgctaaccagatgcaacctgatactacgtccgttgtaaaagattcccaggtcgggactgtgaactacatgcctcccgaagctatcaaagacatgtcatctagccgcgagaatggtaagtcgaaatctaaaatctcccctaagagcgatgtgtggtcacttgggtgcattctgtattacatgacatatggaaaaactcctttccaacagatcattaaccagatcagcaaacttcacgcaataatagaccccaaccacgagattgaattccctgatatccctgaaaaggatctccaggatgttttgaagtgttgcctcaagcgagatccaaaacagcggatctcaatcccagaactgctggcacacccttacgttcagattcagacccacccagtgaaccagatggccaagggcactacagaggaaatgaagtatgttctcggccagctcgtgggcctgaattccccaaatagtattctgaaagcggctaaaaccctttatgagcattatagcgggggagaatcacacaactcaagttcctctaaaaccttcgagaagaagcgcggaaaaaagtag

SEQ ID NO: 330883 - DNA, 541 bp, Artificial Sequence
  derived and/or modified sequence
gtaggtaagttctgtcttaccggtgcaccggcgcactgaggaacagccgcagccggtgtaggggctcattgttagcgctggtcggtgaggggtggggcgaggtgggggcagctcggagccagaaatggaatccgaggatttaagtggcagagaattgacaattgattccataatgaacaaagtgagagacattaaaaataagtttaaaaatgaagaccttactgatgaactaagcttgaataaaatttctgctgatactacagataactcgggaactgttaaccaaattatgatgatggcaaacaacccagaggactggttgagtttgttgctcaaactagagaaaaacagtgttccgctaagtgatgctcttttaaataaattgattggtcgttacagtcaagcaattgaagcgcttcccccagataaatatggccaaaatgagagttttgctagaattcaagtgagatttgctgaattaaaagctattcaagagccagatgatgcacgtgactactttcaaatggccagagcaaactgc

SEQ ID NO: 330884 - DNA, 569 bp, Artificial Sequence
  derived and/or modified sequence
agttaaagtaggagttatgactgttcagtttttttcttagaaatggaatccgaggatttaagtggcagagaattgacaattgattccataatgaacaaagtgagagacattaaaaataagtttaaaaatgaagaccttactgatgaactaagcttgaataaaatttctgctgatactacagataactcgggaactgttaaccaaattatgatgatggcaaacaacccagaggactggttgagtttgttgctcaaactagagaaaaacagtgttccgctaagtgatgctcttttaaataaattgattggtcgttacagtcaagcaattgaagcgcttcccccagataaatatggccaaaatgagagttttgctagaattcaagtgagatttgctgaattaaaagctattcaagagccagatgatgcacgtgactactttcaaatggccagagcaaactgcaagaaatttgcttttgttcatatatcttttgcacaatttgaactgtcacaaggtaatgtcaaaaaaagtaaacaacttcttcaaaaagctgtagaacgtggagcagtacc

SEQ ID NO: 330885 - DNA, 549 bp, Artificial Sequence
  derived and/or modified sequence
atgcgacgcggctaaacgagctggagggggaggggatgtctcactgcctcagcgggtctggccggtggggtgatgcaggaggttttgttgaggaaaaatggaatccgaggatttaagtggcagagaattgacaattgattccataatgaacaaagtgagagacattaaaaataagtttaaaaatgaagaccttactgatgaactaagcttgaataaaatttctgctgatactacagataactcgggaactgttaaccaaattatgatgatggcaaacaacccagaggactggttgagtttgttgctcaaactagagaaaaacagtgttccgctaagtgatgctcttttaaataaattgattggtcgttacagtcaagcaattgaagcgcttcccccagataaatatggccaaaatgagagttttgctagaattcaagtgagatttgctgaattaaaagctattcaagagccagatgatgcacgtgactactttcaaatggccagagcaaactgcaagaaatttgcttttgttcatatatcttttgcaca

SEQ ID NO: 330886 - DNA, 3477 bp, Artificial Sequence
  derived and/or modified sequence
aaaaagcactgaaattcttgagctggcggcagggctgaacgtagctcagtgaaagatcctttcttgccacatcctctctaagccaggctgtgagaaccgcgggaaacgaaggagaagggtggcggtggggtcagtaaagggccggcccaaggtgcatcttttaggtcctgatgctaggagcagccgtccctgcccctatattcctctcactgggtaggtttgctcgggagtggctacctcccaggcaaaaattcggcctggttaaactggaaagaccaggaaagcccgcccacgggcgtccggggaacgcctgcaaagtgccagcaccctaccaacccaggcgccgcacgggtggggtcgcggccgcaggctcttccggggcgggcctagcctgacgcaggaggaggggcggcccccgtcgcacaagaaccaatcacgactgtcgcttctacgtggctagcattgaccaataggagaccgtagtgatagcgacggggaaattcaaacgtgtttgcggaaaggagtttgggttccatcttttcatttccccagcgcagctttctgtagtttttttcttagaaatggaatccgaggatttaagtggcagagaattgacaattgattccataatgaacaaagtgagagacattaaaaataagtttaaaaatgaagaccttactgatgaactaagcttgaataaaatttctgctgatactacagataactcgggaactgttaaccaaattatgatgatggcaaacaacccagaggactggttgagtttgttgctcaaactagagaaaaacagtgttccgctaagtgatgctcttttaaataaattgattggtcgttacagtcaagcaattgaagcgcttcccccagataaatatggccaaaatgagagttttgctagaattcaagtgagatttgctgaattaaaagctattcaagagccagatgatgcacgtgactactttcaaatggccagagcaaactgcaagaaatttgcttttgttcatatatcttttgcacaatttgaactgtcacaaggtaatgtcaaaaaaagtaaacaacttcttcaaaaagctgtagaacgtggagcagtaccactagaaatgctggaaattgccctgcggaatttaaacctccaaaaaaagcagctgctttcagaggaggaaaagaagaatttatcagcatctacggtattaactgcccaagaatcattttccggttcacttgggcatttacagaataggaacaacagttgtgattccagaggacagactactaaagccaggtttttatatggagagaacatgccaccacaagatgcagaaataggttaccggaattcattgagacaaactaacaaaactaaacagtcatgcccatttggaagagtcccagttaaccttctaaatagcccagattgtgatgtgaagacagatgattcagttgtaccttgttttatgaaaagacaaacctctagatcagaatgccgagatttggttgtgcctggatctaaaccaagtggaaatgattcctgtgaattaagaaatttaaagtctgttcaaaatagtcatttcaaggaacctctggtgtcagatgaaaagagttctgaacttattattactgattcaataaccctgaagaataaaacggaatcaagtcttctagctaaattagaagaaactaaagagtatcaagaaccagaggttccagagagtaaccagaaacagtggcaatctaagagaaagtcagagtgtattaaccagaatcctgctgcatcttcaaatcactggcagattccggagttagcccgaaaagttaatacagagaaacataccacttttgagcaacctgtcttttcagtttcaaaacagtcaccaccaatatcaacatctaaatggtttgacccaaaatctatttgtaagacaccaagcagcaataccttggatgattacatgagctgttttagaactccagttgtaaagaatgactttccacctgcttgtcagttgtcaacaccttatggccaacctgcctgtttccagcagcaacagcatcaaatacttgccactccacttcaaaatttacaggttttagcatcttcttcagcaaatgaatgcatttcggttaaaggaagaatttattccatattaaagcagataggaagtggaggttcaagcaaggtatttcaggtgttaaatgaaaagaaacagatatatgctataaaatatgtgaacttagaagaagcagataaccaaactcttgatagttaccggaacgaaatagcttatttgaataaactacaacaacacagtgataagatcatccgactttatgattatgaaatcacggaccagtacatctacatggtaatggagtgtggaaatattgatcttaatagttggcttaaaaagaaaaaatccattgatccatgggaacgcaagagttactggaaaaatatgttagaggcagttcacacaatccatcaacatggcattgttcacagtgatcttaaaccagctaactttctgatagttgatggaatgctaaagctaattgattttgggattgcaaaccaaatgcaaccagatacaacaagtgttgttaaagattctcaggttggcacagttaattatatgccaccagaagcaatcaaagatatgtcttcctccagagagaatgggaaatctaagtcaaagataagccccaaaagtgatgtttggtccttaggatgtattttgtactatatgacttacgggaaaacaccatttcagcagataattaatcagatttctaaattacatgccataattgatcctaatcatgaaattgaatttcccgatattccagagaaagatcttcaagatgtgttaaagtgttgtttaaaaagggacccaaaacagaggatatccattcctgagctcctggctcatccatatgttcaaattcaaactcatccagttaaccaaatggccaagggaaccactgaagaaatgaaatatgttctgggccaacttgttggtctgaattctcctaactccattttgaaagctgctaaaactttatatgaacactatagtggtggtgaaagtcataattcttcatcctccaagacttttgaaaaaaaaaggggaaaaaaatgatttgcagttattcgtaatgtcagataccacctataaaatatattggactgttatactcttgaatccctgtggaaatctacatttgaagacaacatcactctgaagtgttatcagcaaaaaaaattcagtagattatctttaaaagaaaactgtaaaaatagcaaccacttatggcactgtatatattgtagacttgttttctctgttttatgctcttgtgtaatctacttgacatcattttactcttggaatagtgggtggatagcaagtatattctaaaaaactttgtaaataaagttttgtggctaaaatgacactaacattt

SEQ ID NO: 330887 - protein, 251 aa, Artificial Sequence
  derived and/or modified sequence
  misc_feature (1)..(1): Xaa can be any naturally occurring amino acid
XIGLMSLSKGLLEEKYRYLFKEVAGPTEMCDQRQLGLLLHDAIQIPRQLGEVAAFGGSNIEPSVRSCFQQNNNKPEISVKEFIDWMHLEPQSMVWLPVLHRVAAAETAKHQAKCNICKECPIVGFRYRSLKHFNYDVCQSCFFSGRTAKGHKLHYPMVEYCIPTTSGEDVRDFTKVLKNKFRSKKYFAKHPRLGYLPVQTVLEGDNLETPSQSPQLFHDDTHSRIEQYATRLAQMERTNGSFLTDSSSTTG

SEQ ID NO: 330888 - protein, 184 aa, Artificial Sequence
  derived and/or modified sequence
MHLEPQSMVWLPVLHRVAAAETAKHQAKCNICKECPIVGFRYRSLKHFNYDVCQSCFFSGRTAKGHKLHYPMVEYCIPTTSGEDVRDFTKVLKNKFRSKKYFAKHPRLGYLPVQTVLEGDNLETPSQSPQLFHDDTHSRIEQYATRLAQMERTNGSFLTDSSSTTGSVEDEHALIQQYCQTLGG

SEQ ID NO: 330889 - protein, 186 aa, Artificial Sequence
  derived and/or modified sequence
MLEEEEWYRSLKHFNYDVCQSCFFSGRTAKGHKLHYPMVEYCIPTTSGEDVRDFTKVLKNKFRSKKYFAKHPRLGYLPVQTVLEGDNLETPSQSPQLFHDDTHSRIEQYATRLAQMERTNGSFLTDSSSTTGSVEDEHALIQQYCQTLGGESPVSQPQSPAQILKSVEREERGELERIIADLEEEQ

SEQ ID NO: 330890 - DNA, 561 bp, Artificial Sequence
  derived and/or modified sequence
atgctggaggaggaggagtggtacagaagcctgaagcacttcaactacgacgtgtgccagagctgcttcttcagcggcagaaccgccaagggccacaagctgcactaccccatggtggagtactgcatccccaccaccagcggcgaggacgtgagagacttcaccaaggtgctgaagaacaagttcagaagcaagaagtacttcgccaagcaccccagactgggctacctgcccgtgcagaccgtgctggagggcgacaacctggagacccccagccagagcccccagctgttccacgacgacacccacagcagaatcgagcagtacgccaccagactggcccagatggagagaaccaacggcagcttcctgaccgacagcagcagcaccaccggcagcgtggaggacgagcacgccctgatccagcagtactgccagaccctgggcggcgagagccccgtgagccagccccagagccccgcccagatcctgaagagcgtggagagagaggagagaggcgagctggagagaatcatcgccgacctggaggaggagcagtag

SEQ ID NO: 330891 - DNA, 561 bp, Artificial Sequence
  derived and/or modified sequence
atgctagaagaggaggagtggtaccgatccctgaaacatttcaactatgatgtgtgccagagctgctttttttctggaagaactgccaaggggcacaaactccactacccgatggttgaatactgcattccaaccacatccggggaagacgtgcgggacttcaccaaagtgctcaaaaacaagttccgaagtaagaaatacttcgccaagcatccaaggctcgggtacctgcctgttcagactgtgcttgagggagataacctggagaccccttcccaatccccgcagctttttcacgacgatacccatagtcgcatcgagcagtacgccacgagattagcccaaatggaacggaccaacggctcttttctcaccgactcgtccagtactaccggcagcgttgaggacgaacacgcactgattcagcagtattgtcagacactgggcggagagtcaccagtaagccagccccagagcccagcgcagatccttaagagcgtggagcgcgaggagcgcggggaattagagcgaataattgcagatctcgaggaagagcaatag

SEQ ID NO: 330892 - DNA, 561 bp, Artificial Sequence
  derived and/or modified sequence
atgctggaggaggaggagtggtaccgcagcctgaagcacttcaactatgatgtgtgccagagctgcttcttcagcggccgcacagccaagggccacaagctgcactaccccatggtggagtactgcatccccaccaccagcggagaagatgtgcgggacttcaccaaggtgctgaagaacaagttccgcagcaagaagtactttgccaagcacccccggctgggctacctgcctgtgcagacagtgctggagggggacaacctggagacccccagccagagcccccagctgttccatgatgacacccacagccgcatcgagcagtatgccacccggctggcccagatggagaggaccaacggcagcttcctgacagacagcagcagcaccactggatctgtggaggatgagcacgccctgatccagcagtactgccagaccctgggcggggagagccctgtgtcccagccccagagccctgcccagatcctgaagtctgtggagcgggaggagcggggggagctggagcgcatcatcgctgacctggaggaggagcagtag

SEQ ID NO: 330893 - DNA, 561 bp, Artificial Sequence
  derived and/or modified sequence
atgctggaggaggaggagtggtaccggagcctgaagcacttcaactatgacgtttgccagagctgtttcttttcagggcggactgctaagggccacaaactccactatcctatggttgagtattgtatccctaccacctcaggagaggacgttagggactttaccaaggtgctgaagaacaagttccggagtaaaaaatatttcgcaaagcacccaaggctaggttacctgccggtgcagacagtgctggagggagataatttggagactcccagtcagtctccccagctattccacgatgatacacacagccgcattgagcagtatgccactcggttggctcaaatggaaagaaccaatggatcctttctaaccgactcaagctccaccacgggctcagtggaagacgagcacgccctaatccagcagtattgccagacgttgggcggtgagtctccagtctcacagcctcagtctccagctcagatcctcaagagtgtggaacgagaagaaaggggtgaactagagaggatcatcgcagatctcgaagaggaacaatag

SEQ ID NO: 330894 - DNA, 561 bp, Artificial Sequence
  derived and/or modified sequence
atgctggaggaggaagagtggtatcggagtctcaagcactttaattacgacgtttgccagtcgtgtttcttttctggcagaactgccaaaggtcataagctgcattaccctatggtagaatactgcattcccactacttccggcgaggacgtgcgcgacttcactaaagttctaaagaacaagttcaggagtaagaagtactttgcaaagcaccctcgactaggctacctccctgtccaaactgtgctggagggcgacaacctcgaaactccttcacagagtcctcagctgtttcatgacgacacacactcccgaatcgaacaatacgcgacccgattggctcagatggagagaacaaacggttcttttcttacagactcttcctccacaacgggctctgttgaagacgagcatgccctgatccagcagtattgccagaccctgggtggggagagccctgtgagccaaccccagtcacccgctcaaatcctcaagagcgtcgagagagaggagcgtggcgagctggaaagaatcattgcggatctagaggaagagcagtag

SEQ ID NO: 330895 - DNA, 633 bp, Artificial Sequence
  derived and/or modified sequence
gtgaagtagagtgagcattagcctggcagacagctagggtaatagatgacttccagtggaagtcaaagcacaaatgttggaagaagaagaatggtatagaagccttaagcattttaactatgatgtctgccagagttgtttcttttcgggtcgaacagcaaaaggtcacaaattacattacccaatggtggaatattgtatacctacaacatctggggaagatgtacgagacttcacaaaggtacttaagaacaagttcaggtcgaagaagtactttgccaaacaccctcgacttggttacctgcctgtccagacagttcttgaaggtgacaacttagagaccccctcacaatctcctcaactgtttcatgatgacacccattcaagaatagaacaatatgccacacgactggcccagatggaaaggactaatgggtcttttctcactgatagcagctccaccacaggaagtgtggaagacgagcacgccctcatccagcagtattgccaaacactcggaggagagtccccagtgagccagccgcagagcccagctcagatcctgaagtcagtagagagggaagaacgtggagaactggagaggatcattgctgacctggaggaagaacaaag

SEQ ID NO: 330896 - protein, 988 aa, Artificial Sequence
  derived and/or modified sequence
MQILRCLQKCGKLKMMAVVRTSLQKVVVLLHRLQRMAVSSPRYQKLCKDIQAEIDAHNDIFKSIDGNRQKMVKALGNSEEATMLQHRLDDMNQRWNDLKAKSASIRAHLEASAEKWNRLLMSLEELIKWLNMKDEELKKQMPIGGDVPALQLQYDHCKALRRELKEKEYSVLNAVDQARVFLADQPIEAPEEPRRNLQSKTELTPEERAQKIAKAMRKQSSEVKEKWESLNAVTSNWQKQVDKALEKLRDLQGAMDDLDADMKEAESVRNGWKPVGDLLIDSLQDHIEKIMAFREEIAPINFKVKTVNDLSSQLSPLDLHPSLKMSRQLDDLNMRWKLLQVSVDDRLKQLQEAHRDFGPSSQHFLSTSVQLPWQRSISHNKVPYYINHQTQTTCWDHPKMTELFQSLADLNNVRFSAYRTAIKIRRLQKALCLDLLELSTTNEIFKQHKLNQNDQLLSVPDVINCLTTTYDGLEQMHKDLVNVPLCVDMCLNWLLNVYDTGRTGKIRVQSLKIGLMSLSKGLLEEKYRYLFKEVAGPTEMCDQRQLGLLLHDAIQIPRQLGEVAAFGGSNIEPSVRSCFQQNNNKPEISVKEFIDWMHLEPQSMVWLPVLHRVAAAETAKHQAKCNICKECPIVGFRYRSLKHFNYDVCQSCFFSGRTAKGHKLHYPMVEYCIPTTSGEDVRDFTKVLKNKFRSKKYFAKHPRLGYLPVQTVLEGDNLETPITLISMWPEHYDPSQSPQLFHDDTHSRIEQYATRLAQMERTNGSFLTDSSSTTGSVEDEHALIQQYCQTLGGESPVSQPQSPAQILKSVEREERGELERIIADLEEEQRNLQVEYEQLKDQHLRRGLPVGSPPESIISPHHTSEDSELIAEAKLLRQHKGRLEARMQILEDHNKQLESQLHRLRQLLEQPESDSRINGVSPWASPQHSALSYSLDPDASGPQFHQAAGEDLLAPPHDTSTDLTEVMEQIHSTFPSCCPNVPSRPQAM

SEQ ID NO: 330897 - DNA, 2967 bp, Artificial Sequence
  derived and/or modified sequence
atgcagatcctgagatgcctgcagaagtgcggcaagctgaagatgatggccgtggtgagaaccagcctgcagaaggtggtggtgctgctgcacagactgcagagaatggccgtgagcagccccagataccagaagctgtgcaaggacatccaggccgagatcgacgcccacaacgacatcttcaagagcatcgacggcaacagacagaagatggtgaaggccctgggcaacagcgaggaggccaccatgctgcagcacagactggacgacatgaaccagagatggaacgacctgaaggccaagagcgccagcatcagagcccacctggaggccagcgccgagaagtggaacagactgctgatgagcctggaggagctgatcaagtggctgaacatgaaggacgaggagctgaagaagcagatgcccatcggcggcgacgtgcccgccctgcagctgcagtacgaccactgcaaggccctgagaagagagctgaaggagaaggagtacagcgtgctgaacgccgtggaccaggccagagtgttcctggccgaccagcccatcgaggcccccgaggagcccagaagaaacctgcagagcaagaccgagctgacccccgaggagagagcccagaagatcgccaaggccatgagaaagcagagcagcgaggtgaaggagaagtgggagagcctgaacgccgtgaccagcaactggcagaagcaggtggacaaggccctggagaagctgagagacctgcagggcgccatggacgacctggacgccgacatgaaggaggccgagagcgtgagaaacggctggaagcccgtgggcgacctgctgatcgacagcctgcaggaccacatcgagaagatcatggccttcagagaggagatcgcccccatcaacttcaaggtgaagaccgtgaacgacctgagcagccagctgagccccctggacctgcaccccagcctgaagatgagcagacagctggacgacctgaacatgagatggaagctgctgcaggtgagcgtggacgacagactgaagcagctgcaggaggcccacagagacttcggccccagcagccagcacttcctgagcaccagcgtgcagctgccctggcagagaagcatcagccacaacaaggtgccctactacatcaaccaccagacccagaccacctgctgggaccaccccaagatgaccgagctgttccagagcctggccgacctgaacaacgtgagattcagcgcctacagaaccgccatcaagatcagaagactgcagaaggccctgtgcctggacctgctggagctgagcaccaccaacgagatcttcaagcagcacaagctgaaccagaacgaccagctgctgagcgtgcccgacgtgatcaactgcctgaccaccacctacgacggcctggagcagatgcacaaggacctggtgaacgtgcccctgtgcgtggacatgtgcctgaactggctgctgaacgtgtacgacaccggcagaaccggcaagatcagagtgcagagcctgaagatcggcctgatgagcctgagcaagggcctgctggaggagaagtacagatacctgttcaaggaggtggccggccccaccgagatgtgcgaccagagacagctgggcctgctgctgcacgacgccatccagatccccagacagctgggcgaggtggccgccttcggcggcagcaacatcgagcccagcgtgagaagctgcttccagcagaacaacaacaagcccgagatcagcgtgaaggagttcatcgactggatgcacctggagccccagagcatggtgtggctgcccgtgctgcacagagtggccgccgccgagaccgccaagcaccaggccaagtgcaacatctgcaaggagtgccccatcgtgggcttcagatacagaagcctgaagcacttcaactacgacgtgtgccagagctgcttcttcagcggcagaaccgccaagggccacaagctgcactaccccatggtggagtactgcatccccaccaccagcggcgaggacgtgagagacttcaccaaggtgctgaagaacaagttcagaagcaagaagtacttcgccaagcaccccagactgggctacctgcccgtgcagaccgtgctggagggcgacaacctggagacccccatcaccctgatcagcatgtggcccgagcactacgaccccagccagagcccccagctgttccacgacgacacccacagcagaatcgagcagtacgccaccagactggcccagatggagagaaccaacggcagcttcctgaccgacagcagcagcaccaccggcagcgtggaggacgagcacgccctgatccagcagtactgccagaccctgggcggcgagagccccgtgagccagccccagagccccgcccagatcctgaagagcgtggagagagaggagagaggcgagctggagagaatcatcgccgacctggaggaggagcagagaaacctgcaggtggagtacgagcagctgaaggaccagcacctgagaagaggcctgcccgtgggcagcccccccgagagcatcatcagcccccaccacaccagcgaggacagcgagctgatcgccgaggccaagctgctgagacagcacaagggcagactggaggccagaatgcagatcctggaggaccacaacaagcagctggagagccagctgcacagactgagacagctgctggagcagcccgagagcgacagcagaatcaacggcgtgagcccctgggccagcccccagcacagcgccctgagctacagcctggaccccgacgccagcggcccccagttccaccaggccgccggcgaggacctgctggcccccccccacgacaccagcaccgacctgaccgaggtgatggagcagatccacagcaccttccccagctgctgccccaacgtgcccagcagaccccaggccatgtag

SEQ ID NO: 330898 - DNA, 2967 bp, Artificial Sequence
  derived and/or modified sequence
atgcagatcctcagatgccttcagaagtgtggcaagctgaagatgatggctgttgttcgtacttccctgcagaaggtggtggtactcctgcaccggttacagcgaatggcggttagttcccccagataccagaagctgtgtaaggatattcaagcggaaatcgatgcccacaacgatatctttaaatccattgacggaaatcgacagaaaatggtgaaggctctggggaattcagaagaggctacaatgttacaacacagactcgacgatatgaatcaacgctggaatgatctgaaggctaaatcagcctccatcagagcacacctggaggcctctgctgaaaaatggaatcgcctgcttatgtccttagaggaactgataaagtggctgaacatgaaggacgaggaattaaaaaaacagatgcccatcgggggagacgtgccagcactgcagcttcagtacgatcattgcaaggcactacgccgcgagctcaaagaaaaggagtattcagtactcaacgcagttgatcaggcaagggttttcctcgccgaccagcctatagaggctcccgaagagccaaggcgcaaccttcagtcgaagactgagctgacccctgaagagagggcgcagaaaatcgcaaaagccatgcgcaaacagagttccgaagttaaggaaaagtgggaaagcctgaacgctgtcacaagcaattggcaaaaacaggtggacaaggctctcgagaaactgagagatctgcagggagccatggacgacctcgacgcagatatgaaggaagctgagtccgtacgcaacgggtggaagcctgtcggtgatctgctcattgacagtcttcaagatcatattgagaaaattatggcgttcagagaagagatcgccccaattaatttcaaggtcaagactgtgaacgatctgagttctcaacttagcccactggacctccatccatcccttaaaatgagtcggcagctggacgacctgaacatgcgctggaagctcctgcaggtgtccgtagacgacagacttaagcagttacaggaagctcaccgcgacttcggtccatccagccagcacttcctgagcacgtctgtccagcttccttggcagcggtctatttcacacaacaaggtgccctattatatcaatcaccagacacagactacttgttgggatcatccaaaaatgaccgaactctttcagtccctcgctgatctgaataatgtccgcttcagtgcatatcggacggccataaaaatccgccggctccagaaagccctgtgcctggacctactcgaactgtccactaccaatgaaatattcaagcaacacaaactgaaccagaacgaccaattgcttagtgtccctgacgtgataaactgccttacaacaacctacgacggcctggagcagatgcacaaggacctggtgaacgttcccctgtgtgttgatatgtgcttgaactggctgctcaacgtttatgatacaggtcgcaccgggaagatcagggtgcagtcactcaagatcggactgatgtcattgtccaagggcctccttgaggagaaataccggtacctcttcaaagaggttgccggacccacagaaatgtgtgaccagcggcagctgggccttctattgcacgatgccatccagatccctagacagttgggcgaagtggcagcttttggaggctcaaatatcgagccctctgttcgaagttgcttccagcaaaataataacaagccagagattagtgtgaaagagttcatagactggatgcacctcgagccccaatccatggtatggctcccagttctccatcgtgtggctgctgccgaaacagctaaacaccaggcaaagtgcaacatctgcaaagagtgccccatcgtgggttttcgatataggtctttgaagcacttcaattatgatgtgtgccagagctgttttttcagcggacggacggccaagggacacaagctccattatcctatggttgagtactgcattcccactacctcaggcgaagatgtgcgggacttcaccaaggtgctgaaaaataagtttcgcagtaaaaaatactttgccaagcatccacgtcttgggtacttgcctgtccagaccgttttggaaggcgacaaccttgaaactcccatcactctgatttcaatgtggcctgagcactacgacccctctcaatctccacagttgttccacgatgatacacatagtcggattgaacagtatgcaacaaggctggcccagatggaacggactaatggatccttcttgactgactccagctcgaccacaggctcggtcgaagacgaacatgcattaatccaacagtattgtcagaccctggggggagaaagtcccgtgagccagcctcagtctcctgcccagattcttaagagcgttgaaagggaggaacgcggcgaactggagcgaatcatcgctgatctggaagaggagcagagaaatttgcaagtggaatatgaacagctgaaggaccagcacctgaggcgtgggctgccagtggggtctcctcccgaatccataatctcaccacatcacacctcagaagatagtgaactaattgccgaggccaagctgctcaggcagcacaagggccggttagaggcaagaatgcagatcctcgaagatcacaacaagcagttagagtctcaactgcaccgtctaaggcagctcttagagcagccagaatccgacagtcggatcaacggtgtttctccatgggcttccccgcaacatagcgccctatcttatagtctcgatcccgatgcctctggacctcagttccatcaggctgccggcgaagatctgttggcacctcctcacgacacatccaccgatctcaccgaagtgatggagcagattcactccacgtttccatcctgttgccccaacgtcccttcccgtccccaagccatgtag

SEQ ID NO: 330899 - DNA, 2967 bp, Artificial Sequence
  derived and/or modified sequence
atgcagatcctgcgctgcctgcagaagtgtgggaagctgaagatgatggctgtggtgaggaccagcctgcagaaggtggtggtgctgctgcaccggctgcagaggatggctgtgagcagcccccgctaccagaagctgtgcaaggacatccaggccgagattgatgcccacaatgacatcttcaagagcattgatggcaaccggcagaagatggtgaaggccctgggcaacagcgaggaggccaccatgctgcagcaccggctggatgacatgaaccagcgctggaatgacctgaaggccaagagcgccagcatccgggcccacctggaggccagcgctgagaagtggaaccggctgctgatgagcctggaggagctgatcaagtggctgaacatgaaggatgaggagctgaagaagcagatgcccatcggaggagatgtgcctgccctgcagctgcagtatgaccactgcaaggccctgcggcgggagctgaaggagaaggagtacagcgtgctgaatgctgtggaccaggcccgggtcttcctggccgaccagcccatcgaggcccctgaggagcccaggaggaacctgcagagcaagacagagctgaccccagaggagcgggcccagaagatcgccaaggccatgaggaagcagagcagcgaggtgaaggagaagtgggagagcctgaatgctgtgaccagcaactggcagaagcaggtggacaaggccctggagaagctgcgggacctgcagggcgccatggatgacctggatgctgacatgaaggaggccgagagcgtgagaaatggctggaagcctgtgggggacctgctgattgacagcctgcaggaccacatcgagaagatcatggccttccgggaggagatcgcccccatcaacttcaaggtgaagacagtgaatgacctgagcagccagctgagccccctggacctgcaccccagcctgaagatgagccggcagctggatgacctgaacatgcgctggaagctgctgcaggtgtctgtggatgaccggctgaagcagctgcaggaggcccaccgggactttggccccagcagccagcacttcctgagcacctctgtgcagctgccctggcagaggagcatcagccacaacaaggtgccctactacatcaaccaccagacccagaccacctgctgggaccaccccaagatgacagagctgttccagagcctggccgacctgaacaacgtgcgcttcagcgcctacagaacagccatcaagatccggcggctgcagaaggccctgtgcctggacctgctggagctgagcaccaccaatgagatcttcaagcagcacaagctgaaccagaatgaccagctgctgtctgtgcctgatgtgatcaactgcctgaccaccacctatgatggcctggagcagatgcacaaggacctggtgaatgtgcccctgtgtgtggacatgtgcctgaactggctgctgaatgtgtatgacaccggccgcacaggcaagatccgggtgcagagcctgaagattggcctgatgagcctgagcaagggcctgctggaggagaagtaccgctacctgttcaaggaggtggccggccccacagagatgtgtgaccagaggcagctgggcctgctgctgcatgatgccatccagatcccccggcagctgggggaggtggccgccttcggcggcagcaacatcgagcccagcgtgcgcagctgcttccagcagaacaacaacaagccagagatctctgtgaaggagttcatcgactggatgcacctggagccccagagcatggtgtggctgcctgtgctgcaccgggtggccgctgctgagacagccaagcaccaggccaagtgcaacatctgcaaggagtgccccatcgtgggcttccgctaccgcagcctgaagcacttcaactatgatgtgtgccagagctgcttcttcagcggccgcacagccaagggccacaagctgcactaccccatggtggagtactgcatccccaccaccagcggagaagatgtgcgggacttcaccaaggtgctgaagaacaagttccgcagcaagaagtactttgccaagcacccccggctgggctacctgcctgtgcagacagtgctggagggggacaacctggagacccccatcaccctcatctccatgtggccagagcactatgaccccagccagagcccccagctgttccatgatgacacccacagcagaattgagcagtatgccacccggctggcccagatggagaggaccaacggcagcttcctgacagacagcagcagcaccaccggctctgtggaggatgaacatgccctgatccagcagtactgccagaccctgggcggggagagccctgtgtcccagccccagagccctgcccagatcctgaagtctgtggagcgggaggagcggggggagctggagcgcatcatcgctgacctggaggaggagcagaggaacctgcaggtggagtatgagcagctgaaggaccagcacctgcggcggggcctgcctgtgggcagccccccagagagcatcatcagcccccaccacaccagtgaagattctgagctgattgctgaggccaagctgctgcggcagcacaagggccgcctggaggccaggatgcagatcctggaggaccacaacaagcagctggagagccagctgcaccggctgcggcagctgctggagcagcctgagagtgacagccgcatcaacggggtgagcccctgggccagcccccagcacagcgccctgagctacagcctggaccctgatgccagcggcccccagttccaccaggccgccggggaggacctgctggcccctcctcatgacaccagcacagacctgacagaggtgatggagcagatccacagcaccttccccagctgctgccccaacgtgcccagccggccccaggccatgtag

SEQ ID NO: 330900 - DNA, 2967 bp, Artificial Sequence
  derived and/or modified sequence
atgcagatcctgcggtgcctgcagaagtgcggcaagctgaagatgatggctgttgtccgcacaagcctgcagaaggtggtggttctgctgcaccggctccaacggatggccgtgtccagcccgcgatatcagaagctctgcaaagatattcaggctgaaatcgatgcacacaatgatatctttaaatccatcgacggaaacagacagaaaatggtgaaagccttaggcaattcagaggaggcaactatgttgcagcaccgccttgacgacatgaatcagcgatggaatgacctcaaggccaagtccgcatctattcgggctcatctggaggcgtcagccgaaaaatggaaccggctcttgatgtcccttgaagagctaatcaagtggctgaatatgaaggatgaggaactgaaaaaacagatgcccattggaggagacgtgcctgctcttcagctgcaatacgatcactgcaaagcactgcgccgcgaactcaaggagaaggaatactcagtcttgaacgctgtcgatcaggccagggtgtttcttgccgaccagcccatcgaagcacccgaagagcctaggaggaacttacagtccaaaacggagctaactcccgaagagagggcccagaagatcgcaaaggccatgcggaaacagagttccgaagtgaaagaaaaatgggagtccctgaacgccgtgacttctaattggcagaagcaggtggataaagccctggaaaaactgcgcgatctccagggagctatggatgacctggacgctgacatgaaagaagccgaaagcgtaagaaacggctggaagcctgtaggcgatctgctgattgactccctgcaggatcacattgaaaaaatcatggcttttcgcgaggagatagcccccattaattttaaagtcaagacagtgaatgacctcagctctcagttgagcccactggatttgcacccctcgctaaaaatgtctcggcagctggacgacctcaacatgaggtggaagctgctgcaggtctctgtggacgaccgtcttaaacagctccaggaggctcacagggacttcgggccgagctcccagcattttctgagcaccagcgtccagctgccctggcaacgctcaatctctcataacaaggttccctactatatcaatcatcagactcagacgacgtgctgggatcaccccaaaatgactgagttgtttcaatctctcgccgatctgaacaatgtgcggttcagcgcctacaggactgctatcaaaatccgccgtctacagaaagcactctgtttggacctgctggagctgagcactaccaatgagatctttaagcagcacaaactcaatcagaacgatcaactactgagcgtaccagacgtgattaattgtctaaccactacttatgacggtcttgagcagatgcacaaggacctggtgaacgtacccttgtgcgttgacatgtgtcttaattggctgctaaatgtatacgataccgggcgaaccggcaaaatccgggtccagtctctgaaaatcggcctgatgtctctatctaagggcctgctagaggaaaagtatagatacctgttcaaagaggttgccggcccaaccgaaatgtgcgaccagaggcagctcgggctgttgctacacgatgctattcagatcccgagacaacttggggaggtggccgcttttggggggtccaatatcgagccatctgtgagaagttgttttcaacagaacaataacaagccagagatctccgttaaggaattcattgactggatgcatctagagccccagtcaatggtttggttgcccgtgctgcaccgggttgcagccgcagagacagccaaacaccaagccaagtgcaacatctgcaaagagtgtcccattgtggggtttcggtataggtccctgaaacactttaattatgatgtgtgtcagagctgtttctttagcggcaggaccgccaagggccacaaactgcactaccccatggtcgagtattgcatccccactactagcggggaagacgttagagattttaccaaggtcctgaagaacaaattccgatcaaagaaatactttgctaagcatccgcgcctcggatacctaccagtccaaactgtgctggagggtgataatctcgagacaccaattaccctaatttctatgtggccagaacactacgatcccagccagtcccctcagctgtttcacgacgacacacatagcagaatcgagcagtatgccacccggttggcccaaatggaaaggacaaatggatcattccttacagattcctcgtccaccacaggctcagtcgaggacgaacatgccctgatacagcagtactgtcagactctcggaggcgaatccccggtgtcccagccacagtcgcctgcccaaatcctgaagtctgtggagcgggaggagagaggagaactcgaacggattatcgcagacctggaggaggaacagagaaacttacaagtagaatatgaacaactgaaggatcagcatctccgccggggccttcctgttggatcaccccccgagtcaatcattagcccccaccacacctctgaggactctgaactgattgcagaagccaagctcttacgtcagcataagggaaggctggaggccaggatgcagatcctggaagaccataataaacagttggaatctcaacttcaccgtctgaggcagctccttgaacagccagagagcgattcacggattaatggggtgtcgccctgggcctccccccaacatagcgcactcagttactcacttgatcccgacgcctctggcccccagttccatcaggccgccggagaagatttgctcgctccacctcatgatacctccactgacctcactgaagtgatggagcagatccattctacgtttccaagctgctgccctaatgttccatctcggccccaggcgatgtag

SEQ ID NO: 330901 - DNA, 2967 bp, Artificial Sequence
  derived and/or modified sequence
atgcaaattctcagatgcctgcaaaagtgtggtaaattaaagatgatggccgttgtcagaacctcattgcaaaaagttgtcgttttgctacaccgactgcagcgcatggcagtttccagccccaggtatcagaagctatgtaaagatattcaggccgagatcgacgcacataatgacatttttaaatcaatcgatggcaaccgacaaaaaatggtgaaggctctcggaaactcagaggaagccacgatgctccaacatcggctggacgacatgaatcagaggtggaacgatctgaaagctaagagtgcgtcaatccgagcccatctagaggcatccgcagagaagtggaacagactgctgatgagcttggaggaactcatcaaatggctcaatatgaaagatgaagagttgaaaaagcagatgcctattggaggcgatgtccctgcccttcagcttcaatacgatcattgtaaagctttgagaagggaactcaaagagaaggagtattccgtgctgaacgcagttgaccaggccagggtatttctggccgatcagccgatcgaggccccagaggagcctagaaggaaccttcaatccaaaacagaacttactcctgaagaacgcgcacaaaaaattgcaaaagctatgcggaagcaatctagtgaggttaaggaaaaatgggagtctctcaacgcagtcaccagcaactggcaaaagcaggtggacaaggctctggagaagcttcgtgatttgcagggcgctatggatgacttagatgcagacatgaaagaagcggaaagcgtgagaaatggatggaagcctgtcggggacctccttattgactcattgcaggatcacatcgaaaaaattatggcatttagggaggaaatcgccccaatcaactttaaggtaaagactgtcaatgacctgtcaagccagctctcgcccttagacctgcatcccagtttaaaaatgtcacgccaactggatgatctgaatatgcggtggaagctgcttcaagtgtcagtggacgatagactgaagcagctacaggaagcacacagagacttcggcccaagctcacaacatttcctgtccaccagcgttcaactaccgtggcagagatcaatatcccacaacaaggttccttattacatcaatcatcagacccagaccacatgctgggaccatcctaaaatgaccgagttgttccagtctctggccgaccttaataacgtccggttcagcgcctatcgaacagccattaaaatcaggcgcctccagaaggcactgtgcctggacctgcttgagctaagtaccacaaacgagatcttcaaacaacataaactcaatcaaaacgatcagctgctgtccgtccctgacgtgattaactgccttaccactacatatgacgggctggagcaaatgcacaaagacctggtgaatgttccactttgcgtggatatgtgcctgaattggctactgaacgtatatgatacaggcaggaccggtaagatccgcgtgcaaagtctgaagatcggattaatgtcattaagcaaagggctactcgaagagaaatataggtatctcttcaaggaggttgctggacctacagaaatgtgcgatcagcgccagttagggcttctgctgcacgacgcgattcagatcccacggcaactcggcgaagtggccgcttttgggggatcaaacatcgagccatctgtacgcagctgctttcagcagaataacaacaagccagaaatctcggttaaggagtttattgactggatgcatctggaaccgcaatctatggtgtggctgcctgtgttgcatcgtgtggcagcagcggaaacagcaaaacaccaggccaagtgtaacatctgtaaagaatgtccaattgtcggttttcggtatcgtagcctcaagcattttaactatgacgtgtgtcaatcttgcttcttttccgggcgtacagcgaagggacataaacttcactatcccatggtggagtactgtatccctacaacgtccggcgaggatgtgagggactttacaaaagtgcttaagaataagttccgttcaaaaaagtacttcgcaaaacacccaaggctgggctatctcccagtgcagactgtacttgagggagacaacttggagacgccgattacccttatatccatgtggcccgagcactacgaccctagccagtcccctcagttattccacgacgacactcattcacgtattgagcagtatgctacacgcctggctcaaatggagaggacgaacggaagcttcctgactgattccagcagtactacagggtcagttgaggacgagcatgccctcattcaacagtattgccaaaccttggggggtgagagcccagtgtcccaacctcagtctccagcccagattctgaagtccgtggagcgagaggagaggggcgagttagaaaggattatcgcggacttagaggaggaacagcgaaatttgcaagtggaatatgagcagcttaaggatcagcacctcagacgaggactgcccgtggggtccccacccgaatctatcatttctccccaccatacttccgaagattccgaactcattgctgaggccaagcttctgcggcagcacaaaggcaggctggaggcccgtatgcagatactagaagatcacaataaacagttagaaagtcagttgcataggctgagacaactgctggagcagcctgaatcggactctagaatcaacggagtaagcccatgggcttctccacagcatagcgcattgtcctactctttggatcccgacgcttctggcccacaattccaccaggcagccggagaagacttactggccccaccgcatgacacatccaccgacctcacagaagttatggagcagatacactccacgtttccttcttgctgcccaaacgtgccctctcggcctcaagccatgtag

SEQ ID NO: 330902 - DNA, 3220 bp, Artificial Sequence
  derived and/or modified sequence
caacttccttcatttctggccatgccgggctgagcaagtgctgcctgtgagcatctgctggggggctttctctgtggcgtttgtctgtgttttttaaattgagaagttgaaggaataccagcctcctttttcctagaacctaaccccctgtatctttcaaatgctttcctggaaacgagcatgctcagagaactgacaaatcattgtccagtgaccgggaggaaatgatcgttgctcttcatttataatgcaaattctgaggtgtctccagaagtgtggtaaacttaaaatgatggctgtggtgagaacgtctctgcagaaagttgtggttttgttgcatcgcttacaaaggatggcagtttcttctcctcggtatcagaagctctgtaaggacatccaggcagaaattgatgcccacaatgacatatttaaaagcattgacggaaacaggcagaagatggtaaaagctttgggaaattctgaagaggctactatgcttcaacatcgactggatgatatgaaccaaagatggaatgacttaaaagcaaaatctgctagcatcagggcccatttggaggccagcgctgagaagtggaacaggttgctgatgtccttagaagaactgatcaaatggctgaatatgaaagatgaagagcttaagaaacaaatgcctattggaggagatgttccagccttacagctccagtatgaccattgtaaggccctgagacgggagttaaaggagaaagaatattctgtcctgaatgctgtcgaccaggcccgagttttcttggctgatcagccaattgaggcccctgaagagccaagaagaaacctacaatcaaaaacagaattaactcctgaggagagagcccaaaagattgccaaagccatgcgcaaacagtcttctgaagtcaaagaaaaatgggaaagtctaaatgctgtaactagcaattggcaaaagcaagtggacaaggcattggagaaactcagagacctgcagggagctatggatgacctggacgctgacatgaaggaggcagagtccgtgcggaatggctggaagcccgtgggagacttactcattgactcgctgcaggatcacattgaaaaaatcatggcatttagagaagaaattgcaccaatcaactttaaagttaaaacggtgaatgatttatccagtcagctgtctccacttgacctgcatccctctctaaagatgtctcgccagctagatgaccttaatatgcgatggaaacttttacaggtttctgtggatgatcgccttaaacagcttcaggaagcccacagagattttggaccatcctctcagcattttctctctacgtcagtccagctgccgtggcaaagatccatttcacataataaagtgccctattacatcaaccatcaaacacagaccacctgttgggaccatcctaaaatgaccgaactctttcaatcccttgctgacctgaataatgtacgtttttctgcctaccgtacagcaatcaaaatccgaagactacaaaaagcactatgtttggatctcttagagttgagtacaacaaatgaaattttcaaacagcacaagttgaaccaaaatgaccagctcctcagtgttccagatgtcatcaactgtctgacaacaacttatgatggacttgagcaaatgcataaggacctggtcaacgttccactctgtgttgatatgtgtctcaattggttgctcaatgtctatgacacgggtcgaactggaaaaattagagtgcagagtctgaagattggattaatgtctctctccaaaggtctcttggaagaaaaatacagatatctctttaaggaagttgcagggccaacagaaatgtgtgaccagaggcagctgggcctgttacttcatgatgccatccagatcccccggcagctaggtgaagtagcagcttttggaggcagtaatattgagcctagtgttcgcagctgcttccaacagaataacaataaaccagaaataagtgtgaaagagtttatagattggatgcatttggaaccacagtccatggtttggctcccagttttacatcgagtggcagcagcggagactgcaaaacatcaggccaaatgcaacatctgtaaagaatgtccaattgtcgggttcaggtatagaagccttaagcattttaactatgatgtctgccagagttgtttcttttcgggtcgaacagcaaaaggtcacaaattacattacccaatggtggaatattgtatacctacaacatctggggaagatgtacgagacttcacaaaggtacttaagaacaagttcaggtcgaagaagtactttgccaaacaccctcgacttggttacctgcctgtccagacagttcttgaaggtgacaacttagagactcctatcacactcatcagtatgtggccagagcactatgacccctcacaatctcctcaactgtttcatgatgacacccattcaagaatagaacaatatgccacacgactggcccagatggaaaggactaatgggtcttttctcactgatagcagctccaccacaggaagtgtggaagacgagcacgccctcatccagcagtattgccaaacactcggaggagagtccccagtgagccagccgcagagcccagctcagatcctgaagtcagtagagagggaagaacgtggagaactggagaggatcattgctgacctggaggaagaacaaagaaatctacaggtggagtatgagcagctgaaggaccagcacctccgaagggggctccctgtcggttcaccgccagagtcgattatatctccccatcacacgtctgaggattcagaacttatagcagaagcaaaactcctcaggcagcacaaaggtcggctggaggctaggatgcagattttagaagatcacaataaacagctggagtctcagctccaccgcctccgacagctgctggagcagcctgaatctgattcccgaatcaatggtgtttccccatgggcttctcctcagcattctgcactgagctactcgcttgatccagatgcctccggcccacagttccaccaggcagcgggagaggacctgctggccccaccgcacgacaccagcacggatctcacggaggtcatggagcagattcacagcacgtttccatcttgctgcccaaatgttcccagcaggccacaggcaatgtgaagtatt

SEQ ID NO: 330903 - protein, 148 aa, Artificial Sequence
  derived and/or modified sequence
MARMNRPAPVEVTYKNMRFLITHNPTNATLNKFIEELKKYGVTTIVRVCEATYDTTLVEKEGIHVLDWPFDDGAPPSNQIVDDWLSLVKIKFREEPGCCIAVHCVAGLGRKRRGAFNSKQLLYLEKYRPKMRLRFKDSNGHRNNCCIQ

SEQ ID NO: 330904 - protein, 173 aa, Artificial Sequence
  derived and/or modified sequence
MARMNRPAPVEVTYKNMRFLITHNPTNATLNKFIEELKKYGVTTIVRVCEATYDTTLVEKEGIHVLDWPFDDGAPPSNQIVDDWLSLVKIKFREEPGCCIAVHCVAGLGRAPVLVALALIEGGMKYEDAVQFIRQKRRGAFNSKQLLYLEKYRPKMRLRFKDSNGHRNNCCIQ

SEQ ID NO: 330905 - DNA, 447 bp, Artificial Sequence
  derived and/or modified sequence
atggccagaatgaacagacccgcccccgtggaggtgacctacaagaacatgagattcctgatcacccacaaccccaccaacgccaccctgaacaagttcatcgaggagctgaagaagtacggcgtgaccaccatcgtgagagtgtgcgaggccacctacgacaccaccctggtggagaaggagggcatccacgtgctggactggcccttcgacgacggcgccccccccagcaaccagatcgtggacgactggctgagcctggtgaagatcaagttcagagaggagcccggctgctgcatcgccgtgcactgcgtggccggcctgggcagaaagagaagaggcgccttcaacagcaagcagctgctgtacctggagaagtacagacccaagatgagactgagattcaaggacagcaacggccacagaaacaactgctgcatccagtag

SEQ ID NO: 330906 - DNA, 522 bp, Artificial Sequence
  derived and/or modified sequence
atggccagaatgaacagacccgcccccgtggaggtgacctacaagaacatgagattcctgatcacccacaaccccaccaacgccaccctgaacaagttcatcgaggagctgaagaagtacggcgtgaccaccatcgtgagagtgtgcgaggccacctacgacaccaccctggtggagaaggagggcatccacgtgctggactggcccttcgacgacggcgccccccccagcaaccagatcgtggacgactggctgagcctggtgaagatcaagttcagagaggagcccggctgctgcatcgccgtgcactgcgtggccggcctgggcagagcccccgtgctggtggccctggccctgatcgagggcggcatgaagtacgaggacgccgtgcagttcatcagacagaagagaagaggcgccttcaacagcaagcagctgctgtacctggagaagtacagacccaagatgagactgagattcaaggacagcaacggccacagaaacaactgctgcatccagtag

SEQ ID NO: 330907 - DNA, 447 bp, Artificial Sequence
  derived and/or modified sequence
atggcacgcatgaacaggccagcccccgtggaggtgacctacaagaatatgaggtttctcatcacccataaccccaccaatgccacccttaataagttcatcgaggagctgaagaagtacggcgtaacaactatcgtgagggtgtgcgaggccacatacgatacaacgctcgttgaaaaagagggcatccacgtgctcgactggccctttgatgatggcgcacctccttccaatcagatcgtggatgattggctgagtcttgtcaaaattaagtttcgggaagaaccagggtgttgcattgcagtgcactgcgtcgctggactcggccgcaagcgtagaggagccttcaattcaaagcagctcctatatttagaaaagtacaggccgaagatgagacttcgctttaaagattctaacggacaccggaacaactgctgcatccagtag

SEQ ID NO: 330908 - DNA, 447 bp, Artificial Sequence
  derived and/or modified sequence
atggctcgcatgaaccggcctgccccggttgaggtgacctacaagaatatgaggttcctaattacgcataatccgactaatgccactctcaacaagttcattgaagagctgaaaaagtacggagtaaccactatcgtgcgtgtatgcgaggccacgtatgatacgacactcgtggaaaaggaaggaatacacgtgctagactggcccttcgatgatggggcaccccccagcaatcagatcgtggatgattggctttcactggtaaagatcaagttcagagaggaaccgggatgttgcattgccgtgcactgcgtggcaggcctgggccgcaagcggaggggcgcctttaattcaaagcaattactgtacctggaaaaatatcgcccaaaaatgagactacgctttaaagattccaacggccaccgaaataattgttgcattcagtag

SEQ ID NO: 330909 - DNA, 522 bp, Artificial Sequence
  derived and/or modified sequence
atggctcggatgaaccgccccgcgccagtggaagtcacttataagaatatgagattcctgataacccataacccaactaacgctactctcaacaaattcatcgaggaattgaagaaatacggagtgactactatcgtgcgcgtgtgcgaagctacatacgatactacgctggtggaaaaagagggcattcacgtcttagactggccatttgacgatggtgcgcctccgagtaaccagatcgtagatgactggctgagcttagtgaaaatcaagtttcgcgaggaacccgggtgctgtatcgcagtccattgcgtcgccggtctaggtagagctcccgtgttggtggcgcttgccctcatcgagggaggaatgaaatatgaagacgccgtccagttcatccggcagaagagaaggggggcgttcaactccaaacagctactttacttggagaagtacaggcccaagatgagactcaggttcaaggattcaaacggacacaggaataattgctgcatacaatag

SEQ ID NO: 330910 - DNA, 447 bp, Artificial Sequence
  derived and/or modified sequence
atggccaggatgaacagacctgcccctgtggaggtgacctacaagaacatgaggttcctgatcacccacaaccccaccaatgccaccctgaacaagttcatcgaggagctgaagaagtatggagtgaccaccatcgtgcgggtgtgtgaggccacctatgacaccaccctggtggagaaggagggcatccacgtgctggactggccctttgatgatggagccccacccagcaaccagatcgtggatgactggctgagcctggtgaagatcaagttccgggaggagcccggctgctgcatcgctgtgcactgtgtggccggcctgggcaggaagagaagaggagccttcaacagcaagcagctgctgtacctggagaagtaccggcccaagatgaggctgcgcttcaaggacagcaatggccacaggaacaactgctgcatccagtag

SEQ ID NO: 330911 - DNA, 522 bp, Artificial Sequence
  derived and/or modified sequence
atggccaggatgaacagacctgcccctgtggaggtgacctacaagaacatgaggttcctgatcacccacaaccccaccaatgccaccctgaacaagttcatcgaggagctgaagaagtatggagtgaccaccatcgtgcgggtgtgtgaggccacctatgacaccaccctggtggagaaggagggcatccacgtgctggactggccctttgatgatggagccccacccagcaaccagatcgtggatgactggctgagcctggtgaagatcaagttccgggaggagcccggctgctgcatcgctgtgcactgtgtggccggcctgggccgggcccctgtgctggtggccctggccctgattgagggcggcatgaagtatgaagatgctgtgcagttcatccggcagaagagaagaggagccttcaacagcaagcagctgctgtacctggagaagtaccggcccaagatgaggctgcgcttcaaggacagcaatggccacaggaacaactgctgcatccagtag

SEQ ID NO: 330912 - DNA, 447 bp, Artificial Sequence
  derived and/or modified sequence
atggcccggatgaaccggcccgcccccgtggaggtgacctacaagaatatgaggttcttaattacccacaatcccaccaatgctactctcaacaaattcattgaggagttgaagaagtatggcgtgaccacaatcgtgcgtgtgtgcgaggccacctacgatacaaccctcgttgagaaggaagggatccacgtgctggattggcccttcgacgatggagccccaccatcaaatcagattgttgatgattggctctccctggtcaaaatcaaattccgtgaagagcctggctgctgcattgcggtgcactgcgtggccggtctggggcgtaaacggagaggagcctttaacagtaagcagcttctgtatctggaaaaatacagacctaagatgagactgcgattcaaggactcaaacggccatcgaaataattgttgtatccagtag

SEQ ID NO: 330913 - DNA, 447 bp, Artificial Sequence
  derived and/or modified sequence
atggcccggatgaaccggcccgcccccgtggaggtgacctacaagaacatgcggtttctcatcacgcacaatccaactaacgctactctcaacaagttcatcgaagagctgaaaaaatacggagtgactactatcgttcgtgtgtgcgaagctacctatgacactaccctagtcgaaaaagaaggcattcatgtcttggactggcctttcgatgatggcgcccccccttcaaatcaaatcgtggacgattggttgagccttgtgaagatcaagtttagggaagaacccggctgctgtatcgccgttcactgcgtcgctgggctgggcagaaagcggagaggagcttttaattcaaagcaacttctgtacctggagaaatatagaccaaagatgagactgagattcaaagatagtaacggacatcgcaataattgctgtatacagtag

SEQ ID NO: 330914 - DNA, 522 bp, Artificial Sequence
  derived and/or modified sequence
atggcccggatgaaccggcccgcccccgtggaggtgacctacaagaatatgaggtttctaatcactcacaatcctacaaatgcaacgctcaacaaatttatcgaggaattaaaaaaatatggagttaccacaatcgttcgagtttgcgaggctacgtacgatactactttggtcgagaaggaaggtattcacgtgttagactggccctttgatgacggtgcaccaccgagtaatcaaatagtggatgactggctctcactggtgaaaattaagtttagggaggagcccggatgttgcatcgcagtgcattgtgtagcaggcctcggacgcgccccagtcctggtagccttagctctgattgaaggtgggatgaagtatgaggacgccgtccagtttattaggcagaagcgccgaggggcgtttaatagcaaacagttactgtatctggagaaatacagaccgaagatgcggctaagattcaaggacagcaacggtcacagaaacaattgttgcatacaatag

SEQ ID NO: 330915 - DNA, 447 bp, Artificial Sequence
  derived and/or modified sequence
atggctaggatgaaccgccctgcccctgtggaggtaacgtataaaaacatgcggttcctgatcactcacaacccaaccaacgccacgctgaataaattcattgaggaacttaagaagtatggagtgactacaatcgttcgcgtttgcgaagcgacttacgacaccaccttggttgagaaggaaggcatacacgtgctcgactggcccttcgacgacggcgctcccccatctaaccagattgtcgatgattggttgagtctcgtgaagattaagtttcgggaagaacctgggtgttgcatcgccgttcattgtgttgctggacttggcaggaagcgcagaggcgcatttaacagcaaacagttgctctatcttgagaaatatcgcccaaagatgcgcctccgcttcaaggactccaacggtcaccgaaacaactgttgcatccagtag

SEQ ID NO: 330916 - DNA, 447 bp, Artificial Sequence
  derived and/or modified sequence
atggctaggatgaacaggccagcgccagtcgaggtcacatataaaaacatgcgattcctgatcactcacaacccaactaacgccaccttgaacaaattcatagaagagttaaagaagtatggtgtcaccaccatagtacgcgtgtgtgaagccacctatgacacaaccctcgtcgagaaggaagggatccacgtcttggactggccctttgacgatggcgcaccgccatcaaaccaaattgtagatgactggctgtcactcgtgaagatcaagtttcgggaagagccaggctgttgcatagccgtacactgcgtggctggactgggcaggaaaaggagaggcgctttcaactcaaagcagcttctgtacctagagaagtataggccaaagatgcgactccgctttaaggactctaacggtcacagaaacaactgctgtattcaatag

SEQ ID NO: 330917 - DNA, 522 bp, Artificial Sequence
  derived and/or modified sequence
atggctaggatgaaccgaccagccccagtggaggtaacctataagaacatgcgctttctgatcacccacaatcccacaaacgccactcttaacaagtttattgaagagttaaagaaatacggggtgaccacaatcgtgagggtgtgtgaggcaacctatgatactacactcgtggaaaaggagggcattcatgtcttggactggccgttcgatgatggcgctcctccatccaaccagatcgtggacgactggctatcactcgtgaaaatcaaatttcgcgaagagcctggatgttgcatagcggtacattgtgtggccggactggggagagcccctgtcctcgtcgcactggctttgattgagggagggatgaagtatgaagacgccgtgcagttcattcgccagaagcggcgaggcgcatttaactccaaacagttgttgtacctcgaaaagtacagacccaaaatgagactgcgatttaaggattctaacggccacaggaacaactgttgtatacagtag

SEQ ID NO: 330918 - DNA, 448 bp, Artificial Sequence
  derived and/or modified sequence
catggctcgaatgaaccgcccagctcctgtggaagtcacatacaagaacatgagatttcttattacacacaatccaaccaatgcgaccttaaacaaatttatagaggaacttaagaagtatggagttaccacaatagtaagagtatgtgaagcaacttatgacactactcttgtggagaaagaaggtatccatgttcttgattggccttttgatgatggtgcaccaccatccaaccagattgttgatgactggttaagtcttgtgaaaattaagtttcgtgaagaacctggttgttgtattgctgttcattgcgttgcaggccttgggagaaagcggcgtggagcttttaacagcaagcaacttctgtatttggagaagtatcgtcctaaaatgcggctgcgtttcaaagattccaacggtcatagaaacaactgttgcattcaataa

SEQ ID NO: 330919 - DNA, 3294 bp, Artificial Sequence
  derived and/or modified sequence
cccccgccgccgcctgcatcgccgccaccgccgctccgccacgaccaccgccgcctcctgccctgcagccaccgccaccgcctgtgtcgccgccgcctcgggaccggctgtatgattaggccacaatcttcaatgagtaaacatattcctcaattctgtggtgttcttggtcacacatttatggagtttctgaagggcagtggagattactgccaggcacagcacgacctctatgcagacaagtgaactgtagaaactgattactgctccaccaagaagcccccataagagtggttatcctggacacagaagtgttgaattgaaatccacagagcattttacaagagttctgacctggatggggtaaacctcagtgcacttcttttctgttggcctcagtattactggattgaagaattgctgcttcttgttaggaggttcatttcacttatcattacttacaacttcatactcaaagcactgagaatttcaagtggagtatattgaagtagacttcagtttctttgcatcatttctgtattcaatttttttaattatttcataaccctattgagtgttttttaactaaattaacatggctcgaatgaaccgcccagctcctgtggaagtcacatacaagaacatgagatttcttattacacacaatccaaccaatgcgaccttaaacaaatttatagaggaacttaagaagtatggagttaccacaatagtaagagtatgtgaagcaacttatgacactactcttgtggagaaagaaggtatccatgttcttgattggccttttgatgatggtgcaccaccatccaaccagattgttgatgactggttaagtcttgtgaaaattaagtttcgtgaagaacctggttgttgtattgctgttcattgcgttgcaggccttgggagaaagcggcgtggagcttttaacagcaagcaacttctgtatttggagaagtatcgtcctaaaatgcggctgcgtttcaaagattccaacggtcatagaaacaactgttgcattcaataaaattggggtgcctaatgctactggaagtggaacttgagatagggcctaatttgttatacatattagccaacatgttggcttagtaagtctaatgaagcttccataggagtattgaaaggcagttttaccaggcctcaagctagacagatttggcaacctctgtatttgggttacagtcaacctatttggatacttggcaaaagattcttgctgtcagcatataaaatgtgcttgtcatttgtatcaattgacctttccccaaatcatgcagtattgagttatgacttgttaaatctattcccatgccagaatcttatcaatacataagaaatttaggaagattaggtgccaaaatacccagcacaatacttgtatatttttagtaccatacagaagtaaaatcccaggaactatgaacactagaccttatgtggtttattccttcaatcatttcaaacattgaaagtagggcctacatggttatttgcctgctcactttatgtttacatctcccacattcataccaatatacgtcaggtttgcttaaccattgatttttttttttttttaccaagtcttacagtgattattttacgtgtttccatgtatctcactttgtgctgtattaaaaaaacctccattttgaaaatctacgttgtacagaagcacatgtctttaatgtcttcagacaaaaaagccttacattaatttaatgtttgcactctgaggtgcaacttaacagggagggcctgagaaaagaatgggagggggctattaattatttttagcaaaatgttgcctttgtcttgtgcaaacatgtagaatatgctctttaatttagtaaaatatttttttaaaaggtagagatgctttgttattgtaatcataaacttcctgaaattcttgtaatttttttcccatacttatcagaagtgtgtttaccaacttatttttgtttgaaagtgtgattttttttttccttcccaacctctcttgcaaaaaaagaaatgggtttctgctaatgaattgagcagacatctaatattttatatgccttttgagctgtgtaacttaatatttggatacttgacaatttgttttattatgtaattgataaaatggtgatgtgtattaatgttagttcaaccatatatttatactgtctggggatgtgtggttatagttctgtgggagaaataattttgtcagtgttcaccagcttgtaaaaacttagtgcgagagctgaaacatctaaataaataatgacatgcatttatcatcattgagattggtttgcttaaaattaacttattttgtagaagacaaaatgaattgcacttcacttaatgtgtgtcctcatctttttacaaataaatgaaggattataaatgatgtcagcattttagtaaacttttagacaaaatttgttagggtcattcatgaaaactttaatactaaaagcactttccattatatactttttaaaggtctagataattttgaaccaatttattattgtgtactgaggagaaataatgtatagtagaggacagccttggtttgtaaagctcagttccactagttcatggttttgtgcaacttctgagcctcagttttctcctttgcaaattaataattacatacctttatagattttgaaattaatttaaatattagtatttggtacatgaaggcttaatgttaagtttcctttaatgatccacaataatccctttgatcacgttaatctaaatctagatgtctttgtctaattttttttgaatagcagttataaatgtaaaggactcaaagtttaagtaaaaagtgatactccaccttgtgtttcaaagaatttagttccacctcttcataccagtttaacacttaatatatttcattggattttagacagggcaaaaggaagaacaggggcctctggaggcccttggttatttaaatcttggattatttgtgatagtaatcacaaatttttggctaatttttaacctgaggttttgttttttttttaaaggaaatgcagcctagtcttgagaacataattttatataatcaattactaaatgttaaactattaccacacagcccataaaacagcatttgcgtttattgagagagaggatgtgccatcatgattaatgaaaactatcttttgagtttgaaaagaaattaatttgcagtgtttggattgtatatatggtgctaaaaataaattaatttactttataaacctt

SEQ ID NO: 330920 - DNA, 4611 bp, Artificial Sequence
  derived and/or modified sequence
cgtgtattggctccttcggctgcgggccggctcggctacgcgctctgctccgagccgctcactgcatggtagagtctggtgcccccgccgccgcctgcatcgccgccaccgccgctccgccacgaccaccgccgcctcctgccctgcagccaccgccaccgcctgtgtcgccgccgcctcgggaccggctgtatgattaggccacaatcttcaatgagtaaacatattcctcaattctgtggtgttcttggtcacacatttatggagtttctgaagggcagtggagattactgccaggcacagcacgacctctatgcagacaagtgaactgtagaaactgattactgctccaccaagaagcccccataagagtggttatcctggacacagaagtgttgaattgaaatccacagagcattttacaagagttctgacctggatggggtaaacctcagtgcacttcttttctgttggcctcagtattactggattgaagaattgctgcttcttgttaggaggttcatttcacttatcattacttacaacttcatactcaaagcactgagaatttcaagtggagtatattgaagtagacttcagtttctttgcatcatttctgtattcaatttttttaattatttcataaccctattgagtgttttttaactaaattaacatggctcgaatgaaccgcccagctcctgtggaagtcacatacaagaacatgagatttcttattacacacaatccaaccaatgcgaccttaaacaaatttatagaggaacttaagaagtatggagttaccacaatagtaagagtatgtgaagcaacttatgacactactcttgtggagaaagaaggtatccatgttcttgattggccttttgatgatggtgcaccaccatccaaccagattgttgatgactggttaagtcttgtgaaaattaagtttcgtgaagaacctggttgttgtattgctgttcattgcgttgcaggccttgggagagctccagtacttgttgccctagcattaattgaaggtggaatgaaatacgaagatgcagtacaattcataagacaaaagcggcgtggagcttttaacagcaagcaacttctgtatttggagaagtatcgtcctaaaatgcggctgcgtttcaaagattccaacggtcatagaaacaactgttgcattcaataaaattggggtgcctaatgctactggaagtggaacttgagatagggcctaatttgttatacatattagccaacatgttggcttagtaagtctaatgaagcttccataggagtattgaaaggcagttttaccaggcctcaagctagacagatttggcaacctctgtatttgggttacagtcaacctatttggatacttggcaaaagattcttgctgtcagcatataaaatgtgcttgtcatttgtatcaattgacctttccccaaatcatgcagtattgagttatgacttgttaaatctattcccatgccagaatcttatcaatacataagaaatttaggaagattaggtgccaaaatacccagcacaatacttgtatatttttagtaccatacagaagtaaaatcccaggaactatgaacactagaccttatgtggtttattccttcaatcatttcaaacattgaaagtagggcctacatggttatttgcctgctcactttatgtttacatctcccacattcataccaatatacgtcaggtttgcttaaccattgatttttttttttttttaccaagtcttacagtgattattttacgtgtttccatgtatctcactttgtgctgtattaaaaaaacctccattttgaaaatctacgttgtacagaagcacatgtctttaatgtcttcagacaaaaaagccttacattaatttaatgtttgcactctgaggtgcaacttaacagggagggcctgagaaaagaatgggagggggctattaattatttttagcaaaatgttgcctttgtcttgtgcaaacatgtagaatatgctctttaatttagtaaaatatttttttaaaaggtagagatgctttgttattgtaatcataaacttcctgaaattcttgtaatttttttcccatacttatcagaagtgtgtttaccaacttatttttgtttgaaagtgtgattttttttttccttcccaacctctcttgcaaaaaaagaaatgggtttctgctaatgaattgagcagacatctaatattttatatgccttttgagctgtgtaacttaatatttggatacttgacaatttgttttattatgtaattgataaaatggtgatgtgtattaatgttagttcaaccatatatttatactgtctggggatgtgtggttatagttctgtgggagaaataattttgtcagtgttcaccagcttgtaaaaacttagtgcgagagctgaaacatctaaataaataatgacatgcatttatcatcattgagattggtttgcttaaaattaacttattttgtagaagacaaaatgaattgcacttcacttaatgtgtgtcctcatctttttacaaataaatgaaggattataaatgatgtcagcattttagtaaacttttagacaaaatttgttagggtcattcatgaaaactttaatactaaaagcactttccattatatactttttaaaggtctagataattttgaaccaatttattattgtgtactgaggagaaataatgtatagtagaggacagccttggtttgtaaagctcagttccactagttcatggttttgtgcaacttctgagcctcagttttctcctttgcaaattaataattacatacctttatagattttgaaattaatttaaatattagtatttggtacatgaaggcttaatgttaagtttcctttaatgatccacaataatccctttgatcacgttaatctaaatctagatgtctttgtctaattttttttgaatagcagttataaatgtaaaggactcaaagtttaagtaaaaagtgatactccaccttgtgtttcaaagaatttagttccacctcttcataccagtttaacacttaatatatttcattggattttagacagggcaaaaggaagaacaggggcctctggaggcccttggttatttaaatcttggattatttgtgatagtaatcacaaatttttggctaatttttaacctgaggttttgttttttttttaaaggaaatgcagcctagtcttgagaacataattttatataatcaattactaaatgttaaactattaccacacagcccataaaacagcatttgcgtttattgagagagaggatgtgccatcatgattaatgaaaactatcttttgagtttgaaaagaaattaatttgcagtgtttggattgtatatatggtgctaaaaataaattaatttactttataaaccttatctgtacattatacgatgtgatgaaatttgctttttatccaaatattttgtatcttgtaaatatggctaattataggaatgcctataatacatcttagattccttatatctaataagagttcaaagagttatgagttgaagtcttgaatgcaggaaactatctgatagtgttctaaaatttggttacttgggtttggatacccttagtgggatgatgtaaatagaggctagctacctaggcttgtctatagcaaccataatgttgatgtaagtaatgcggttactgaatcataagaaaatgccatctctttttagttgaaggaaaactctggaagtaggtgccattggtcattctgcagtgcactgcaaccattgtttcccctagtgccctcttttccctagggcattgctctcctattcccacgccttaacacagctctatacctagaagcagccagcccaggcatgcagtcacatttaatcacatcccccttctagagtgcttcaaaatgatgtagtccctcaacttggctaaagaatctcaatctcttgaaatttatttttttaatgtcatattcatctggtaaatatctactgtttgccaggcatttaagaatatggcaaagaacataaaagatggtgtcaccagattttggtcaccaatgagtacccgacccgttgccatgattaagagagaatgctttctattggagtttcaggaaatataatttgagaatactttaaagggaagtggaagtataagtgaatgatatttttcttttacatgtaaacaatgaagttatttcaaagttaagttttaaacaaaatacatgaagtagtgtctgccatacatgttaatattctacattcttgcttccttaaattaatatgtttgtgtgtatatatgtgcctcacacctgaattgaaaattaaagactggtttaaaagtggtttaaaagtgacatttaatgtttctccattacgtttggggtaaccagcctaagtggaatcttggaaggaaagtaagggaaaaacttgtatttgccttcaatgaattaaaccagtgatatgtgttaacgtatgaatgaaaggattgatggtgattttataattatatatattgccgcagtaaccagttaataaattgatagctaccattt

SEQ ID NO: 330921 - protein, 170 aa, Artificial Sequence
  derived and/or modified sequence
  misc_feature (1)..(1): Xaa can be any naturally occurring amino acid
XNGPHHDRCCTYNENNLVDGVYCLPIGHWIEATGHTNEMKHTTDFYFNIAGHQAMHYSRILPNIWLGSCPRQVEHVTIKLKHELGITAVMNFQTEWDIVQNSSGCNRYPEPMTPDTMIKLYREEGLAYIWMPTPDMSTEDEKRTADMCCSGMWEETADFGLGILDYLKQK

SEQ ID NO: 330922 - protein, 270 aa, Artificial Sequence
  derived and/or modified sequence
MRFRFGVVVPPAVAGARPELLVVGSRPELGRWEPRGAVRLRPAGTAAGDGALALQEPGLWLGEVELAAEEAAQDGAEPGRVDTFWYKFLKREPGGELSWEGNGPHHDRCCTYNENNLVDGVYCLPIGHWIEATGHTNEMKHTTDFYFNIAGHQAMHYSRILPNIWLGSCPRQVEHVTIKLKHELGITAVMNFQTEWDIVQNSSGCNRYPEPMTPDTMIKLYREEGLAYIWMPTPDMSTEDEKRTADMCCSGMWEETADFGLGILDYLKQK

SEQ ID NO: 330923 - DNA, 513 bp, Artificial Sequence
  derived and/or modified sequence
tagaatggacctcaccacgacaggtgctgtacctacaatgagaataacctggtggacggagtgtactgcttgccgatcggacattggattgaggctaccgggcatacgaacgagatgaagcatacaactgatttctacttcaacattgcaggccaccaggctatgcattattcacgcatcttgccaaacatttggttaggatcatgcccgaggcaagtggagcacgtcactattaagctgaagcatgagctgggaattacagcggtaatgaactttcagactgaatgggatatcgtccaaaattcttctgggtgcaatcgctatcccgaaccaatgacaccagatactatgatcaagttgtatcgcgaagaaggactggcgtatatatggatgccgaccccggacatgtccactgaagatgaaaaacgaaccgccgatatgtgctgcagcggcatgtgggaggaaacagctgacttcggactaggtattttggactatctgaaacaaaagtag

SEQ ID NO: 330924 - DNA, 813 bp, Artificial Sequence
  derived and/or modified sequence
atgcggttccggtttggagtggtggtcccccccgcagtggctggcgcgaggcctgagttgttggttgtgggctctaggcccgaattgggccggtgggagccacgtggcgctgtccggctaaggccagccggaacagccgccggggacggcgcactcgcgttgcaggagcccggcctttggcttggcgaggtagaactggcagccgaagaggcggcccaggatggggcagaacccggccgggtcgacacattttggtataaattcttgaagagggagccaggtggtgagctaagttgggaggggaacggcccccatcacgatcgttgttgtacttacaacgagaataatctcgtcgacggggtgtattgcctacccataggccattggatcgaggccacgggacatacaaacgagatgaaacatacaacagatttttattttaatatcgctggacatcaggcaatgcactattctcggatcctccccaacatctggctcggctcctgcccacgccaggtcgaacatgttactataaaattgaagcacgagctcggcattaccgcggtcatgaacttccagaccgagtgggatatcgtgcagaacagttcaggttgcaaccgctaccccgagcccatgactcccgacacgatgatcaagctctacagagaggagggtctagcttacatatggatgcccacacccgatatgtctacagaggacgaaaaacgtacggcagatatgtgctgctctggaatgtgggaggagacagctgacttcggcctgggaatcctcgattaccttaagcaaaagtag

SEQ ID NO: 330925 - DNA, 513 bp, Artificial Sequence
  derived and/or modified sequence
tgaaatggcccccaccacgaccgctgctgcacctacaatgaaaacaacctggtggatggagtgtactgcctgcccatcggccactggattgaggccaccggccacaccaatgagatgaagcacaccacagacttctacttcaacattgctggccaccaggccatgcactacagccgcatcctgcccaacatctggctgggcagctgcccccggcaggtggagcacgtgaccatcaagctgaagcatgagctgggcatcacagctgtgatgaacttccagacagagtgggacatcgtgcagaacagcagcggctgcaaccgctacccagagcccatgaccccagacaccatgatcaagctgtaccgggaggagggcctggcctacatctggatgcccaccccagacatgagcacagaagatgagaagaggacagctgacatgtgctgcagcggcatgtgggaggagacagctgactttggcctgggcatcctggactacctgaagcagaagtag

SEQ ID NO: 330926 - DNA, 813 bp, Artificial Sequence
  derived and/or modified sequence
atgaggttccgctttggagtggtggtgcccccagctgtggccggggcccggcctgagctgctggtggtgggcagcaggcctgagctgggccgctgggagcccagaggagctgtgcggctgcggcctgctggaacagctgctggagatggagccctggccctgcaggagcccggcctgtggctgggggaggtggagctggccgctgaggaggccgcccaggatggagctgagcccggccgggtggacaccttctggtacaagttcctgaagcgggagcctggaggagagctgtcctgggagggcaatggcccccaccacgaccgctgctgcacctacaatgaaaacaacctggtggatggagtgtactgcctgcccatcggccactggattgaggccaccggccacaccaatgagatgaagcacaccacagacttctacttcaacattgctggccaccaggccatgcactacagccgcatcctgcccaacatctggctgggcagctgcccccggcaggtggagcacgtgaccatcaagctgaagcatgagctgggcatcacagctgtgatgaacttccagacagagtgggacatcgtgcagaacagcagcggctgcaaccgctacccagagcccatgaccccagacaccatgatcaagctgtaccgggaggagggcctggcctacatctggatgcccaccccagacatgagcacagaagatgagaagaggacagctgacatgtgctgcagcggcatgtgggaggagacagctgactttggcctgggcatcctggactacctgaagcagaagtag

SEQ ID NO: 330927 - DNA, 513 bp, Artificial Sequence
  derived and/or modified sequence
tgaaacggcccccaccacgaccggtgctgcacctacaacgagaacaatctggttgatggggtatactgcctgcccatcggccattggatcgaagccaccggacacacaaatgaaatgaaacacacaacagacttttactttaatatcgcgggccaccaagccatgcactattcccgtatcctccccaacatctggttaggaagctgccctcgtcaggtcgagcatgttacaataaaactcaaacatgaacttggtatcactgcagtgatgaactttcagacagaatgggacattgtgcaaaattcatcgggatgtaatagataccccgagcctatgacgcctgacaccatgatcaaattgtacagggaagagggcctggcatacatctggatgcctacaccggacatgtcaacggaggatgagaaaagaacagccgacatgtgttgttcaggaatgtgggaggagaccgcggacttcgggctgggtattctggattacctcaagcagaagtag

SEQ ID NO: 330928 - DNA, 813 bp, Artificial Sequence
  derived and/or modified sequence
atgcggttccggttcggcgtggtggtgccccccgccgtggccggcgcacggcccgaattgctggttgttggctcgcgaccagaactgggacgatgggaaccacgaggcgccgttcggttgaggcctgcgggcacggccgccggcgacggggcactggctctgcaggagcccggactttggctgggcgaggtggagttggccgctgaggaggcggcacaagatggggcagaacccggacgcgtcgataccttctggtacaaatttttaaagcgagaacctggaggggaactcagctgggaaggcaatggaccccaccatgaccggtgttgcacatacaatgagaataatctggtggatggcgtgtattgcctccctataggccactggatagaggccacaggccacacgaacgaaatgaaacataccacggacttctatttcaatatagccggacatcaggcaatgcactactcccggattctgcctaacatttggctggggtcgtgtcctcgccaggtggaacacgtgaccatcaaactgaaacacgaactgggaataacagcggtgatgaattttcaaactgagtgggacattgtgcagaacagttccggatgcaatcggtaccccgagcctatgaccccagacaccatgatcaagttatacagggaagaaggtctcgcatatatttggatgcccaccccagacatgagcactgaggatgagaaaaggaccgcagacatgtgctgctccggtatgtgggaggagactgcagacttcggacttggcatacttgactatctgaagcaaaagtag

SEQ ID NO: 330929 - DNA, 513 bp, Artificial Sequence
  derived and/or modified sequence
tgaaacggaccccaccatgaccgatgctgcacgtataacgagaataacctagtggacggggtctattgcttgcctattggtcattggatcgaggcaaccgggcacaccaacgagatgaaacacacaactgatttttactttaacattgctggccaccaggctatgcactattcccgtattcttcccaacatctggctgggaagctgcccgaggcaagtagagcatgttacaatcaagctcaagcacgaacttggcattaccgctgttatgaattttcagaccgagtgggacattgtacagaactcttcaggatgcaacagataccccgagcccatgacaccagacactatgatcaagttatatcgcgaagaaggtctggcatacatttggatgcctaccccagacatgtctacagaggatgagaaacgcactgctgatatgtgttgctcaggcatgtgggaagaaacagcagatttcggcctgggcattctggattacttgaaacaaaagtag

SEQ ID NO: 330930 - DNA, 813 bp, Artificial Sequence
  derived and/or modified sequence
atgcgatttaggttcggggtggtggtgccgccagccgtggccggtgctcgacccgagctcctggtggtgggtagccgcccagaactagggagatgggaaccccgtggcgcagtccgactgagacccgctggaacggccgctggggatggagcactggctctacaagagcccggtctgtggctgggggaggttgaactggccgctgaggaagccgcacaagacggcgcagagcctgggcgagtagacaccttttggtataaatttttaaaacgggaacctggaggtgagctgtcatgggagggcaatggccctcatcatgatcggtgttgtacatacaacgaaaacaacttagtggatggggtctactgtctcccgattggccattggatagaggcgactggccacactaatgagatgaagcatactaccgacttctattttaacatcgcgggtcatcaggccatgcactatagtaggatcctgcccaatatctggctgggatcctgcccaagacaggttgagcatgttacaatcaaactgaagcatgaacttggcatcaccgccgtgatgaattttcagaccgaatgggatattgtgcaaaactcaagtggctgtaaccgatatccagagcccatgacccctgatactatgataaaattgtaccgagaggaagggctggcctacatatggatgcccactccggatatgtcaacagaggacgagaaacggacagctgacatgtgttgcagtggtatgtgggaggaaacagcggactttggactgggcatcttggattacctgaaacagaagtag

SEQ ID NO: 330931 - DNA, 513 bp, Artificial Sequence
  derived and/or modified sequence
tgaaacggcccccaccacgacagatgctgcacctacaacgagaacaacctggtggacggcgtgtactgcctgcccatcggccactggatcgaggccaccggccacaccaacgagatgaagcacaccaccgacttctacttcaacatcgccggccaccaggccatgcactacagcagaatcctgcccaacatctggctgggcagctgccccagacaggtggagcacgtgaccatcaagctgaagcacgagctgggcatcaccgccgtgatgaacttccagaccgagtgggacatcgtgcagaacagcagcggctgcaacagataccccgagcccatgacccccgacaccatgatcaagctgtacagagaggagggcctggcctacatctggatgcccacccccgacatgagcaccgaggacgagaagagaaccgccgacatgtgctgcagcggcatgtgggaggagaccgccgacttcggcctgggcatcctggactacctgaagcagaagtag

SEQ ID NO: 330932 - DNA, 813 bp, Artificial Sequence
  derived and/or modified sequence
atgagattcagattcggcgtggtggtgccccccgccgtggccggcgccagacccgagctgctggtggtgggcagcagacccgagctgggcagatgggagcccagaggcgccgtgagactgagacccgccggcaccgccgccggcgacggcgccctggccctgcaggagcccggcctgtggctgggcgaggtggagctggccgccgaggaggccgcccaggacggcgccgagcccggcagagtggacaccttctggtacaagttcctgaagagagagcccggcggcgagctgagctgggagggcaacggcccccaccacgacagatgctgcacctacaacgagaacaacctggtggacggcgtgtactgcctgcccatcggccactggatcgaggccaccggccacaccaacgagatgaagcacaccaccgacttctacttcaacatcgccggccaccaggccatgcactacagcagaatcctgcccaacatctggctgggcagctgccccagacaggtggagcacgtgaccatcaagctgaagcacgagctgggcatcaccgccgtgatgaacttccagaccgagtgggacatcgtgcagaacagcagcggctgcaacagataccccgagcccatgacccccgacaccatgatcaagctgtacagagaggagggcctggcctacatctggatgcccacccccgacatgagcaccgaggacgagaagagaaccgccgacatgtgctgcagcggcatgtgggaggagaccgccgacttcggcctgggcatcctggactacctgaagcagaagtag

SEQ ID NO: 330933 - DNA, 736 bp, Artificial Sequence
  derived and/or modified sequence
gcaatggacctcatcatgaccgttgctgtacttacaatgaaaacaacttggtggatggtgtgtattgtctcccaataggacactggattgaggccactgggcacaccaatgaaatgaagcacacaacagacttctattttaatattgcaggccaccaagccatgcattattcaagaattctaccaaatatctggctgggtagctgccctcgtcaggtggaacatgtaaccatcaaactgaagcatgaattggggattacagctgtaatgaatttccagactgaatgggatattgtacagaattcctcaggctgtaaccgctacccagagcccatgactccagacactatgattaaactatatagggaagaaggcttggcctacatctggatgccaacaccagatatgagcaccgaagatgagaagaggacagctgacatgtgctgctcggggatgtgggaagagactgcagattttggccttgggattctggattacttaaaacaaaagtaagacacaaatatctccctaaccttattatatctcgtagaagatggcagatgggtgacgactggtgcaagctcacacaggaaagaaaaatttcataagcattgaatagttgtgttactaattagtgggacaatcttcgtaactccttcttcccccacttctgcccaatatgtaataataggcatgctctgaataattgtactcaaataagaaattactcctccaaa

SEQ ID NO: 330934 - DNA, 1170 bp, Artificial Sequence
  derived and/or modified sequence
gagaactggacgatcgcctggcttagaagttttcctccctccccgaaccccgttttctcttccatttcttccggtcgcgtgtccccagcgcccacaggtggaaatcaaccgcccgcggggttgcggggcacaaagaggcagctagcggctccgctgaccccttcccgccggcctggacgaagtctgggctcgggagccgcgtgatgcatcccaaagaaggcgcagaacagcacgtgttctccccggtgcccggggctcccacaccaccgcccaatcgctgcggccgcctagtgctcgggccgcgcctgccggccgcggggactccgggcccgggtattcgcgccgccgccgcccgccatgcgcttccgctttggggtggtggtgccacccgccgtggccggcgcccggccggagctgctggtggtggggtcgcggcccgagctggggcgttgggagccgcgcggtgccgtccgcctgaggccggccggcaccgcggcgggcgacggggccctggccctgcaggagccgggcctgtggctcggggaggtggagctggcggccgaggaggcggcgcaggacggggcggagccgggccgcgtggacacgttctggtacaagttcctgaagcgggagccgggaggagagctctcctgggaaggcaatggacctcatcatgaccgttgctgtacttacaatgaaaacaacttggtggatggtgtgtattgtctcccaataggacactggattgaggccactgggcacaccaatgaaatgaagcacacaacagacttctattttaatattgcaggccaccaagccatgcattattcaagaattctaccaaatatctggctgggtagctgccctcgtcaggtggaacatgtaaccatcaaactgaagcatgaattggggattacagctgtaatgaatttccagactgaatgggatattgtacagaattcctcaggctgtaaccgctacccagagcccatgactccagacactatgattaaactatatagggaagaaggcttggcctacatctggatgccaacaccagatatgagcaccgaagatgagaagaggacagctgacatgtgctgctcggggatgtgggaagagactgcagattttggccttgggattctggattacttaaaacaaaagtaa

SEQ ID NO: 330935 - protein, 713 aa, Artificial Sequence
  derived and/or modified sequence
TDEQTDFGLGDAHQSDGLNLEREIVSQTTATQEKSQEELPTTNNSVSKEIWLDFEDFCVCFQNIYIFHKPSSYCLNFQKSEFKFSEERVSYYLFVDSLKPIELLVCFSALVRWGEYGALTKDSPPIEPGLLTAETFSWKSLKPGSLVLKIHTYATKATVVRLPVGRHMLLFNAYSPVGHSIHICSMVSFVIGDEHVVLPNFEPESCRFTEQSLLIMKAIGNVIANFKDKGKLSAALKDLQTAHYPVPFHDKELTAQHFRVFHLSLWRLMKKVQITKPPPNFKFAFRAMVLDLELLNSSLEEVSLVEWLDVKYCMPTSDKEYSAEEVAAAIKIQAMWRGTYVRLLMKARIPDTKENISVADTLQKVWAVLEMNLEQYAVSLLRLMFKSKCKSLESYPCYQDEETKIAFADYTVTYQEQPPNSWFIVFRETFLVHQDMILVPKVYTTLPICILHIVNNDTMEQVPKVFQKVVPYLYTKNKKGYTFVAEAFTGDTYVAASRWKLRLIGSSAPLPCLSRDSPCNSFAIKEIRDYYIPNDKKILFRYSVKVLTPQPATIQVRTSKPDAFIKLQVLENEETMVSSTGKGQAIIPAFHFLKSEKGLSSQSYGERHEELINLGSPDSHTISEGQKSSVTSKTTRKGKEKSSEKEKTAKEKQAPRFEPQISTVHPQQEDPNKPYWILRLLRLVCITLAGSLRKHLMLRVRLYLKAKLNQKKK

SEQ ID NO: 330936 - protein, 235 aa, Artificial Sequence
  derived and/or modified sequence
MHEHATPVTSAYGERHEELINLGSPDSHTISEGQKSSVTSKTTRKGKEKSSEKEKTAKEKQAPRFEPQISTVHPQQEDPNKPYWILRLVTEHNESELFEVKKDTERADEIRAMKQAWETTEPGRAIKASQARLHYLSGFIKKTSDAESPPISESQTKPKEEVETAARGVKEPNSKNSAGSESKEMTQTGSGSAVWKKWQLTKGLRDVAKSTSSESGGVSSPGKEEREQSTRKENI

SEQ ID NO: 330937 - DNA, 1415 bp, Artificial Sequence
  derived and/or modified sequence
atgcatgaacatgccacaccagtgacctcagcttatggtgaaagacacgaggagttaattaacttaggaagcccagactcccacactattagtgagggacaaaaatcttcagtaacttccaaaacaacaaggaaaggcaaagaaaagtcttctgagaaagaaaagacagccaaagaaaaacaagcacctcgctttgagcctcagatatccactgttcaccctcaacaagaagacccaaataaaccctactggattttgaggttggtcactgaacacaatgaatcagaattatttgaagtgaaaaaggatacagaaagggcagatgaaatccgagccatgaaacaagcctgggagacaactgagccaggaagagcaatcaaggcttctcaggctcgtttgcattaccttagcgggttcattaagaaaacatctgatgctgagagtccgcctatatctgaaagccaaactaaaccaaaagaagaagtagaaacagctgcacgtggcgtaaaagaaccaaactcaaagaattctgcaggttcagagagcaaagagatgacacaaacaggatcagggagtgcggtgtggaagaagtggcaattgaccaaaggcttgagggatgtggcaaaatccacgagtagcgaaagtggaggagtgtcttcaccagggaaagaagagcgcgagcagagcacacggaaggaaaacattcaaacaggacctcgtacacgatctccaacaattttggaaacatctccacgacttattcgaaaagcactagaatttatggatttaagtcaatatgttcggaaaacagatacagatcctctgctgcaaacagatgaattgaatcagcagcaggcaatgcaaaaggcggaagaaattcatcagtttcgacagcataggaccagagtccttagcattcgaaacattgaccaagaagagcggttgaagttaaaggatgaagtcctggatatgtataaggaaatgcaggactccttagatgaagcccgacagaaaattttcgacatccgggaagagtacagaaacaaattgctggaagctgagcacctaaagctggaaactctggctgctcaggaagcagccatgaagctggagacagaaaagatgaccccagctcctgacacacagaaaaaaaagaaaggaaagaaaaagtaaccaggggatgtccaatactaccctgcttctggagagaaaaaatctatttgtaatgatctttaactgcctgctgttaagatattaggccaaatgaaaatagaaatttctctttcttagaaatattttaatgctaacttgttagttttcctcagaaagctagtatttgaagccatttgagtttaagatgctctaatttcaataaaatagcttccaaatatttaataaaatatgtttgacactct

SEQ ID NO: 330938 - DNA, 708 bp, Artificial Sequence
  derived and/or modified sequence
atgcacgagcacgccacccccgtgaccagcgcctacggcgagagacacgaggagctgatcaacctgggcagccccgacagccacaccatcagcgagggccagaagagcagcgtgaccagcaagaccaccagaaagggcaaggagaagagcagcgagaaggagaagaccgccaaggagaagcaggcccccagattcgagccccagatcagcaccgtgcacccccagcaggaggaccccaacaagccctactggatcctgagactggtgaccgagcacaacgagagcgagctgttcgaggtgaagaaggacaccgagagagccgacgagatcagagccatgaagcaggcctgggagaccaccgagcccggcagagccatcaaggccagccaggccagactgcactacctgagcggcttcatcaagaagaccagcgacgccgagagcccccccatcagcgagagccagaccaagcccaaggaggaggtggagaccgccgccagaggcgtgaaggagcccaacagcaagaacagcgccggcagcgagagcaaggagatgacccagaccggcagcggcagcgccgtgtggaagaagtggcagctgaccaagggcctgagagacgtggccaagagcaccagcagcgagagcggcggcgtgagcagccccggcaaggaggagagagagcagagcaccagaaaggagaacatctag

SEQ ID NO: 330939 - DNA, 708 bp, Artificial Sequence
  derived and/or modified sequence
atgcacgagcacgccactcctgtgacatccgcctacggcgaaagacatgaagagctcatcaatcttggttcacccgacagtcacacaatctcagagggccagaagtctagcgtgacctctaagaccacaagaaaaggcaaggagaagtcttcagagaaggagaaaacagcgaaagaaaaacaagcccctaggtttgaaccgcagatctccacagtccatcctcagcaggaggaccccaataaaccgtactggatacttcgactggttactgaacataacgaaagcgagcttttcgaagttaagaaggataccgagcgagctgacgagattagggctatgaagcaagcctgggaaaccacggagcccggccgcgccatcaaagcctcccaggccaggctgcactacctgtctggcttcatcaaaaagacaagcgacgcagaaagtccccctatctcagagtcgcagaccaaacctaaagaggaagttgagacagctgcacgcggcgttaaggagccaaacagtaaaaactccgcaggcagcgaatccaaagagatgacccagactggctcggggtctgccgtgtggaagaagtggcagctgacaaaaggattaagagacgtcgccaagtccacctcaagtgaatctggaggcgtcagttctccaggtaaagaagagagagagcagtcgacccggaaggagaatatctag

SEQ ID NO: 330940 - DNA, 708 bp, Artificial Sequence
  derived and/or modified sequence
atgcatgagcacgccacccctgtgaccagcgcctacggggagagacatgaggagctgatcaacctgggcagcccagacagccacaccatcagcgagggccagaagagctctgtgaccagcaagaccaccaggaagggcaaggagaagagcagcgagaaggagaagacagccaaggagaagcaggcccccaggtttgagccccagatcagcacagtgcacccccagcaggaggaccccaacaagccctactggatcctgcggctggtgacagagcacaatgaaagtgagctgtttgaggtgaagaaggacacagaaagagcagatgagatccgggccatgaagcaggcctgggagaccacagagcccggccgggccatcaaggccagccaggcccggctgcactacctgagcggcttcatcaagaagaccagtgatgctgagagcccccccatcagcgagagccagaccaagcccaaggaggaggtggagacagctgcccggggcgtgaaggagcccaacagcaagaacagcgctggcagcgagagcaaggagatgacccagacaggcagcggcagcgctgtgtggaagaagtggcagctgaccaagggcctgagagatgtggccaagagcaccagcagcgagagcggaggagtgagcagccctgggaaggaggagcgggagcagagcaccaggaaagaaaacatctag

SEQ ID NO: 330941 - DNA, 708 bp, Artificial Sequence
  derived and/or modified sequence
atgcacgagcacgccacccccgtgaccagcgcctacggcgagcggcacgaagaactgatcaacctcgggtcacccgattctcatacaattagcgagggccagaagtccagtgtgacttcaaagaccacacgaaaggggaaggaaaagtcaagtgaaaaggaaaagactgctaaagagaagcaggctcctaggtttgagccccagatcagtaccgtgcacccccagcaggaggatcccaacaagccatattggatcttacgactcgtaacagaacacaacgagagcgagctcttcgaggtaaagaaagatacagagagggcagacgagatccgggcgatgaagcaggcatgggaaaccactgaacctggcagggctattaaagcttctcaggccagattacactacctgagtgggttcatcaagaagacgagcgacgcggagagtcctccaataagtgaaagtcaaacaaagcctaaggaagaggtcgagactgctgcccggggggtcaaagagcccaacagcaaaaacagtgcagggtctgagagtaaagaaatgacacagactggtagcggcagtgctgtgtggaagaagtggcaattgacaaaaggactccgggatgtagcaaagagtactagctccgagagcggcggggtcagctccccgggaaaggaagagcgggaacagtccactagaaaggagaatatctag

SEQ ID NO: 330942 - DNA, 708 bp, Artificial Sequence
  derived and/or modified sequence
atgcacgaacatgcaacccccgtgaccagcgcttatggcgaaaggcacgaagaactcataaaccttgggagccccgacagtcacactattagcgagggccagaaatcaagcgtgacctccaagaccactcgaaaaggcaaggaaaaatcttccgagaaggagaaaaccgccaaagaaaagcaggccccacggtttgaaccacaaatctccacggttcaccctcagcaggaggaccctaacaaaccttactggatcctacggctcgtaaccgaacacaatgaatccgaactgtttgaggtgaagaaggatactgagcgggctgacgaaattagggccatgaagcaggcatgggaaaccactgagcccggaagagcaattaaagcaagccaagccaggctacactacctctccggatttatcaagaagacatccgatgccgagtctcccccaatttcagagtctcagacgaagcccaaagaagaagtcgagacagccgctcggggagtgaaagagcccaacagtaagaattcagcagggagtgaatccaaagagatgacccagaccgggagtgggagtgccgtatggaagaagtggcagctcactaaagggctgagggacgtagcaaagtcaacttcatcggagtctggtggtgtgtcttcacccggaaaggaagaacgggaacagtccactcgaaaggagaatatctag

SEQ ID NO: 330943 - protein, 223 aa, Artificial Sequence
  derived and/or modified sequence
MLSPNDKMLGKLDPFYQPSVSKQKTSAEIISEARNALRTVRTQRPFTPQEAQRKLFGPASSRTSENRPPSSFSLHASSFESSDSRPISGTRLSPLELKPKVPASPTREEDSCFSFPKPPVDPAKIRRVSNARARLFRAASQRALLPDRSLPPSDSKKTVESKETVMMGDSMVKINGIYLTKSNAICHLKSHPLQLTDDGGFSEIKEQEMFKGTTSLPSHLKNG

SEQ ID NO: 330944 - DNA, 672 bp, Artificial Sequence
  derived and/or modified sequence
atgctgagccccaacgacaagatgctgggcaagctggaccccttctaccagcccagcgtgagcaagcagaagaccagcgccgagatcatcagcgaggccagaaacgccctgagaaccgtgagaacccagagacccttcaccccccaggaggcccagagaaagctgttcggccccgccagcagcagaaccagcgagaacagaccccccagcagcttcagcctgcacgccagcagcttcgagagcagcgacagcagacccatcagcggcaccagactgagccccctggagctgaagcccaaggtgcccgccagccccaccagagaggaggacagctgcttcagcttccccaagccccccgtggaccccgccaagatcagaagagtgagcaacgccagagccagactgttcagagccgccagccagagagccctgctgcccgacagaagcctgccccccagcgacagcaagaagaccgtggagagcaaggagaccgtgatgatgggcgacagcatggtgaagatcaacggcatctacctgaccaagagcaacgccatctgccacctgaagagccaccccctgcagctgaccgacgacggcggcttcagcgagatcaaggagcaggagatgttcaagggcaccaccagcctgcccagccacctgaagaacggctag

SEQ ID NO: 330945 - DNA, 672 bp, Artificial Sequence
  derived and/or modified sequence
atgctctctcctaacgataagatgctgggaaagctcgacccattttaccagccgagcgtgagtaagcagaaaacatcagcagagatcatttcagaagcccgcaatgcactgcgcactgtcagaacacagcgccctttcacgcctcaggaggctcaacggaaactctttggtccagcatctagtcgcacatccgaaaacagaccaccctcgtcattctctctgcacgcgagctcttttgaatcaagcgatagccgccctatttccggcacaagactaagccctctggaacttaaaccaaaggttcctgcgtcacccacacgagaggaagactcctgcttctccttccccaagccccctgttgaccccgccaaaatccgtagggtgtcgaacgcacgcgcgcgcctatttagggcagcatcccagagggccctcttaccggatcgctctttgccgccttctgatagcaaaaagaccgtggaatcaaaggagaccgtgatgatgggtgattccatggtgaagatcaacggaatctacctgacaaagagtaacgcgatttgccatctcaagagtcatcccctgcaattaaccgatgatggcggcttctctgagatcaaggagcaggagatgtttaaggggacgacgtccctaccttcacatttgaaaaatgggtag

SEQ ID NO: 330946 - DNA, 672 bp, Artificial Sequence
  derived and/or modified sequence
atgctgagccccaatgacaagatgctgggcaagctggaccccttctaccagcccagcgtgtccaagcagaagaccagcgctgagatcatcagcgaggccagaaatgccctgaggacagtgaggacccagaggcccttcaccccccaggaggcccagaggaagctgtttggacctgccagcagcaggaccagtgaaaatcggccccccagcagcttcagcctgcacgccagcagctttgagagcagtgacagccggcccatcagcggcacccggctgagccccctggagctgaagcccaaggtgcctgccagccccacccgggaggaggacagctgcttctccttccccaagccccctgtggaccctgccaagatccggcgggtgtccaatgcccgggcccggctcttccgggccgccagccagagggccctgctgcctgacaggagcctgcccccaagtgacagcaagaagacagtggagagcaaggagaccgtgatgatgggagacagcatggtgaagatcaatggcatctacctgaccaagagcaatgccatctgccacctgaagagccaccccctgcagctgacagatgatggcggcttcagcgagatcaaggagcaggagatgttcaagggcaccaccagcctgcccagccacctgaagaatggatag

SEQ ID NO: 330947 - DNA, 672 bp, Artificial Sequence
  derived and/or modified sequence
atgctgagccccaacgacaagatgctgggcaagctggaccccttctaccagccttccgtgtctaaacagaagacatctgcggaaataatatccgaagcacgcaatgctctcagaactgtaagaacacagaggccattcacaccacaggaagcgcagaggaagttgtttggccctgcttcatctaggactagtgagaatagacccccgtccagtttctcattgcatgcatctagttttgaatcttccgattccaggccaatctctggaacacggctctctccattagagctgaagccaaaagtgcccgcgtctcccacacgcgaggaggactcttgctttagctttcccaagccacctgtggaccctgccaaaattcgccgggtttccaacgcgcgggctaggctcttccgagcagcctctcaaagggctctcctccctgacagatccttgccgccatcggattccaaaaaaactgtggaaagcaaggagaccgtgatgatgggcgatagtatggtcaagattaacgggatctatctgactaagtctaatgcaatctgccacctgaaaagccaccctcttcagctcaccgatgatggcggattttcagagataaaagaacaggagatgtttaagggaaccacgtccctgccctcccatctaaagaacggatag

SEQ ID NO: 330948 - DNA, 672 bp, Artificial Sequence
  derived and/or modified sequence
atgttgagccctaatgataaaatgttaggtaaacttgaccccttctatcagccatcagtgtcgaagcagaaaacaagtgcagagattatctccgaggctcgcaacgcccttcgtacggtcaggacacagcgcccattcacgccccaggaggcgcagaggaagctgttcggcccagcctccagtcggacctcggagaacaggcctccctcatcttttagcctgcacgcgtcttccttcgagtcctccgacagcagacccatttctggaacacgcctgtcgccacttgaattgaaaccaaaggtccccgcttcccccacgcgggaagaagattcatgcttctcttttcctaaacctcctgttgatccagccaaaatccgacgcgtgtccaatgccagagcaagactgtttcgcgcagccagccagcgtgcgctactgcccgacaggtctttgccgccatctgattctaaaaagacagtggaatccaaggagacagtcatgatgggtgacagcatggtaaaaataaacggaatctatctgaccaagtccaacgccatttgccacttaaagagtcatccactccaactgaccgatgacggaggcttcagcgagattaaggaacaagagatgttcaagggcactacgagccttcctagtcatttaaagaatggatag

SEQ ID NO: 330949 - DNA, 836 bp, Artificial Sequence
  derived and/or modified sequence
gctggctgcggggcgaagtgggagggtggccgggcggggtgaggatgctgctgcgccctgccctggccgggaccgtggaggagcgggcactgccgtgggtgggggagccgctgtccgagcgggagggtgtggtgtctatctgaagaatattttactttcaaaggaaagatgctgtctccaaatgataaaatgttaggaaaactggatccattttatcaaccttcagtgtccaagcagaagaccagtgcagaaatcataagtgaagcaagaaatgcattaagaacagttagaacccaaagaccatttacaccacaggaggctcaaagaaaactattcggacctgcatcctcaagaacatcagaaaatagacctccttcctccttcagcctccatgcatccagttttgagtcatctgattccaggcctatctctggcacacgtcttagtccactagagctgaaaccgaaagttccagcatctcccaccagagaggaggattcctgcttttcctttcctaagcccccagtggaccctgcgaagattagaagagtaagcaacgccagggctcgcttattcagggctgcctcccagcgggcccttctgccggacagatcccttcctccctccgactcaaagaagacagtggaatccaaagaaacagttatgatgggggactctatggtgaaaataaatgggatttatttaacaaaatcaaatgctatttgccacttaaagagtcacccacttcagctaactgatgatggaggcttcagtgaaataaaggagcaagaaatgttcaaaggaacaacatctttaccatctcatctcaagaatgg

SEQ ID NO: 330950 - protein, 1831 aa, Artificial Sequence
  derived and/or modified sequence
MAPEAGATLRAPRRLSWAALLLLAALLPVASSAAASVDHPLKPRHVKLLSTKMGLKVTWDPPKDATSRPVEHYNIAYGKSLKSLKYIKVNAETYSFLIEDVEPGVVYFVLLTAENHSGVSRPVYRAESPPGGEWIEIDGFPIKGPGPFNETVTEKEVPNKPLRVRVRSSDDRLSVAWKAPRLSGAKSPRRSRGFLLGYGESGRKMNYVPLTRDERTHEIKKLASESVYVVSLQSMNSQGRSQPVYRAALTKRKISEEDELDVPDDISVRVMSSQSVLVSWVDPVLEKQKKVVASRQYTVRYREKGELARWDYKQIANRRVLIENLIPDTVYEFAVRISQGERDGKWSTSVFQRTPESAPTTAPENLNVWPVNGKPTVVAASWDALPETEGKVKASKADVEQNTEDNGKPEKPEPSSPSPRAPASSQHPSVPASPQGRNAKDLLLDLKNKILANGGAPRKPQLRAKKAEELDLQSTEITGEEELGSREDSPMSPSDTQDQKRTLRPPSRHGHSVVAPGRTAVRARMPALPRREGVDKPGFSLATQPRPGAPPSASASPAHHASTQGTSHRPSLPASLNDNDLVDSDEDERAVGSLHPKGAFAQPRPALSPSRQSPSSVLRDRSSVHPGAKPASPARRTPHSGAAEEDSSASAPPSRLSPPHGGSSRLLPTQPHLSSPLSKGGKDGEDAPATNSNAPSRSTMSSSVSSHLSSRTQVSEGAEASDGESHGDGDREDGGRQAEATAQTLRARPASGHFHLLRHKPFAANGRSPSRFSIGRGPRLQPSSSPQSTVPSRAHPRVPSHSDSHPKLSSGIHGDEEDEKPLPATVVNDHVPSSSRQPISRGWEDLRRSPQRGASLHRKEPIPENPKSTGADTHPQGKYSSLASKAQDVQQSTDADTEGHSPKAQPGSTDRHASPARPPAARSQQHPSVPRRMTPGRAPQQQPPPPVATSQHHPGPQSRDAGRSPSQPRLSLTQAGRPRPTSQGRSHSSSDPYTASSRGMLPTALQNQDEDAQGSYDDDSTEVEAQDVRAPAHAARAKEAAASLPKHQQVESPTGAGAGGDHRSQRGHAASPARPSRPGGPQSRARVPSRAAPGKSEPPSKRPLSSKSQQSVSAEDDEEEDAGFFKGGKEDLLSSSVPKWPSSSTPRGGKDADGSLAKEEREPAIALAPRGGSLAPVKRPLPPPPGSSPRASHVPSRLPPRSAATVSPVAGTHPWPQYTTRAPPGHFSTTPMLSLRQRMMHARFRNPLSRQPARPSYRQGYNGRPNVEGKVLPGSNGKPNGQRIINGPQGTKWVVDLDRGLVLNAEGRYLQDSHGNPLRIKLGGDGRTIVDLEGTPVVSPDGLPLFGQGRHGTPLANAQDKPILSLGGKPLVGLEVIKKTTHPPTTTMQPTTTTTPLPTTTTPRPTTATTRRTTTTRRTTTRRPTTTVRTTTRTTTTTTPTPTTPIPTCPPGTLERHDDDGNLIMSSNGIPECYAEEDEFSGLETDTAVPTEEAYVIYDEDYEFETSRPPTTTEPSTTATTPRVIPEEGAISSFPEEEFDLAGRKRFVAPYVTYLNKDPSAPCSLTDALDHFQVDSLDEIIPNDLKKSDLPPQHAPRNITVVAVEGCHSFVIVDWDKATPGDVVTGYLVYSASYEDFIRNKWSTQASSVTHLPIENLKPNTRYYFKVQAQNPHGYGPISPSVSFVTESDNPLLVVRPPGGEPIWIPFAFKHDPSYTDCHGRQYVKRTWYRKFVGVVLCNSLRYKIYLSDNLKDTFYSIGDSWGRGEDHCQFVDSHLDGRTGPQSYVEALPTIQGYYRQYRQEPVRFGNIGFGTPYYYVGWYECGVSIPGKW

SEQ ID NO: 330951 - DNA, 6359 bp, Artificial Sequence
  derived and/or modified sequence
ctcagtggcggagcgcggctgccggtgtgcggccgggagcgatcgccgcggggcaggggcgcggcgggcaccgcgcagagcgcgcagaacagacggacggcggcggggacccgacggcggcgcctcggcactccccagactccggccagcgcccccctgccagccgcaagcacccagccccggcccaccccgggctctcgatggcccccgaggccggggcgaccctgcgcgcgccgcgccggctgtcctgggcggcgctgctgctcttggccgcgctgctccccgtcgcctcctcggcggcggcctcagttgaccacccactgaagccaaggcatgtgaaactgctgtccactaaaatgggcctgaaagtcacgtgggacccacccaaagatgctaccagtagacctgtggagcattacaacattgcctatgggaagtcactgaaaagtcttaaatacatcaaggtgaatgcggagacatactccttccttattgaggatgtggagccgggggtagtgtactttgtgctgcttactgcagaaaaccacagtggagtgagccgtcctgtttacagagctgaaagcccacctggaggtgaatggatcgagattgatggttttcccattaagggtccaggaccatttaatgaaaccgtcacagaaaaggaagtgcccaacaagcccttgcgtgtgcgtgtccggtcctcagatgacaggctgtccgttgcgtggaaggcaccacgcctgtctggagccaagagtccacgcagatcacggggttttctcctgggctacggggagagtggccggaagatgaattatgttccactgacaagagatgaacggacacacgaaattaaaaagctagcctcggaatccgtgtatgtggtctccctgcagtccatgaactctcagggccggagccaaccagtctacagggctgccctaacaaagcgaaagatttcagaagaggacgaattggatgtacctgacgacatcagcgtccgggttatgtcatctcagtctgtgcttgtgtcctgggtggatcctgttctggaaaaacagaagaaagttgttgcatcaagacagtacaccgtgcgctatcgagagaagggggaattggccaggtgggattataagcagatcgctaacaggcgtgtgctgattgagaacctgattccagacactgtgtatgaatttgcagtccgtatttcacagggtgaaagagatggcaaatggagtacgtcagtcttccaaagaacaccagaatctgcccctaccacagctcctgaaaacttgaacgtctggccagtcaatggcaaacctacagttgtcgctgcatcttgggatgcgctaccagagactgaggggaaagtgaaagccagtaaggcggatgttgagcagaacacggaggacaatgggaaacccgaaaaacctgagccttcctcaccttctcccagagctccagcttcctcccaacacccctctgtgcctgcttctccccaagggagaaatgccaaggaccttcttcttgacttgaagaacaaaatattggctaatggtggggcgccccgaaaaccccagcttcgcgccaagaaggcagaggagctggatcttcagtcgacagaaatcactggggaggaggagctgggttcccgggaggactcgcccatgtcaccctcagacacccaagaccagaaacggaccctgaggccgccaagtagacacggccactcggtggttgctcccggcaggactgcagtgagggcccggatgccagcgctgccccgaagggaaggcgtagataagcctggcttttccctggccacgcagccccgcccaggggcgcccccctcggcttcggcctctcctgcccaccacgcgtccacccagggcacctctcatcgtccttccctgcctgccagcttgaatgacaacgacttggtggactcagacgaagatgagcgcgctgtgggctccctccaccccaagggcgccttcgcccagccccggccagccctgtcccccagccgccagtccccgtccagcgttctccgcgacagaagctctgtgcaccccggcgcaaagccagcctcgccggcccggaggaccccccattcaggggccgcagaggaagattccagtgcctcagccccaccctcaagactttctccaccccatgggggatcatctcggctgctgcccacccagccacacctgagctctccactttccaagggcgggaaggatggtgaggacgccccagccaccaactccaatgcgccatcacggtccaccatgtcctcctccgtctcttctcatctctcgtccaggacgcaggtctctgagggagcggaggcttctgatggtgaaagccacggtgacggcgatagggaagacggcggaaggcaggcggaggccacggcccagacgctgcgggcccggcctgcctctggacacttccatttgctcagacacaaaccctttgctgccaacgggaggtctccaagcaggttcagcattgggcggggacctcggctgcagccctccagctccccacagtcgactgtgccctcccgagcccaccccagggttccctctcactctgattcccaccctaagcttagctcaggtatccatggagacgaggaggatgagaagccgcttcctgccaccgttgtcaatgaccacgtgccttcctcctccaggcagcccatctcccggggctgggaggacttaaggagaagcccgcagagaggggccagcctgcatcggaaggaacccatcccagagaaccccaaatccacaggggcagatacacatcctcagggcaagtactcctccctggcctccaaggctcaggatgttcaacagagcacagacgcggacacggagggtcattctcccaaagcacagccagggtccacagaccgccacgcgtcccctgctcgtccgcccgcagcacggtcacagcagcatcccagtgttcccagaaggatgacacccggccgggccccacaacagcagccccctcctcccgtcgccacgtcccagcaccacccgggaccccagagcagagacgcgggtcggtcaccttcccagcccaggctctcactgacccaggccgggcggccccgccccacgtcgcagggccgctcccactcctcctcggacccttacacggcgagctccagagggatgctccccacggccctccagaaccaggacgaggatgcccagggcagctacgacgacgacagcacagaagtcgaggcccaggatgtgcgggcccccgcgcacgccgcgcgcgccaaggaggcagctgcgtcccttcccaagcaccagcaggtggagtctcccacaggcgcaggggcaggtggcgaccacaggtcccagcgcggacatgcggcctcccccgccaggcccagccgacccggcggcccccagtcccgcgcccgggtacccagcagggcagcgccggggaagtcggagcctccttccaagcggcccctgtcctccaagtcccagcagtcggtctcagccgaggacgacgaggaggaggacgcgggattttttaaaggcgggaaagaagaccttctgtcttcctctgtgccaaagtggccctcttcctccactcccaggggcggcaaagacgccgatgggagcctcgccaaggaagagagggagcctgccatcgcgcttgcccctcgcggagggagcctggctcctgtgaagcgacctctccccccacctccaggcagctcccccagggcctcccacgtcccttcccgactgccgcctcgcagcgctgccaccgtgagccccgtcgcgggcacccacccctggccgcagtacaccacgcgcgccccacctggccacttctccaccaccccgatgctgtccttgcgccagaggatgatgcatgccagattccgtaaccctctctcccgacagcctgccagaccctcttacagacaaggttataatggcagaccaaatgtagaagggaaagtccttcctggtagtaatggaaaaccgaatggacagagaattatcaatggccctcaaggaacaaagtgggttgtggaccttgatcgtgggttagtattgaatgcagaaggaaggtacctccaagattcacatggaaatcctcttcggattaaactaggaggagatggtcgaaccattgtagatctggaagggacccccgtggtgagtcctgacggcctcccactctttgggcaggggcgacatggcacacctctggccaatgcccaagataagccaattttgagtcttggaggaaagccgctggtgggcttggaggtcatcaaaaaaaccacccatccccctaccactaccatgcagcccaccactactacgacgcccctgcctaccactacaaccccgaggcccaccactgccaccacccgccgcacgaccaccacccgccgcacgaccaccaggcgtccaacaaccacagtccgaaccactacgcggacaaccaccaccaccacccccacacccaccactcccatccccacctgtccccctgggaccttggaacggcacgacgatgatggcaacctgataatgagctccaatgggatcccagagtgctacgctgaagaagatgagttctcaggcttggagactgacactgcagtacctacggaagaggcctacgttatatatgatgaagattatgaatttgagacgtcaaggccaccaaccaccactgagccttcgaccactgctaccacaccgagggtgatcccagaggaaggcgccatcagttcctttcctgaagaagaatttgatctggctggaaggaaacgatttgttgctccttacgtgacgtacctaaataaagacccatcagccccgtgctctctgactgatgcactggatcacttccaagtggacagcctggatgaaatcatccccaatgacctgaagaagagtgacctgcctccccagcatgctccccgcaacatcaccgtggtggccgtggaaggttgccactcatttgtcattgtggactgggacaaagccaccccaggagatgtggtcacaggttacttggtttacagtgcatcctatgaagacttcatcaggaacaagtggtccactcaagcttcatcagtaactcacttgcccattgagaacctaaagcccaacacgaggtattattttaaagtgcaagcacaaaatcctcatggctacggacctatcagcccttcggtctcatttgtcaccgaatcagataatcctctgcttgttgtgaggcccccaggcggtgagcctatctggatcccattcgctttcaaacatgatcccagctacacggactgccatggacggcaatatgtgaagcgcacgtggtatcgaaagttcgtgggagttgttctttgtaattcactgaggtataaaatctacctcagtgacaacctgaaagatacattctacagcattggagacagctggggaagaggtgaagaccattgccaatttgtggattcacaccttgatggaagaacagggcctcagtcctatgtagaagccctccctactattcaaggctactatcgccagtatcgtcaggagcctgtcaggtttgggaacatcggcttcggaaccccctactactatgtgggctggtacgagtgtggggtctccatccctggaaagtggtaatcacaggaccgtcatgctgcaagcttgccctgcccagccccaccaactaagtcgcactaggggctgtgagcaaagacagccagcgtgctcagccccgctgccctaggtgccaggaaggtcatagatggacactggccattctggtcatctcagtctggaactcagtcccacttcttggcctggacaatgaacaggattcagttttgctgttaactttgcttctctacttttttttgtttgtttgtaatagcacatcccagagacatcagaaaccagcaactgattcagtgtgatttccagactttttaggcatgaaattcggacacttcagtatttccaggaatagcatatgcacgctgttcttgcttcatggaatgctacatgctttctgtttttctcattttggatttctccaaaactaactgaatttaagcttcaggtccctttgtatgcagtagaaaggaattattaaaaacaccaccaaagaaaataaatatatcctacttgaaatttactctatggacttacccactgctagaataaatgtatcaaatcttatttgtaaattctcaattttgatatatatatgtatatatgcatatacatatccacacttgtctgcaagaatattgattaaaattgctaaatttgtacttgttcacc

SEQ ID NO: 330952 - DNA, 5496 bp, Artificial Sequence
  derived and/or modified sequence
atggcccctgaggctggtgctaccctgcgggcacctaggaggttgagctgggccgcacttctcctcctggctgcattgttgcccgtcgcaagttccgccgctgcaagtgtggatcaccccctcaaacctagacatgtgaagctgctgtccactaagatgggattgaaagttacttgggatccccccaaagatgccacctccaggcctgtggaacactataacatcgcatacggcaagagtcttaagtcgcttaaatacatcaaggtgaatgccgagacatatagtttcctgatcgaggacgtagagcccggcgtagtgtatttcgtgcttctgacggcagagaatcactctggggtgagtaggccagtgtatcgcgccgagtcaccacctggcggggagtggattgagattgatggtttccccatcaagggtcccggaccttttaatgaaacggtcacagagaaggaggtgccaaataagccactccgcgtcagagtacgcagcagcgatgaccggttatctgtggcctggaaggcaccccgcctctccggcgctaaatcacctcgaaggagccgaggcttcctcttgggatacggtgagagcggcagaaaaatgaactatgtgcccctcaccagggatgagaggacgcacgagattaagaaattggcaagtgagagcgtttacgtggtgtcactccagtccatgaatagtcagggcagaagtcaaccagtctatagagccgcactgactaagcggaagataagtgaggaggatgaacttgacgtgcccgacgacatctcagtcagagtgatgtccagccagtcggtgctggtttcatgggtggaccccgtgctagaaaagcagaagaaagtggtcgccagtagacagtacactgtgagatatcgcgagaagggcgagctagctaggtgggattataagcagattgctaacaggcgtgtcctaattgagaatctcatccccgacacggtatacgaattcgccgtgaggatctcccaaggggaaagagacggaaagtggagtaccagcgtctttcagagaacacccgagtctgcacccaccacggcccctgaaaaccttaacgtttggcctgtgaacgggaaaccaacagtggtggctgcctcctgggacgccctgcctgagacagagggaaaagtgaaggcctcaaaggcggatgtcgaacagaacaccgaggataatgggaagccagagaaacccgagccctccagcccatccccccgcgcccccgcaagttcacaacatccaagtgtgcctgcctctcctcaggggcggaatgctaaggacctgctgctggatctcaagaataagatactcgccaatggtggagcccccagaaaaccccagctgagggctaagaaagccgaggagctcgacctgcagtccaccgaaatcacaggcgaggaggagctggggtcccgcgaggatagccccatgagccccagtgacacccaggatcagaaaagaacacttaggccgccttctagacatggtcactcggtggtggccccgggccggaccgcggttagggctcgcatgcccgcgctgcccagacgtgagggggtggacaaacctggattctcactggctactcagccgaggcctggagcccccccctcagccagcgcctcgcctgctcaccatgctagtacccagggaacttcccaccggccgagtctccccgcatccctaaacgacaacgatctcgtcgactcagatgaggatgagcgtgccgtggggtcacttcatccaaagggtgctttcgcacaacctcggcccgcactgagccccagtaggcaatccccaagttctgtccttagagatcgttccagcgtgcaccctggagcaaaacccgccagcccggccaggaggacgccccattccggcgccgccgaggaggacagctctgcatctgctcccccttctcggctgtcccccccacacggcgggagtagcaggttactgcctacacaaccccacctgagcagccccctgagcaagggaggaaaggatggggaagatgcaccagccaccaattctaatgccccgtcgagatcaacaatgtcatcttcagtgtcgtctcatctctcctcaagaactcaagtatccgagggagctgaggccagtgatggggagagccacggagacggcgaccgggaggacggcgggagacaggcagaagctacggcccagactctgcgggctcggcccgccagcggccactttcatcttctgaggcacaagccattcgccgccaacggccggtcgcccagccgctttagtatcgggcgggggccaaggctgcagccaagttcaagcccccagtctactgtaccgagcagggctcacccccgagtccccagccactcagatagccacccgaaactttctagcggaatccacggagacgaggaggacgagaagccgctcccagcgacggtggtgaacgatcatgtgccttcatcctcccggcagccgatttcccgcgggtgggaagacctgaggcgctcccctcaacggggcgcgtccttgcaccgtaaggagcccatccccgagaatcctaaatcaactggcgctgatacacatcctcagggtaagtatagttcactagcctctaaggcgcaggacgtacagcaaagcaccgatgctgacaccgaaggccacagtccaaaggctcagcctggatctactgaccgtcatgcaagtcccgctcggcctccagctgcgcgcagccaacagcacccatcagtgccccggagaatgactcccggaagggctcctcagcaacaacccccaccccccgtcgctacctctcagcatcatcccgggccccagagccgggacgcagggcgatccccaagtcagccccgactgtctctgactcaggctggccgacctcggcccacatcccagggacgctcccacagttcttccgatccttacactgcgtccagcagaggcatgctcccaacagctctccagaatcaggacgaagacgcccaggggtcctatgacgatgacagcacagaagtcgaagctcaagacgtcagagccccagctcacgccgctcgggctaaggaagctgctgctagcttgccaaagcatcaacaggtggaatccccaactggtgcaggtgccggaggagaccatcggagccagcggggacatgccgcatcccctgcacggccgtctcggcccggcggaccgcagtcccgggcacgcgttccctcccgcgccgcccccggtaagtcggaaccaccatccaaacggcctctgtcaagtaaaagtcagcagtccgtctctgctgaagacgacgaggaagaagatgctggattttttaaggggggtaaagaggatctgctaagcagctcagtgcctaagtggccaagtagcagtacacctagggggggcaaggacgcagacggctctctcgctaaagaagaaagagagccggctatagccctggccccccgggggggcagcctggccccagtgaagaggcctctccctcccccccccggcagtagtccacgagcctctcatgttccaagtaggctgcctccacgttccgccgcaacagtgtctccagtggccggcacacatccttggcctcaatatactacgcgggctcccccaggtcactttagtacaacgccaatgctttcgctccgccagagaatgatgcatgcacgatttagaaatcccctgagccgccagccagctcgtcctagctaccgccagggctataacggcaggcccaacgtcgaggggaaagttcttcctggatccaatggcaagcccaacggtcagcggatcatcaacggtcctcaaggcaccaaatgggtcgttgatcttgaccggggcctggtgttaaatgctgaaggccgatatttacaggactcccacgggaatccattgcgtatcaaactcggaggcgatggcaggacaattgtggacctcgagggcaccccagtggtgtcccctgatggcctgcctctgttcgggcagggacgacacggaacaccgctggctaacgcccaggataagcctatcctgtcccttggcgggaagccgctggtgggtcttgaagtcattaaaaaaaccacgcatcccccgacgaccacgatgcagccaacgaccactacaacgcccctgcctacaactaccacccccagaccaaccacagctaccaccaggcgcactacaaccacacgcagaacgaccactcggcggcccactaccactgttcgcactactacacggaccacaaccaccacgactcctacacctaccacccctatccctacgtgcccacctggaaccctggaaagacatgatgacgatggaaatctcatcatgtcgagtaacggtatccctgaatgctacgctgaagaagacgaattctctgggcttgagactgatacggcagtccctaccgaagaggcttacgttatttatgacgaggattatgagttcgagaccagccggcctcccactaccacagagccctctaccacagccactacacccagagtcatcccagaggagggcgccatttcctcgtttcccgaggaagagtttgatctggctggccgcaagaggttcgtggcaccttacgtgacctatctgaataaggacccttccgctccttgttcactgactgacgcactggaccacttccaagttgatagcctcgacgagattattccaaacgacctgaaaaagtctgatctgcccccacagcatgctccaaggaacatcaccgtggtcgccgtagaaggttgccactcgttcgtaatcgtagattgggacaaggcgacacccggagatgtagtgacgggatacttagtgtattctgcctcttatgaagacttcattagaaacaagtggagtacccaagccagcagcgttacccacctgccaattgaaaacctcaagcctaataccaggtactacttcaaggtacaggcgcaaaacccccacggctatggtccaatttcaccctccgtttcattcgtaacagaaagcgataacccacttctggtggtgcgccctccaggtggcgaaccgatctggatcccctttgcctttaaacatgacccatcttacaccgactgccacggccggcaatatgtgaagagaacttggtacagaaagtttgtgggagtcgtactctgtaacagtctgcgctataaaatatatctgtccgacaatcttaaagacacattttattccatcggcgatagctggggtcggggggaagatcattgccagttcgtggattctcatctcgacggccgcacagggccgcaatcatacgtggaggcactgccgaccattcagggctactacaggcagtatagacaagaaccagttaggttcggaaatattggtttcggaacgccctattactacgtgggatggtatgagtgcggtgtgagcatccccggcaagtggtag

SEQ ID NO: 330953 - DNA, 5496 bp, Artificial Sequence
  derived and/or modified sequence
atggcccctgaggccggggccaccctgcgggccccccggcggctgtcctgggccgccctgctgctgctggccgccctgctgcctgtggccagcagcgctgctgcctctgtggaccaccccctgaagcccaggcatgtgaagctgctgagcaccaagatgggcctgaaggtgacctgggacccccccaaggatgccaccagcaggcctgtggagcactacaacatcgcctacggcaagagcctgaagagcctgaagtacatcaaggtgaatgctgagacctacagcttcctgattgaagatgtggagcccggggtggtgtactttgtgctgctgacagctgagaaccacagcggcgtgtccaggcctgtgtacagagctgagagccccccaggaggagagtggattgaaattgatggcttccccatcaagggccctggccccttcaatgaaacagtgacagagaaggaggtgcccaacaagcccctgcgggtgcgggtgcgcagcagtgatgaccggctgtctgtggcctggaaggccccccggctgagcggggccaagagccccaggaggagccggggcttcctgctgggctacggggagagcggcaggaagatgaactacgtgcccctgaccagagatgagaggacccatgagatcaagaagctggccagcgagagcgtgtatgtggtgtccctgcagagcatgaacagccagggccgcagccagcctgtgtacagagctgccctgaccaagaggaagatcagtgaagaagatgagctggatgtgcctgatgacatctctgtgcgggtgatgagcagccagagcgtgctggtgtcctgggtggaccctgtgctggagaagcagaagaaggtggtggccagccggcagtacacagtgcgctaccgggagaagggggagctggcccgctgggactacaagcagatcgccaacagaagagtgctgattgaaaatctcatcccagacacagtgtatgaatttgctgtgcgcatcagccagggcgagagagatggcaagtggagcacctctgtgttccagaggaccccagagagcgcccccaccacagcccctgagaacctgaatgtgtggcctgtgaatggcaagcccaccgtggtggccgcctcctgggatgccctgcctgagacagagggcaaggtgaaggccagcaaggcagatgtggagcagaacacagaggacaacgggaagccagagaagccagagcccagcagccccagcccccgggccccagccagcagccagcaccccagcgtgcctgccagcccccagggcagaaatgccaaggacctgctgctggacctgaagaacaagatcctggccaatggaggagcccccaggaagccccagctgcgggccaagaaggccgaggagctggacctgcagagcacagagatcaccggggaggaggagctgggcagccgggaggacagccccatgagccccagcgacacccaggaccagaagaggaccctgcggccccccagcagacatggccacagcgtggtggcccctggccgcacagctgtgcgggccaggatgcctgccctgccccggcgggagggcgtggacaagccaggcttcagcctggccacccagcccaggcctggggccccacccagcgccagcgccagccctgcccaccacgccagcacccagggcaccagccaccggcccagcctgcctgccagcctgaatgacaatgacctggtggacagtgatgaagatgaaagagctgtgggcagcctgcaccccaagggggcctttgcccagcccaggcctgccctgagccccagccggcagagccccagctctgtgctgcgggacaggagctctgtgcaccctggggccaagccagccagccctgcccggaggaccccccacagcggggctgctgaggaggacagcagcgccagcgccccacccagccggctgagccccccccacggcggcagcagccggctgctgcccacccagccccacctgagcagccccctgagcaaaggaggcaaggatggagaagatgccccagccaccaacagcaatgcccccagccgcagcaccatgagcagctctgtgagcagccacctgagcagcaggacccaggtgtctgagggcgctgaggccagtgatggagagagccatggagatggagaccgggaggatggcggccggcaggccgaggccacagcccagaccctgcgggcccggcctgccagcggccacttccacctgctgcggcacaagccctttgctgccaacggccgcagccccagccgcttcagcatcggccggggcccccggctgcagcccagcagcagcccccagagcacagtgcccagccgggcccacccccgggtgcccagccacagcgacagccaccccaagctgagcagcggcatccatggagatgaagaagatgagaagcccctgcctgccaccgtggtgaatgaccacgtgcccagcagcagccggcagcccatcagccggggctgggaggacctgcggcgcagcccccagagaggagccagcctgcacaggaaggagcccatccctgagaaccccaagagcactggagctgacacccacccccagggcaagtacagcagcctggccagcaaggcccaggatgtgcagcagagcacagatgctgacacagagggccacagccccaaggcccagcccggcagcacagacagacatgccagccctgcccggcccccagctgcccggagccagcagcaccccagcgtgcccaggaggatgaccccaggccgggccccccagcagcagcccccacctcctgtggccaccagccagcaccaccctggcccccagagcagagatgctggccgcagccccagccagccccggctgagcctgacccaggccggccggccccggcccaccagccagggccgcagccacagcagcagtgacccctacacagccagcagccggggcatgctgcccacagccctgcagaaccaggatgaagatgcccagggcagctatgatgatgacagcacagaggtggaggcccaggatgtgcgggccccagcccacgccgcccgggccaaggaggccgccgccagcctgcccaagcaccagcaggtggagagccccaccggggccggggccggcggggaccacaggagccagaggggccatgctgccagccctgcccggcccagcaggcctgggggcccccagagccgggcccgggtgcccagcagagctgcccctgggaagtctgagccccccagcaagaggcccctgagcagcaagagccagcagagcgtgtctgcagaagatgatgaggaggaggatgctggcttcttcaagggcggcaaggaggacctgctgagcagctctgtgcccaagtggcccagcagcagcaccccccggggcggcaaggatgctgatggcagcctggccaaggaggagcgggagcccgccatcgccctggccccccggggcggcagcctggcccctgtgaagaggcccctgcccccacctcctggcagcagcccccgggccagccacgtgcccagccggctgcccccaagatctgctgccaccgtgtcccctgtggccggcacccacccctggccccagtacaccacccgggcccctcctggccacttcagcaccacccccatgctgagcctgcggcagaggatgatgcacgcccgcttcaggaaccccctgagccggcagcctgcccggcccagctaccggcagggctacaacggccggcccaacgtggagggcaaggtgctgcccggcagcaatggcaagcccaacggccagaggatcatcaatggcccccagggcaccaagtgggtggtggacctggaccggggcctggtgctgaatgctgagggccgctacctgcaggacagccacggcaaccccctgcgcatcaagctgggcggagatggccgcaccatcgtggacctggagggcacccctgtggtgtccccagatggcctgcccctgtttggccagggcagacatggcacccccctggccaatgcccaggacaagcccatcctgagcctgggcggcaagcccctggtgggcctggaggtgatcaagaagaccacccacccccccaccaccaccatgcagcccaccaccaccaccacccccctgcccaccaccaccaccccccggcccaccacagccaccaccaggaggaccaccaccaccaggaggaccaccacccggcggcccaccaccaccgtgaggaccaccaccaggaccaccaccaccaccacccccacccccaccacccccatccccacctgccccccaggcaccctggagagacatgatgatgatggcaacctgatcatgagcagcaatggcatccctgagtgctacgcagaagaagatgagttcagcggcctggagacagacacagctgtgcccacagaggaggcctacgtgatctatgatgaggactatgaatttgagaccagcaggcctcccaccaccacagagcccagcaccacagccaccacccccagggtcatccctgaggagggcgccatcagcagcttccctgaggaggagtttgacctggccggcaggaagagatttgtggccccctacgtgacctacctgaacaaggaccccagcgccccctgcagcctgacagatgccctggaccacttccaggtggacagcctggatgagatcatccccaatgacctgaagaagagtgacctgcccccccagcacgcccccaggaacatcaccgtggtggccgtggagggctgccacagctttgtgattgtggactgggacaaggccaccccaggagatgtggtgacaggctacctggtgtacagcgccagctatgaggacttcatccggaacaagtggagcacccaggccagctctgtgacccacctgcccatcgagaacctgaagcccaacacccgctactacttcaaggtgcaggcccagaacccccacggctacggccccatcagccccagcgtgtcctttgtgacagaaagtgacaaccccctgctggtggtgcggcccccaggaggagagcccatctggatcccctttgccttcaagcatgaccccagctacacagactgccacggccggcagtatgtgaagaggacctggtacaggaagtttgtgggcgtggtgctgtgcaacagcctgcgctacaagatctacctgagtgacaacctgaaggacaccttctacagcatcggggacagctggggccgcggggaggaccactgccagtttgtggacagccacctggatggccgcacaggcccccagagctatgtggaggccctgcccaccatccagggctactaccggcagtaccggcaggagcctgtgcgcttcggcaacattggatttggcaccccctactactacgtgggctggtatgaatgtggggtgtccatccctgggaagtggtag

SEQ ID NO: 330954 - DNA, 5496 bp, Artificial Sequence
  derived and/or modified sequence
atggcccccgaggccggcgccaccctgcgggccccccggcggctgagctgggctgcactcctgcttctcgcagccctgctaccagtggcatcatccgccgccgcgtcggtggaccatcctctgaaacctcgacatgtgaagctactgtcaactaagatgggcctaaaagtcacctgggaccctcctaaggatgcaacaagccgccccgttgaacattacaacattgcctacggaaaatccctcaagtccttgaaatatatcaaggtcaatgcagaaacctacagcttcctgatcgaggatgttgaaccaggcgtggtgtactttgtgttgctaacagccgaaaaccattcgggtgtgtccaggccggtgtaccgcgccgaatctccaccagggggggaatggattgagatcgatggctttccaatcaaaggccccggtccctttaatgagactgtgaccgaaaaggaggttcctaacaaacctctcagggttcgggtgcggagtagcgacgatagactgtctgtcgcgtggaaggccccccgattatcaggtgctaaatctccacggaggagcaggggattcctgctgggatacggcgagagcggccgcaaaatgaactatgttcccctgactcgggatgaaagaacacatgagataaaaaaattagcatcggaatctgtctacgtggtgtctctacaaagcatgaatagtcagggtcggtcccaaccggtataccgggcagcgcttaccaagagaaaaatttcggaagaggacgagctggacgtgcccgatgacattagcgtccgggtaatgagcagtcagtctgttctcgtgagttgggtcgaccctgtactcgaaaaacaaaagaaggtggtggcaagccgacagtacactgttcgctacagggaaaagggggaattagcgaggtgggactacaagcaaatcgccaacaggcgggtattaatcgagaaccttattccagatacagtgtacgagttcgctgtgagaatatcacagggcgagcgagacgggaagtggagtacaagcgtgttccagagaacaccagaaagtgcacccaccacagctcctgagaatctgaacgtttggccagtgaatgggaaaccaactgtcgtggcggcatcttgggacgctctgccagaaactgagggcaaagtaaaggctagcaaagctgacgttgaacaaaacacagaagataatggaaaaccagaaaagccagaaccttctagtccatcaccacgtgcacccgcatccagtcaacatccatccgtgcccgcttctccacagggaaggaacgcaaaggatctactgttggacttgaaaaataaaattctggctaacggcggggctcccagaaagccgcaactaagggccaaaaaggcagaggaactagatttgcagtccaccgagatcacaggcgaggaggagctaggttctagagaggacagccccatgtcacctagtgacacacaggatcagaagagaactctgcgacccccctctcgacatggccactcagtcgttgctcccggcagaacggccgtacgggctagaatgccagccctcccgcgacgggaaggagtggacaagccaggtttcagcctcgcaactcagccccggcctggggctcccccttcggcgtccgccagccctgcacaccacgctagtacacagggaacttctcacaggccttctctccccgcttccctgaatgataatgatctggtcgactcggacgaagacgaacgcgctgtcggatcacttcaccccaaaggggcctttgcccagccccgcccagcactgagcccgagcaggcagtctccctcttctgtactgcgagatcgcagctctgtgcaccccggtgctaagccggcgtcccccgcccgaagaacgcctcacagcggggctgccgaagaggacagttccgcttccgcccctccttctagactgagtcccccacatggcggaagctctcgcctgctgccgacccagccccacctgagttctccactgtccaaagggggcaaggatggcgaagatgctccagctacaaactccaatgcgccctctagaagcaccatgagtagtagcgtgtcaagccacctgagctcccggactcaggtgtctgagggggccgaggcgtctgacggcgagtctcatggagacggcgacagggaggatgggggaagacaggccgaagcaaccgcccagacgcttcgtgccaggccggcctcagggcatttccacctccttaggcataagccctttgccgccaatggccggtccccaagccggttctctattggccgcggaccgagacttcagccatccagcagtccccaaagcaccgtaccgtcacgggcccacccccgggttccttcacacagcgactcacatcccaagctctcctctggaatccacggtgacgaggaggacgaaaaacctttgcccgccaccgtcgtcaacgaccatgtcccgtcatcgtctagacagcccatttctaggggctgggaagacctgagaagatcaccacagagaggcgcaagtctgcacaggaaagagcctattcccgagaaccctaaatcgacaggcgccgatacacatcctcaggggaaatatagttcactggcctcaaaagctcaagatgttcaacagagcacagatgcagacacagagggacactcccccaaagcacagcctggatccaccgaccggcatgcctctccggctcggcctcctgccgcacgctcccaacagcacccatcggtcccgcggaggatgactccaggcagagccccacagcagcaacctccccccccagtcgccaccagccaacaccaccccggcccacaatctagggacgcaggccgttcgcctagccagccacgacttagtctgacacaagccgggcgacctagacctacgtcacagggccgtagtcactctagctccgatccctatactgccagcagcagaggtatgttacccaccgcacttcagaaccaggatgaagacgctcaaggtagctatgacgatgatagtacggaagtggaggcccaggatgtgcgcgccccagcacacgccgccagggctaaggaagccgctgcgtccctgccaaagcatcagcaagttgagagtccgactggcgccggcgctggaggcgaccataggagccagcgaggtcacgccgcaagccctgctagaccctcccggccaggaggacctcagtcccgcgcccgggtgccttcaagagcggcgcctggtaaatccgagccaccatccaagaggcccctttctagcaagagccagcagtcggtcagtgccgaggatgacgaggaggaggacgcagggttttttaaaggtgggaaagaagacctgctttcatcctcagtgcccaaatggccttcctcatcgacaccgaggggcggaaaggacgctgatgggagcctggcaaaagaagagagagaacccgccattgcactggcccccagagggggatctttagctcctgtaaagcgaccgttgccccctcctcccgggagttctccacgagcctcccatgtcccatctaggctgccaccgagatccgctgctacggtttctccggtggccggcactcatccctggccccagtacactactagggctccccctggccacttctccaccacgccgatgctgagtttaagacagaggatgatgcacgctcggtttcggaaccccttatctcgccaaccagcacgcccgagctacagacagggctacaatggtcgccccaatgtggaaggaaaggtcctgcctggcagcaatggcaagcccaatgggcagcgtattatcaatggccctcaaggcacgaaatgggttgtggacctagacagggggctggtgctgaatgccgaaggaaggtacctgcaggatagccacgggaatcctttacggattaaattagggggcgatgggaggactatcgtagatctggaggggacgccagtggtatcaccagatggactgcctctgttcggccaggggcgccacggtactccgcttgctaacgcacaggataaaccaatactgagcctcggaggtaaaccgctcgtgggactggaagtgataaagaagacaacccaccccccaacgactactatgcagcccactaccacgaccacacccctacccactaccactacccctcgtccaaccacagccaccactcgcagaacgacaaccactcgccgaaccacaactcgacgaccgacaaccactgtccggacaactacacgtactactaccacaactacccccactcctaccactccaatccccacgtgtccaccgggtacactggaacgacatgatgatgacgggaacctcatcatgagcagcaacgggattcccgaatgttatgccgaagaggatgagtttagtggattggaaaccgacaccgccgttcctacggaggaagcatatgtgatttacgacgaagattacgaattcgagaccagtagaccacctacaactactgagcctagtactacagcgacaaccccgagggtgatcccggaggaaggagctattagcagctttccagaggaggaattcgacctggcaggaaggaaaagatttgtggctccatacgtcacttacctgaacaaggaccctagcgccccttgctccctcactgacgccctagatcacttccaggttgacagcttggacgagatcattccaaatgacctcaagaagtctgacctgcctccacagcacgctcctagaaacattactgtggtggccgtggagggctgccacagtttcgtgatcgtggactgggacaaggcaaccccaggagacgtcgtgacaggctacctcgtgtacagcgcttcgtacgaagatttcattaggaacaagtggagcacacaggcttcctccgtcacccacctcccaatcgaaaaccttaaacctaacacccggtactattttaaagtccaggcccaaaacccccatggctatggaccgatttctccaagcgtgtcattcgtcacggagtcggacaacccattattggttgtgcggccaccaggaggcgagcctatctggattcctttcgctttcaagcacgacccttcctacacagactgtcatgggcgacaatacgtgaaacgaacgtggtatcgtaaattcgtgggggtcgtcctctgcaactctctacggtataagatatacctgtccgataacctgaaagacacgttctattctattggagacagctggggtagaggggaagatcactgccaatttgttgattcccacctcgatgggcggacgggcccgcagtcctacgtggaagcactcccaactatccaaggatattacagacagtaccggcaggagcccgttagatttggaaacataggcttcggaacaccatattactatgtgggatggtatgaatgcggggtcagcattccgggtaaatggtag

SEQ ID NO: 330955 - DNA, 5495 bp, Artificial Sequence
  derived and/or modified sequence
atggctcccgaggcaggcgctacattgagggctccccgtagactcagctgggccgctctgctgctacttgccgcactgctgcccgtggcttctagcgctgccgcatcggtcgaccaccctttaaagcctagacatgtgaagctgttgtcgaccaaaatggggctgaaggtgacttgggatccaccaaaggatgcgaccagtcggccagttgagcattacaacatcgcttatgggaagagcctgaagtcactgaagtatatcaaggtaaatgcagagacctatagtttcctgattgaggacgtagaaccaggagtggtctactttgtcctgcttacagctgaaaaccactctggggtgagtcgcccagtgtacagagccgaaagcccccctggcggagagtggattgagatcgatggctttcctattaagggtcctggccctttcaacgagacggtaaccgagaaagaggtccctaataagccactcagagtaagagtccgttcctccgacgaccggctttcggtggcttggaaggcacccagactgagtggagccaaatctccacgcaggtcacgtggcttccttctcggctacggggaatcgggcaggaaaatgaactatgtgccactgacgagagacgaacgaacacatgaaattaagaagttggcctctgaatctgtttacgttgtttccttacagtccatgaattcacagggtaggagtcagcccgtgtatagggccgcactgactaagcgaaagatttccgaggaagacgagctggatgtacccgatgatatctctgtcagggttatgagctcccagtccgtgttagttagttgggttgatccagttctggaaaaacaaaaaaaagtggtggccagtaggcagtacaccgtccgttatcgggagaaaggcgagctggctagatgggactataagcagattgctaatcgtagggtcctgattgaaaacctaataccagacacagtttatgaatttgctgtaagaatctctcagggcgagagagacgggaaatggtccactagcgtgtttcaacggacgcccgaaagtgcccctaccaccgcccctgaaaacctgaacgtgtggcccgtcaatggtaagcccacagtggttgcagcgtcctgggacgcgctgccggagactgaagggaaggtgaaggcttccaaagccgatgtggaacagaacacagaggacaatggcaagcctgaaaagcctgagccctctagtccgtcccccagagctcccgcttctagccagcacccctccgttcccgctagcccccagggcagaaacgccaaggatctgttgctggatctaaagaataagatcttggctaatggcggagcccctcggaagccccagctacgggcaaagaaagccgaggagctggatttgcagtccacggagattacaggcgaggaagaactcggctctagggaagacagtcctatgtcaccctccgatacacaagaccaaaaaagaactttgagaccccctagccggcacggccatagtgtcgtcgcgccaggaaggactgctgttagggcacgaatgccggctctacctaggcgcgagggtgtggataagcctgggttctctctggctacacaacctcgacccggagccccacccagcgcttctgccagccccgcacatcacgcatccacacaggggacttctcaccggccaagcctgcctgcctctttaaatgataacgacctagtcgacagcgacgaagatgaacgcgctgtaggttctctgcacccaaaaggggcttttgcacagcctcgccctgcactgagcccctcccgacaaagcccgtcgagcgtgttgcgggacagatcctcagtgcatccaggtgccaaacctgcttcccccgcaagaaggactccacactcaggggctgccgaggaggattcctctgcatcggctccaccctccaggctttcaccccctcacggaggatcctcgcggcttctcccaactcagccacacctgtcctctccgcttagcaagggcggaaaggacggagaggacgccccagcaaccaattccaatgccccaagcaggagtacgatgtcttcttctgtgtcctcacacctaagctcgcggacacaagttagcgagggggcagaggcctctgatggggaatcccacggggacggcgatagagaggatggaggacgccaggctgaggccaccgcccagacattgagagccaggcccgcttccggacatttccacctgctaaggcataaaccatttgccgcaaacggccgaagtccttcccgctttagtattggacgagggcctcggttgcagccaagctcctcacctcaatccactgtccctagtcgggcacacccccgtgtaccctctcacagcgattcacatccgaagctgagtagcggtatccatggcgatgaagaggatgaaaagcccctgccagcaacagtagtaaatgaccacgtgccctcttccagcaggcagccaatcagcagagggtgggaggatctgaggcgcagtccacagcggggagccagccttcaccgcaaggagcctattccagagaatcccaaatctactggagcagacacccatcctcagggcaagtacagcagtctggccagtaaagcccaggacgtccagcagtctacagacgcggacacggagggtcactcaccgaaggctcagccaggttcaacagatcgccacgcttcaccagctaggcctcccgctgcacggtcccagcaacatccctcagttcccagacggatgaccccaggtagagcccctcaacagcagccacccccacccgttgccacttcccagcaccatcccggtcctcaaagtagggacgctggcagatctccctcgcagcctagacttagccttacgcaggcagggagaccacgtccaacaagtcagggaaggagtcacagcagctcagacccctacacggcctcctcccgaggcatgttgcctacagctctacagaaccaggatgaagatgctcagggatcttatgacgacgacagcacggaagtcgaagctcaagacgtgcgcgctccggctcatgcagctcgcgcaaaggaagctgccgcaagcctgccaaaacaccaacaggttgagtctcccaccggggctggcgctggaggggatcatcggtcccagaggggacatgctgcttccccagccagaccaagtaggccgggaggaccacaatcccgggctcgggtgccctcacgcgctgctcccggtaagagcgaaccaccgagcaagaggccattatcctccaaatctcagcagagcgtgtcagccgaagacgatgaggaggaagatgccggattttttaaaggagggaaggaggatctgctctccagttcagtgcctaagtggcccagcagttctacacccagaggtggaaaagacgccgacggctcccttgcaaaggaggagcgggaacccgcaatagccttggctcctcgtggtggctctctcgctccggtcaaaagacctcttccccctcctcccggttctagccccagagcaagccatgtgccaagccgccttcccccacgcagcgcggcaactgtatctccggtggcaggtacacatccttggccccagtacacgaccagagctccaccaggtcacttctccaccacgcctatgctgtcgctgaggcagagaatgatgcacgcacgatttagaaatccgctcagcagacagccagcaaggcctagctaccggcagggatataacggtaggcccaacgtcgagggcaaggttctccctggctccaacggtaagcctaacggacaaaggatcatcaatggtcctcaaggcactaaatgggtggtggacctggaccgcggtctcgtcctcaacgccgaaggacggtacctccaagactcacacggtaacccgctgcgcattaaattgggcggtgacggacggaccatcgtcgatcttgaggggacccctgttgtttcaccagatggcctgccgctatttggtcagggacggcatggcactccacttgccaacgcacaagataagccaatcttgagcttgggcggtaagcctctcgtgggacttgaggtaatcaaaaagacaacacacccaccaacaaccaccatgcaacccacaactacgaccacccccctcccaaccacaacaaccccaagacctacgacagcaacaacaaggagaaccacaacaacccgccgtacaactacacgaagaccaacaacaaccgtgagaaccactactaggacaacgactactactactcccactcccaccactccaattccaacttgccctcccggtacactcgagcgccacgatgacgacggtaatcttatcatgagcagtaatggaatcccagaatgttatgctgaggaggacgaattcagcggcctggaaaccgatacagcagtgccaactgaggaagcgtacgtgatctacgatgaggactacgagtttgaaacatcccgtcccccaaccactacagaaccttctacaacagccaccactccaagggttataccagaagaaggcgcaatcagctcattccccgaagaggagttcgacttggccggacgcaagcgcttcgtggccccatatgtgacctatcttaataaggacccatctgctccatgcagcttgaccgacgctctggaccactttcaggtcgactccctggacgagattatccccaacgatctgaaaaaaagtgacctcccaccacaacatgcaccaagaaatatcacggtggtagcagtagagggctgccatagctttgtgatcgtggactgggacaaagccacacccggagatgtggtaaccggctacctggtgtactctgcatcttatgaggacttcattagaaacaagtggtctacgcaagctagtagcgtgactcatctcccaatcgaaaacctcaagccaaatacgcgctattactttaaagtacaggcccagaaccctcacggttatggcccaatcagcccatcggttagctttgtcaccgaatctgataatccgctcctcgtcgtgcggccaccagggggagagccaatctggatcccatttgccttcaagcatgacccgtcttacacagactgccatgggcgacagtacgtcaaacggacctggtaccgcaagttcgttggtgtagtgttgtgcaactctctgagatacaagatttacctgtccgataacctcaaagatacattctactcaattggggacagctggggcaggggtgaggaccattgccagttcgttgatagtcacctggacggtaggacaggcccacaatcctatgtggaagccctcccaacaatccagggatattatcgccagtatcgtcaggaacctgtgcggttcggaaacatcggattcggtacaccctattactacgtgggatggtatgaatgcggcgtatcgatccccggtaagtggta

SEQ ID NO: 330956 - DNA, 5496 bp, Artificial Sequence
  derived and/or modified sequence
atggcccccgaggccggcgccaccctgagagcccccagaagactgagctgggccgccctgctgctgctggccgccctgctgcccgtggccagcagcgccgccgccagcgtggaccaccccctgaagcccagacacgtgaagctgctgagcaccaagatgggcctgaaggtgacctgggacccccccaaggacgccaccagcagacccgtggagcactacaacatcgcctacggcaagagcctgaagagcctgaagtacatcaaggtgaacgccgagacctacagcttcctgatcgaggacgtggagcccggcgtggtgtacttcgtgctgctgaccgccgagaaccacagcggcgtgagcagacccgtgtacagagccgagagcccccccggcggcgagtggatcgagatcgacggcttccccatcaagggccccggccccttcaacgagaccgtgaccgagaaggaggtgcccaacaagcccctgagagtgagagtgagaagcagcgacgacagactgagcgtggcctggaaggcccccagactgagcggcgccaagagccccagaagaagcagaggcttcctgctgggctacggcgagagcggcagaaagatgaactacgtgcccctgaccagagacgagagaacccacgagatcaagaagctggccagcgagagcgtgtacgtggtgagcctgcagagcatgaacagccagggcagaagccagcccgtgtacagagccgccctgaccaagagaaagatcagcgaggaggacgagctggacgtgcccgacgacatcagcgtgagagtgatgagcagccagagcgtgctggtgagctgggtggaccccgtgctggagaagcagaagaaggtggtggccagcagacagtacaccgtgagatacagagagaagggcgagctggccagatgggactacaagcagatcgccaacagaagagtgctgatcgagaacctgatccccgacaccgtgtacgagttcgccgtgagaatcagccagggcgagagagacggcaagtggagcaccagcgtgttccagagaacccccgagagcgcccccaccaccgcccccgagaacctgaacgtgtggcccgtgaacggcaagcccaccgtggtggccgccagctgggacgccctgcccgagaccgagggcaaggtgaaggccagcaaggccgacgtggagcagaacaccgaggacaacggcaagcccgagaagcccgagcccagcagccccagccccagagcccccgccagcagccagcaccccagcgtgcccgccagcccccagggcagaaacgccaaggacctgctgctggacctgaagaacaagatcctggccaacggcggcgcccccagaaagccccagctgagagccaagaaggccgaggagctggacctgcagagcaccgagatcaccggcgaggaggagctgggcagcagagaggacagccccatgagccccagcgacacccaggaccagaagagaaccctgagaccccccagcagacacggccacagcgtggtggcccccggcagaaccgccgtgagagccagaatgcccgccctgcccagaagagagggcgtggacaagcccggcttcagcctggccacccagcccagacccggcgccccccccagcgccagcgccagccccgcccaccacgccagcacccagggcaccagccacagacccagcctgcccgccagcctgaacgacaacgacctggtggacagcgacgaggacgagagagccgtgggcagcctgcaccccaagggcgccttcgcccagcccagacccgccctgagccccagcagacagagccccagcagcgtgctgagagacagaagcagcgtgcaccccggcgccaagcccgccagccccgccagaagaaccccccacagcggcgccgccgaggaggacagcagcgccagcgccccccccagcagactgagccccccccacggcggcagcagcagactgctgcccacccagccccacctgagcagccccctgagcaagggcggcaaggacggcgaggacgcccccgccaccaacagcaacgcccccagcagaagcaccatgagcagcagcgtgagcagccacctgagcagcagaacccaggtgagcgagggcgccgaggccagcgacggcgagagccacggcgacggcgacagagaggacggcggcagacaggccgaggccaccgcccagaccctgagagccagacccgccagcggccacttccacctgctgagacacaagcccttcgccgccaacggcagaagccccagcagattcagcatcggcagaggccccagactgcagcccagcagcagcccccagagcaccgtgcccagcagagcccaccccagagtgcccagccacagcgacagccaccccaagctgagcagcggcatccacggcgacgaggaggacgagaagcccctgcccgccaccgtggtgaacgaccacgtgcccagcagcagcagacagcccatcagcagaggctgggaggacctgagaagaagcccccagagaggcgccagcctgcacagaaaggagcccatccccgagaaccccaagagcaccggcgccgacacccacccccagggcaagtacagcagcctggccagcaaggcccaggacgtgcagcagagcaccgacgccgacaccgagggccacagccccaaggcccagcccggcagcaccgacagacacgccagccccgccagaccccccgccgccagaagccagcagcaccccagcgtgcccagaagaatgacccccggcagagccccccagcagcagccccccccccccgtggccaccagccagcaccaccccggcccccagagcagagacgccggcagaagccccagccagcccagactgagcctgacccaggccggcagacccagacccaccagccagggcagaagccacagcagcagcgacccctacaccgccagcagcagaggcatgctgcccaccgccctgcagaaccaggacgaggacgcccagggcagctacgacgacgacagcaccgaggtggaggcccaggacgtgagagcccccgcccacgccgccagagccaaggaggccgccgccagcctgcccaagcaccagcaggtggagagccccaccggcgccggcgccggcggcgaccacagaagccagagaggccacgccgccagccccgccagacccagcagacccggcggcccccagagcagagccagagtgcccagcagagccgcccccggcaagagcgagccccccagcaagagacccctgagcagcaagagccagcagagcgtgagcgccgaggacgacgaggaggaggacgccggcttcttcaagggcggcaaggaggacctgctgagcagcagcgtgcccaagtggcccagcagcagcacccccagaggcggcaaggacgccgacggcagcctggccaaggaggagagagagcccgccatcgccctggcccccagaggcggcagcctggcccccgtgaagagacccctgccccccccccccggcagcagccccagagccagccacgtgcccagcagactgccccccagaagcgccgccaccgtgagccccgtggccggcacccacccctggccccagtacaccaccagagccccccccggccacttcagcaccacccccatgctgagcctgagacagagaatgatgcacgccagattcagaaaccccctgagcagacagcccgccagacccagctacagacagggctacaacggcagacccaacgtggagggcaaggtgctgcccggcagcaacggcaagcccaacggccagagaatcatcaacggcccccagggcaccaagtgggtggtggacctggacagaggcctggtgctgaacgccgagggcagatacctgcaggacagccacggcaaccccctgagaatcaagctgggcggcgacggcagaaccatcgtggacctggagggcacccccgtggtgagccccgacggcctgcccctgttcggccagggcagacacggcacccccctggccaacgcccaggacaagcccatcctgagcctgggcggcaagcccctggtgggcctggaggtgatcaagaagaccacccacccccccaccaccaccatgcagcccaccaccaccaccacccccctgcccaccaccaccacccccagacccaccaccgccaccaccagaagaaccaccaccaccagaagaaccaccaccagaagacccaccaccaccgtgagaaccaccaccagaaccaccaccaccaccacccccacccccaccacccccatccccacctgcccccccggcaccctggagagacacgacgacgacggcaacctgatcatgagcagcaacggcatccccgagtgctacgccgaggaggacgagttcagcggcctggagaccgacaccgccgtgcccaccgaggaggcctacgtgatctacgacgaggactacgagttcgagaccagcagaccccccaccaccaccgagcccagcaccaccgccaccacccccagagtgatccccgaggagggcgccatcagcagcttccccgaggaggagttcgacctggccggcagaaagagattcgtggccccctacgtgacctacctgaacaaggaccccagcgccccctgcagcctgaccgacgccctggaccacttccaggtggacagcctggacgagatcatccccaacgacctgaagaagagcgacctgcccccccagcacgcccccagaaacatcaccgtggtggccgtggagggctgccacagcttcgtgatcgtggactgggacaaggccacccccggcgacgtggtgaccggctacctggtgtacagcgccagctacgaggacttcatcagaaacaagtggagcacccaggccagcagcgtgacccacctgcccatcgagaacctgaagcccaacaccagatactacttcaaggtgcaggcccagaacccccacggctacggccccatcagccccagcgtgagcttcgtgaccgagagcgacaaccccctgctggtggtgagaccccccggcggcgagcccatctggatccccttcgccttcaagcacgaccccagctacaccgactgccacggcagacagtacgtgaagagaacctggtacagaaagttcgtgggcgtggtgctgtgcaacagcctgagatacaagatctacctgagcgacaacctgaaggacaccttctacagcatcggcgacagctggggcagaggcgaggaccactgccagttcgtggacagccacctggacggcagaaccggcccccagagctacgtggaggccctgcccaccatccagggctactacagacagtacagacaggagcccgtgagattcggcaacatcggcttcggcaccccctactactacgtgggctggtacgagtgcggcgtgagcatccccggcaagtggtag

SEQ ID NO: 330957 - protein, 162 aa, Artificial Sequence
  derived and/or modified sequence
DEDRYTTCWPKTWLAKDCPALRIISVEYDTSLSDWRARCPMERKSIAFRSNELLRKLRAAGVGDRPVVWISHSMGGLLVKKMLLEASTKPEMSTVINNTRGIIFYSVPHHGSRLAEYSVNIRYLLFPSLEVKELSKGNTFCHKGNWGYINISYTEKKKKFLP

SEQ ID NO: 330958 - DNA, 489 bp, Artificial Sequence
  derived and/or modified sequence
gacgaggacagatacactacatgctggccaaagacatggttggcgaaggactgcccggcattaagaatcattagcgtggaatatgacactagcttaagcgactggcgggcacggtgccctatggagcgcaagtcaatagctttccgctccaacgaattgcttcgtaaattgcgtgccgctggggttggggacagacccgtggtgtggatctcccatagcatggggggtttactggttaaaaaaatgctactggaggcttccaccaagcccgagatgtcaacagtgatcaacaatactcgaggtattattttctatagtgtcccgcaccatggttcccgactggccgagtatagcgtcaacattcggtacctgttgtttcccagtctcgaggtcaaggagctgtccaagggtaacacattctgccataaaggaaactgggggtatattaacatctcctacactgaaaagaaaaagaagtttcttccttag

SEQ ID NO: 330959 - DNA, 507 bp, Artificial Sequence
  derived and/or modified sequence
gatgaagacagatatacgacgtgctggcccaagacatggttagcaaaagactgtcctgctctccgaattatatctgtggagtatgacaccagcctcagcgactggagagcaaggtgccctatggaaagaaagtccattgcattcagaagcaacgaacttcttaggaagctcagagctgctggtgttggggataggccagtggtttggatatcacatagcatgggaggtcttcttgtcaaaaagatgctgttggaagcctctacgaagccagaaatgagtactgttatcaacaataccagaggaataattttttatagtgtccctcatcatggatcacgtttggctgaatactctgttaatattcgctatcttctcttcccctcgttggaagtcaaagaactcagcaagggtaatactttttgtcataaaggaaattggggttatattaacatcagttacacagagaagaagaaaaagtttcttccttgaatgtattatctcatttta

SEQ ID NO: 330960 - DNA, 489 bp, Artificial Sequence
  derived and/or modified sequence
gacgaagatcgatacaccacttgttggccaaaaacatggcttgcaaaggactgccccgctttaagaattatatccgtggaatacgatacctctctcagtgactggcgcgctcggtgccccatggaaaggaaaagtattgctttccgctctaatgaactgcttagaaaactgagagccgctggtgttggagaccgacccgttgtgtggattagtcatagcatgggcggcctgctagttaaaaaaatgttgttagaagctagtactaagcccgagatgagtaccgtgataaataatacccggggcatcatcttttatagcgttcctcatcacggctcaaggttggcagagtatagcgttaatattcggtatctgttatttcccagtctagaagtcaaggagctgtccaagggaaacaccttctgtcataaaggaaactggggttacatcaacataagctacaccgaaaaaaaaaaaaagttcctgccatag

SEQ ID NO: 330961 - DNA, 489 bp, Artificial Sequence
  derived and/or modified sequence
gacgaagatcgatacaccacttgttggccaaaaacatggcttgcaaaggactgccccgctttaagaattatatccgtggaatacgatacctctctcagtgactggcgcgctcggtgccccatggaaaggaaaagtattgctttccgctctaatgaactgcttagaaaactgagagccgctggtgttggagaccgacccgttgtgtggattagtcatagcatgggcggcctgctagttaaaaaaatgttgttagaagctagtactaagcccgagatgagtaccgtgataaataatacccggggaatcatattttactcggtcccccatcatggatcccgcttagccgagtactcagtaaatataaggtatctgttgtttccaagcctggaggttaaagaactctctaaggggaatacgttctgtcacaaaggaaactggggctatattaacatcagctacaccgaaaagaaaaagaaatttctgccctag

SEQ ID NO: 330962 - DNA, 489 bp, Artificial Sequence
  derived and/or modified sequence
gacgaggacagatacaccacctgctggcccaagacctggctggccaaggactgccccgccctgagaatcatcagcgtggagtacgacaccagcctgagcgactggagagccagatgccccatggagagaaagagcatcgccttcagaagcaacgagctgctgagaaagctgagagccgccggcgtgggcgacagacccgtggtgtggatcagccacagcatgggcggcctgctggtgaagaagatgctgctggaggccagcaccaagcccgagatgagcaccgtgatcaacaacaccagaggcatcatcttctacagcgtgccccaccacggcagcagactggccgagtacagcgtgaacatcagatacctgctgttccccagcctggaggtgaaggagctgagcaagggcaacaccttctgccacaagggcaactggggctacatcaacatcagctacaccgagaagaagaagaagttcctgccctag

SEQ ID NO: 330963 - DNA, 489 bp, Artificial Sequence
  derived and/or modified sequence
gacgaggatcggtatacaacatgctggcccaaaacgtggctggctaaagactgtccggccctgaggatcatctctgtggaatatgatacaagcctgtcagattggagagcccgctgtcccatggagagaaagtcaatcgcatttcgaagtaatgagctgctaaggaaactcagagccgccggcgtcggagacaggccagttgtttggatctcacactctatggggggccttctggtgaaaaagatgctgttagaggctagtactaagcccgaaatgagtaccgtcattaacaacacaaggggaatcatcttttattctgtgccacatcacggcagtagactggccgaatattctgtgaatattaggtatctcctgtttccctctttggaagtaaaggagctgtccaagggcaacacattctgtcataaggggaattggggctacatcaatatatcctatactgagaagaaaaagaaatttctaccttag

SEQ ID NO: 330964 - DNA, 489 bp, Artificial Sequence
  derived and/or modified sequence
gatgaggaccgctacaccacctgctggcccaagacctggctggccaaggactgcccagccctgcgcatcatctctgtggagtatgacaccagcctgagtgactggagggcccgctgccccatggagaggaagagcatcgccttccgcagcaatgagctgctgaggaagctgcgggccgccggcgtgggggacaggcctgtggtgtggatcagccacagcatgggcggcctgctggtgaagaagatgctgctggaggccagcaccaagccagagatgagcaccgtcatcaacaacacccggggcatcatcttctacagcgtgccccaccacggcagccggctggccgagtacagcgtgaacatccgctacctgctcttccccagcctggaggtgaaggagctgagcaagggcaacaccttctgccacaagggcaactggggctacatcaacatctcctacacagagaagaagaagaagttcctgccctag

SEQ ID NO: 330965 - DNA, 489 bp, Artificial Sequence
  derived and/or modified sequence
gacgaggaccggtacaccacctgctggcccaagacctggctggccaaggattgtcctgccttaagaatcatctccgtagaatatgacacctcgctgtcagactggcgcgctagatgcccaatggaaagaaaatcaatagcattcagaagcaatgagctgctgagaaagctgagggcagccggtgtgggagacaggcccgtcgtgtggatttcgcacagcatggggggattgctggtcaagaagatgctcctggaagcctcaacaaaacccgaaatgtccaccgtaattaataatacacgcggaatcatattctactctgttcctcatcacggctctcgactggctgaatacagtgtcaatattagatatctgttgtttccgtccctggaagtgaaggaactgtctaaagggaataccttttgtcataagggaaattggggatacatcaacatttcctataccgagaagaagaagaagttcctgccctag

SEQ ID NO: 330966 - RNA, 489 nt, Artificial Sequence
  derived and/or modified sequence
gacgaagaucgauacaccacuuguuggccaaaaacauggcuugcaaaggacugccccgcuuuaagaauuauauccguggaauacgauaccucucucagugacuggcgcgcucggugccccauggaaaggaaaaguauugcuuuccgcucuaaugaacugcuuagaaaacugagagccgcugguguuggagaccgacccguuguguggauuagucauagcaugggcggccugcuaguuaaaaaaauguuguuagaagcuaguacuaagcccgagaugaguaccgugauaaauaauacccggggcaucaucuuuuauagcguuccucaucacggcucaagguuggcagaguauagcguuaauauucgguaucuguuauuucccagucuagaagucaaggagcuguccaagggaaacaccuucugucauaaaggaaacugggguuacaucaacauaagcuacaccgaaaaaaaaaaaaaguuccugccauag

SEQ ID NO: 330967 - RNA, 489 nt, Artificial Sequence
  derived and/or modified sequence
gacgaagaucgauacaccacuuguuggccaaaaacauggcuugcaaaggacugccccgcuuuaagaauuauauccguggaauacgauaccucucucagugacuggcgcgcucggugccccauggaaaggaaaaguauugcuuuccgcucuaaugaacugcuuagaaaacugagagccgcugguguuggagaccgacccguuguguggauuagucauagcaugggcggccugcuaguuaaaaaaauguuguuagaagcuaguacuaagcccgagaugaguaccgugauaaauaauacccggggaaucauauuuuacucggucccccaucauggaucccgcuuagccgaguacucaguaaauauaagguaucuguuguuuccaagccuggagguuaaagaacucucuaaggggaauacguucugucacaaaggaaacuggggcuauauuaacaucagcuacaccgaaaagaaaaagaaauuucugcccuag

SEQ ID NO: 330968 - DNA, 441 bp, Artificial Sequence
  derived and/or modified sequence
gagctgaaccagagcagcgagtgggagaccttcagcgagagaagcagcagcagccagaccctgacccagttcgacagcaacatcgcccccgccgaccccgacaccgccatcgtgcaccccgtgcccatcagaatgacccccagcaagatccacatgcaggagatggagctgaagagaaccggcagcgaccacaccaaccccaccagccccctgctggtgaagcccagcgacctgctggaggagaacaagatcaacagcagcgtgaagttcgccagcggcaacaccgtgggccagcagcaggccggcgtggtggcccacccccccgccgtgccccccagaccccagcccagccaggcccccggccccgccgtgcacagacccgtggacgccgacggcctgatcacccacaccagcaccagcccccagcagatccccgagtag

SEQ ID NO: 330969 - DNA, 441 bp, Artificial Sequence
  derived and/or modified sequence
gaacttaatcagagctctgagtgggaaactttttctgagagatctagttcatcacagacactcacccagttcgattctaacatcgcaccggctgatcccgacacagctatcgtgcatcccgttcccataaggatgacaccatcgaagatacacatgcaggaaatggagctaaaaagaacagggagtgatcacacgaacccaacttccccactcctcgttaagccgagtgatctactggaggagaataaaattaactcatctgttaagtttgcgagtggcaatactgtggggcaacagcaggccggggtagtggcgcaccctccagcggtcccaccacgtcctcaaccttctcaggcacctgggcccgctgtacaccggcctgtcgacgccgacggattgatcacccatacatcaacctcccctcagcagataccggagtag

SEQ ID NO: 330970 - DNA, 441 bp, Artificial Sequence
  derived and/or modified sequence
gagctgaaccagagcagcgagtgggagaccttcagcgagaggagcagcagcagccagaccctgacccagtttgacagcaacatcgccccagctgaccctgacacagccatcgtgcaccctgtgcccatccgcatgacccccagcaagatccacatgcaggagatggagctgaagaggacaggcagtgaccacaccaaccccaccagccccctgctggtgaagcccagcgacctgctggaggagaacaagatcaacagctctgtgaagtttgccagcggcaacacagtgggccagcagcaggccggcgtggtggcccaccccccagctgtgcccccccggccccagcccagccaggcccctggccctgctgtgcacaggcctgtggatgctgatggcctcatcacccacaccagcaccagcccccagcagatccctgagtag

SEQ ID NO: 330971 - DNA, 441 bp, Artificial Sequence
  derived and/or modified sequence
gagctgaaccagagcagcgagtgggagaccttcagcgagcggagctcctcaagtcagaccctgacgcagttcgacagcaatattgcacctgccgaccccgatacagcaatcgtacaccctgtgcctatcagaatgactccttctaagattcacatgcaagaaatggaactgaaacgtacagggagcgatcataccaatccaacatcacctctgttggtaaagccatctgacctgctggaagagaataagatcaacagctctgtgaagttcgctagcggcaacacagtgggtcagcagcaggctggagtagtagcccacccaccagctgttcctcccaggcctcaaccctcacaggccccaggacctgctgtgcaccgccccgttgatgctgatggcctgatcacccatacttccacttcgcctcaacaaatacctgagtag

SEQ ID NO: 330972 - DNA, 441 bp, Artificial Sequence
  derived and/or modified sequence
gagctgaaccagtcttctgaatgggaaaccttctctgagaggagctccagctctcaaacactgactcagttcgactcgaacattgctccagcagacccagatacggctatcgtccacccagtccccatccgcatgaccccttctaaaatccacatgcaggagatggaacttaagaggaccggatccgaccatacaaaccccacaagccccctgctcgtcaaacccagcgacctgctggaagaaaataagatcaattctagcgtcaaattcgcatctggcaacactgtgggccagcagcaagcgggtgtggtggcccacccacctgcagttcctcctcgtccacagccgtctcaggccccagggcctgccgtccaccggccagttgatgccgacgggctgataacgcatacgagtacatcacctcaacaaatccctgaatag

SEQ ID NO: 330973 - DNA, 439 bp, Artificial Sequence
  derived and/or modified sequence
gagctgaatcagagcagtgagtgggagacatttagtgaacgctcttcaagctcacaaactctgacccaatttgattctaacattgcaccagctgatcctgatactgctattgttcatccagttcccattcgtatgactccaagcaaaatccacatgcaggaaatggaacttaaaagaactggcagcgatcatacaaatcccactagcccattacttgtgaaaccatctgaccttttagaagaaaataagataaattcatcggtgaaattcgcttctggtaatactgtaggacaacaacaggctggagttgttgcccatcctcctgcagtgcctccaagaccacagccctcacaggctcctggtcctgctgtgcatcgcccagtggatgccgatggcctcataactcacactagtacctcacctcagcagataccagagc

SEQ ID NO: 330974 - protein, 174 aa, Artificial Sequence
  derived and/or modified sequence
MGVTPHHVCRPPGNVSQVVFHNHSNWSLEDTGALLSSGQKDYVTVQLQNGEIWELSRCSRNKRENTSSLGYEYTGSKKEFPCVDGYIYDQNTWKSTAVTQWNLVCDRKWLAMLIQPLFMFGVLLGSVTFGYFSDRLGRRVVLWATSSSMFLFGIAAAFAVDYYTFMAARFFLAM

SEQ ID NO: 330975 - protein, 351 aa, Artificial Sequence
  derived and/or modified sequence
MGVTPHHVCRPPGNVSQVVFHNHSNWSLEDTGALLSSGQKDYVTVQLQNGEIWELSRCSRNKRENTSSLGYEYTGSKKEFPCVDGYIYDQNTWKSTAVTQWNLVCDRKWLAMLIQPLFMFGVLLGSVTFGYFSDRLGRRVVLWATSSSMFLFGIAAAFAVDYYTFMAARFFLAMVASGYLVVGFVYVMEFIGMKSRTWASVHLHSFFAVGTLLVALTGYLVRTWWLYQMILSTVTVPFILCCWVLPETPFWLLSEGRYEEAQKIVDIMAKWNRASSCKLSELLSLDLQGPVSNSPTEVQKHNLSYLFYNWSITKRTLTVWLIWFTGSLGFYSFSLNSVNLGGNEYLNLFLL

SEQ ID NO: 330976 - protein, 515 aa, Artificial Sequence
  derived and/or modified sequence
MGSRHFEGIYDHVGHFGRFQRVLYFICAFQNISCGIHYLASVFMGVTPHHVCRPPGNVSQVVFHNHSNWSLEDTGALLSSGQKDYVTVQLQNGEIWELSRCSRNKRENTSSLGYEYTGSKKEFPCVDGYIYDQNTWKSTAVTQWNLVCDRKWLAMLIQPLFMFGVLLGSVTFGYFSDRLGRRVVLWATSSSMFLFGIAAAFAVDYYTFMAARFFLAMVASGYLVVGFVYVMEFIGMKSRTWASVHLHSFFAVGTLLVALTGYLVRTWWLYQMILSTVTVPFILCCWVLPETPFWLLSEGRYEEAQKIVDIMAKWNRASSCKLSELLSLDLQGPVSNSPTEVQKHNLSYLFYNWSITKRTLTVWLIWFTGSLGFYSFSLNSVNLGGNEYLNLFLLGVVEIPAYTFVCIAMDKVGRRTVLAYSLFCSALACGVVMVIPQKHYILGVVTAMVGKFAIGAAFGLIYLYTAELYPTIVRSLAVGSGSMVCRLASILAPFSVDLSSIWIFIPQLLGQHLQE

SEQ ID NO: 330977 - protein, 432 aa, Artificial Sequence
  derived and/or modified sequence
DYVTVQLQNGEIWELSRCSRNKRENTSSLGYEYTGSKKEFPCVDGYIYDQNTWKSTAVTQWNLVCDRKWLAMLIQPLFMFGVLLGSVTFGYFSDRLGRRVVLWATSSSMFLFGIAAAFAVDYYTFMAARFFLAMVASGYLVVGFVYVMEFIGMKSRTWASVHLHSFFAVGTLLVALTGYLVRTWWLYQMILSTVTVPFILCCWVLPETPFWLLSEGRYEEAQKIVDIMAKWNRASSCKLSELLSLDLQGPVSNSPTEVQKHNLSYLFYNWSITKRTLTVWLIWFTGSLGFYSFSLNSVNLGGNEYLNLFLLGVVEIPAYTFVCIAMDKVGRRTVLAYSLFCSALACGVVMVIPQKHYILGVVTAMVGKFAIGAAFGLIYLYTAELYPTIVRSLAVGSGSMVCRLASILAPFSVDLSSIWIFIPQLLGQHLQE

SEQ ID NO: 330978 - DNA, 1548 bp, Artificial Sequence
  derived and/or modified sequence
atgggaagtcgccattttgagggaatatatgaccatgtgggccatttcggtagattccagagggttctgtatttcatttgtgcattccagaacatttcttgcggcatacattaccttgcaagcgtattcatgggcgtgactccacatcacgtctgccgtccccctggaaacgtgtctcaagtggtatttcacaaccattcaaattggagcctggaggatactggcgcacttctgtcctcgggccagaaggactacgtgaccgtccagctgcagaatggagagatttgggagctcagcagatgctcccggaataagcgcgaaaacaccagctcgttgggatatgaatacacaggctcaaagaaggagttcccatgtgtggatggatatatttacgatcaaaacacgtggaaaagcaccgcggttacccagtggaacttagtgtgtgaccggaagtggctagcgatgttgatacaacccttattcatgttcggtgtattacttggctcagttaccttcgggtacttctccgacaggttgggccgccgtgtcgttctttgggccacaagttcttcgatgttcctgttcgggattgctgccgccttcgccgtagattattatacatttatggctgcccgcttctttctggcaatggtggcctcaggatacctggtggtgggcttcgtctatgtgatggagttcataggcatgaagtcaaggacctgggcctccgtgcatctgcactcattttttgcagtaggaaccctgctggtggctctgacaggatacttagtgcgaacttggtggttataccagatgatcctcagtacagtgacggtaccattcattctatgttgttgggtcctgccagagacacctttttggctgttgtcagagggaagatatgaggaggcgcagaaaattgttgacatcatggctaaatggaatcgggcgtcatcttgcaagctgtctgagcttctctccctagacctgcaaggacccgtttcgaactcccctacggaggtgcagaaacataacctgtcatatctgttttacaattggtccatcaccaaaaggactctgaccgtgtggctgatttggttcactggttccctcggtttctacagcttctcactcaatagcgtgaaccttggcggcaacgaatacctgaatctgttcctactcggtgtagttgagattccagcttacacctttgtctgtatagcgatggataaagtagggaggcgcacagttctagcctactctctcttttgctcagcattggcttgcggagtggtcatggtgatcccacagaagcactatattctgggcgttgtgactgctatggtcggcaagttcgcgattggggccgcctttggcctcatctacttatatacggcagagttataccctaccattgtacgctccctggccgtgggatcagggtcaatggtttgtaggctcgccagcatcttggcgccttttagcgtggacctatcatctatctggatcttcattccacagctgctggggcagcatcttcaggaatag

SEQ ID NO: 330979 - DNA, 1299 bp, Artificial Sequence
  derived and/or modified sequence
gactacgtgactgtgcagctacagaacggggagatctgggagctctcgcgttgtagtcgcaacaaacgggaaaacacaagttctttaggatatgagtacacagggagtaagaaagaatttccatgtgttgacggctacatatacgaccagaatacctggaagagcactgccgtcacacaatggaacttggtctgcgacaggaaatggctggcaatgttaatccaaccactattcatgtttggggttcttctcggaagcgtgacatttggttatttctctgaccggctgggcaggagagttgtgctgtgggccacctcatcctctatgttcctatttgggatcgctgccgcctttgctgttgactactacacctttatggcagcaagattcttccttgcaatggttgctagcgggtatctggtcgtgggcttcgtgtatgtcatggagttcatcggcatgaaaagtcgcacatgggcatcggtgcaccttcattccttctttgccgtcgggaccttgctggtcgcactgactggctacctggttcgtacatggtggctgtaccaaatgatcctctccaccgtcaccgtaccatttattctgtgttgctgggtgctgcctgagacaccattctggctcctaagtgaagggcgatacgaggaggctcagaaaatcgtcgacattatggccaagtggaatcgtgcttcctcatgtaagctctcagaactgctttcacttgacctccagggacccgtaagcaactctccgactgaggtgcagaagcacaacctgtcttacctgttctacaactggagtatcactaagagaactttaacggtatggctgatctggttcactggttcactggggttctattcattttcactgaatagcgtgaatcttggcggtaacgagtatctcaacctcttcctccttggtgtggtcgaaatcccagcgtacaccttcgtttgtattgcaatggacaaagtcggccgcagaactgtgttggcatattcactcttttgttccgctttagcctgtggagtggtgatggtcatcccacagaaacactatattctcggagtggtgacagccatggtgggaaagttcgcaatcggtgctgctttcggtctgatctatctttacactgccgaactttacccaaccatcgtcagaagcctggcggtcgggtcggggagcatggtctgtcgcctcgcctccatcttggcgccattctctgtagacttgtcaagcatctggatcttcattcctcagttactgggtcagcatcttcaggagtag

SEQ ID NO: 330980 - DNA, 1548 bp, Artificial Sequence
  derived and/or modified sequence
atgggcagccgccactttgagggcatctatgaccacgtgggccacttcggccgcttccagagggtgctgtacttcatctgtgccttccagaacatcagctgtggcatccactacctggcctctgtgttcatgggcgtgaccccccaccacgtgtgccggcccccaggaaatgtgtcccaggtggtgttccacaaccacagcaactggagcctggaggacaccggggccctgctgagcagcggccagaaggactatgtgacagtgcagctgcagaatggagagatctgggagctgagccgctgcagcaggaacaagcgggagaacaccagcagcctgggctatgagtacacaggcagcaagaaggagttcccctgtgtggatggctacatctatgaccagaacacctggaagagcacagctgtgacccagtggaacctggtgtgtgacaggaagtggctggccatgctgatccagcccctcttcatgtttggagtgctgctgggctctgtgaccttcggctacttcagtgaccggctgggcagaagagtggtgctgtgggccaccagcagctccatgttcctgtttggaattgctgctgcctttgctgtggactactacaccttcatggccgcccgcttcttcctggccatggtggccagcggctacctggtggtgggctttgtgtatgtgatggagttcatcggcatgaagagcaggacctgggcctctgtgcacctgcacagcttctttgctgtgggcaccctgctggtggccctgaccggctacctggtgaggacctggtggctgtaccagatgatcctgagcacagtgacagtgcccttcatcctgtgctgctgggtgctgcctgagacccccttctggctgctgtctgagggccgctatgaggaggcccagaagatcgtggacatcatggccaagtggaacagagccagcagctgcaagctgtctgagctgctgagcctggacctgcagggccctgtgagcaacagccccacagaggtgcagaagcacaacctgagctacctgttctacaactggagcatcaccaagaggaccctgactgtgtggctgatctggttcaccggcagcctgggcttctacagcttcagcctgaacagcgtgaacctgggcggcaatgagtacctgaacctcttcctgctgggcgtggtggagatcccagcctacacctttgtgtgcatcgccatggacaaggtgggccgcaggacagtgctggcctacagcctcttctgcagcgccctggcctgtggggtggtgatggtgatcccccagaagcactacatcctgggcgtggtgacagccatggtgggcaagtttgccatcggggccgccttcggcctcatctacctgtacacagctgagctgtaccccaccatcgtgcgcagcctggccgtgggcagcggctccatggtgtgccgcctggccagcatcctggcccccttctctgtggacctgagcagcatctggatcttcatcccccagctgctgggccagcacctgcaggagtag

SEQ ID NO: 330981 - DNA, 1299 bp, Artificial Sequence
  derived and/or modified sequence
gactatgtgacagtgcagctgcagaatggagagatctgggagctgagccgctgcagcaggaacaagcgggagaacaccagcagcctgggctatgagtacacaggcagcaagaaggagttcccctgtgtggatggctacatctatgaccagaacacctggaagagcacagctgtgacccagtggaacctggtgtgtgacaggaagtggctggccatgctgatccagcccctcttcatgtttggagtgctgctgggctctgtgaccttcggctacttcagtgaccggctgggccggcgggtggtgctgtgggccaccagcagctccatgttcctgtttggaattgctgctgcctttgctgtggactactacaccttcatggccgcccgcttcttcctggccatggtggccagcggctacctggtggtgggctttgtgtatgtgatggagttcatcggcatgaagagcaggacctgggcctctgtgcacctgcacagcttctttgctgtgggcaccctgctggtggccctgaccggctacctggtgaggacctggtggctgtaccagatgatcctgagcacagtgacagtgcccttcatcctgtgctgctgggtgctgcctgagacccccttctggctgctgtctgagggccgctatgaggaggcccagaagatcgtggacatcatggccaagtggaacagagccagcagctgcaagctgtctgagctgctgagcctggacctgcagggccctgtgagcaacagccccacagaggtgcagaagcacaacctgagctacctgttctacaactggagcatcaccaagaggaccctgactgtgtggctgatctggttcaccggcagcctgggcttctacagcttcagcctgaacagcgtgaacctgggcggcaatgagtacctgaacctcttcctgctgggcgtggtggagatcccagcctacacctttgtgtgcatcgccatggacaaggtgggcagaagaacagtgctggcctacagcctcttctgcagcgccctggcctgtggggtggtgatggtgatcccccagaagcactacatcctgggcgtggtgacagccatggtgggcaagtttgccatcggggccgccttcggcctcatctacctgtacacagctgagctgtaccccaccatcgtgcgcagcctggccgtgggcagcggctccatggtgtgccgcctggccagcatcctggcccccttctctgtggacctgagcagcatctggatcttcatcccccagctgctgggccagcacctgcaggagtag

SEQ ID NO: 330982 - DNA, 1548 bp, Artificial Sequence
  derived and/or modified sequence
atgggcagccggcacttcgagggcatctacgaccacgtgggccacttcgggagatttcaacgggtcctctactttatttgtgcatttcaaaatattagttgcggcatccactatttggcaagtgtgtttatgggggttactccacatcacgtatgcagaccccctggcaatgtctcccaggttgtgtttcacaatcacagcaactggtccctggaagacaccggtgctttactgtctagcggtcagaaagactacgtgaccgtgcagctccaaaacggagaaatatgggaactcagtcggtgttccaggaacaagcgggaaaacaccagctctctggggtatgagtatacgggatctaaaaaagaatttccctgcgtcgacggatacatttacgatcagaacacatggaagagtaccgctgtcacgcagtggaacctggtgtgtgacaggaagtggctggctatgctgattcagcccctgtttatgtttggggtgcttctgggaagcgtgacgttcggctatttcagtgaccgcctcggacgacgcgtcgttctctgggccacaagtagttcaatgttcttgtttggaatagcagctgcgtttgccgtcgattattataccttcatggctgcccgattctttttagctatggtcgcttccggatatttagtagtcggatttgtttacgttatggaattcattggtatgaaatcacgaacatgggctagtgtgcaccttcattcctttttcgccgtgggcactctgttggtggccctcacaggttatcttgttcgtacctggtggctgtaccaaatgatcctgtcaaccgtgacagtcccatttatcttatgttgctgggtcctgcctgagacaccattctggcttttgagcgagggaagatatgaagaggcccagaagatcgtcgacattatggctaaatggaatagagcgagttcatgtaagctctcagagttgctctccctcgacctccaggggccggtctcgaactccccaacggaggtgcaaaagcacaacctctcatatctattttacaactggagcattacgaagcggacacttaccgtgtggttgatttggtttaccggtagtttgggcttttatagcttcagtcttaactccgttaacctcggcggcaatgaataccttaacttgttcttgttgggcgtcgtggaaattcccgcttacacctttgtgtgtattgctatggacaaggtaggccggcgaacggtgctcgcctactctctattctgtagtgcactcgcctgcggcgtggtcatggtgattccacaaaagcattatattttgggcgttgtgactgccatggtgggaaagtttgccattggcgccgcttttgggttgatctacctctacaccgccgagttgtaccccaccatcgtgagatctctagcagtgggctcaggcagcatggtgtgtcggctagccagcatactcgcaccattttcagttgacctgtcaagcatttggattttcattcctcagttactaggacagcacctccaggaatag

SEQ ID NO: 330983 - DNA, 1299 bp, Artificial Sequence
  derived and/or modified sequence
gactacgtgaccgtgcagctgcagaacggcgagatctgggagctgtcgcgctgctcgcggaacaagagggagaatactagcagcctggggtatgaatacaccggtagtaaaaaggaattcccctgcgtcgacggctacatatacgatcagaatacgtggaagtctacagccgtcacacagtggaatttggtctgcgataggaagtggctcgcaatgctaatccagccattgtttatgtttggcgtactgctcggttctgtgaccttcggctatttctccgacagactaggccggagggttgtactctgggccactagctcttccatgtttctctttgggatcgccgccgcattcgctgtggattattacactttcatggctgctcggttcttcctggccatggtggcctcgggatatctggtggtcgggtttgtgtacgtgatggagttcatcggcatgaaaagccggacatgggcatccgtgcatttacatagcttctttgccgtgggaacgttgttggtggcactcaccggttatctcgtcagaacctggtggctataccagatgatcctgagcaccgtgacggtgccctttatcttgtgttgctgggtgctgcctgagacccccttctggctgttaagtgagggcagatatgaagaggctcagaagattgtggatataatggcgaagtggaaccgcgcgtcatcatgtaaactatccgagttattgagcctagatcttcagggtcccgtatctaattcaccaaccgaagtccagaagcataatctcagctacctgttctataattggtctataactaaacgaaccctcactgtatggctcatttggttcactggctccctcggtttttattctttcagtttgaattcggttaatctgggcgggaatgagtatctgaacctcttcctcttaggagtggtcgagatccctgcttacactttcgtatgcattgccatggataaggttggacgcaggactgtactcgcctattcactcttctgttccgccctggcgtgtggcgtggttatggtgattcctcagaagcattatatccttggcgtcgttaccgccatggttggcaaattcgccataggtgctgcatttgggctcatctatctctacactgctgagctgtaccccaccatcgtccgatccttggcggtaggcagcgggtccatggtttgccgcttggcatcaatcctggctccctttagcgtcgacttatcttcaatctggatcttcatcccacagctgctgggacagcacctgcaggagtag

SEQ ID NO: 330984 - DNA, 1548 bp, Artificial Sequence
  derived and/or modified sequence
atgggctccagacatttcgaaggcatttatgaccatgttggtcattttgggaggtttcagagagtcttgtactttatttgtgcattccagaacattagttgtgggatacattatctggccagcgtgttcatgggagtgacaccacaccacgtttgtcgcccacccggtaatgtgtcacaggtggtgttccacaatcattccaattggtccctggaagataccggtgccctgctctccagcggacagaaagattacgtaactgtccaactgcagaacggcgagatatgggagctctctaggtgttctaggaacaagcgagaaaataccagttctcttggttatgagtacactggtagcaaaaaggaattcccctgcgtggacgggtatatttacgatcaaaacacctggaagagtaccgctgttacccagtggaacctcgtgtgtgacaggaagtggctggcaatgctgattcagccacttttcatgttcggtgtactgctcgggtcagtcacttttgggtactttagtgatcgcttggggcgtcgtgtcgttctgtgggctacatccagttccatgttcctgtttgggatagctgcggcttttgcagtggactactacacgttcatggcggctaggttttttctggccatggtggcttccgggtatttggtggtaggattcgtgtacgtgatggagtttattggcatgaagtcccgtacctgggcctctgtacacctgcactcattttttgccgtcggaacactgctagtagctctgacgggatacctggtgcgcacttggtggctgtatcagatgatcctgagtactgtcactgtccctttcatcctgtgctgctgggttttgcctgagactcccttctggcttttgtcggagggtcgttacgaagaggcccagaagattgtagatataatggctaagtggaaccgtgcctcatcatgcaaattgagtgaattgttgtcacttgaccttcaaggaccagtgtctaattccccaactgaagtacagaagcataacctttcttatcttttttacaattggagcattacaaaacgcacgctgacagtgtggctgatttggttcactgggtcactggggttctacagcttctcattgaactccgttaacctcggcggtaatgagtacctcaacttatttctgctgggcgtagttgaaatccccgcttatacttttgtttgcatagctatggacaaagtcggtcggaggacagtcctcgcttacagtcttttttgttctgctttggcctgtggagttgtgatggtcatccctcagaaacattacatcctgggggtcgtcactgcaatggtaggcaaatttgctataggcgctgccttcggactcatctacctctacaccgccgagctctatcccacgattgtcagaagcttagcagtggggagtggttccatggtctgccgcttggcatccattctcgcccctttttctgtggatttgagcagcatatggatattcatccctcagctgctcgggcagcatctacaggaatag

SEQ ID NO: 330985 - DNA, 1299 bp, Artificial Sequence
  derived and/or modified sequence
gactatgtgacggtgcaacttcaaaacggggagatttgggaactgtcaagatgttcccgaaataagagagagaatacatcatcgcttggctacgagtatacagggagtaagaaggagttcccttgcgtggacgggtacatatacgaccagaatacgtggaaaagtacagcagtgacccagtggaacctggtatgtgataggaagtggctggccatgctgattcagcccttatttatgttcggggtgctattaggcagcgtaacctttggttatttctctgatcggctgggccgaagagtggttttatgggcaacctcttcttcaatgttccttttcggtattgctgcagcttttgccgtggactactatacgttcatggcagctagattcttcctcgcaatggtggccagtggctatctcgtggtcgggttcgtgtacgtgatggaatttatcgggatgaagtctcggacgtgggcaagtgtgcacctgcactcttttttcgctgtcggcacactccttgtggccttgaccggctacttggtgcggacctggtggctgtaccaaatgatattgtccacggtgactgtcccctttatcctctgctgctgggtcctcccagaaacaccattctggttgctctccgaagggagatacgaggaggcccagaaaattgtagacatcatggccaaatggaacagggcgagttcctgcaaactgagcgagttgctatctctcgatctgcaaggccctgtgtctaactcccccactgaggtgcagaaacataatctcagctacctgttttacaattggtcaattacgaagcgaactctgacggtttggctcatctggttcactggctcattgggattctactctttctctcttaatagcgtgaatttggggggtaatgagtacctcaacctctttcttctgggggtggtggagataccggcatacaccttcgtgtgcatcgcgatggataaggtgggcaggaggactgtgctcgcatactccctgttctgttcagcactggcttgcggagtggtgatggtgatccctcagaaacattatattttgggagtcgtgacagcaatggtggggaagtttgcaataggggcagccttcggcctgatatacctgtatacagcggaactgtatcctacaattgttaggtcactggccgttggcagcggatcaatggtttgccggctggctagcattctagccccattcagcgttgatctgtcttcgatatggatcttcatccctcagttacttgggcagcaccttcaggaatag

SEQ ID NO: 330986 - DNA, 1615 bp, Artificial Sequence
  derived and/or modified sequence
ggggcggggcgcgctacccgcagtccccggagctcggctaactcggcgcccagtgcacggccgcaccatggggtcccgccacttcgaggggatttatgaccacgtggggcacttcggcagattccagagagtcctctatttcatatgtgccttccagaacatctcttgtggtattcactacttggcttctgtgttcatgggagtcacccctcatcatgtctgcaggcccccaggcaatgtgagtcaggttgttttccataatcactctaattggagtttggaggacaccggggccctgttgtcttcaggccagaaagattatgttacggtgcagttgcagaatggtgagatctgggagctctcaaggtgtagcaggaataagagggagaacacatcgagtttgggctatgaatacactggcagtaagaaagagtttccttgtgtggatggctacatatatgaccagaacacatggaaaagcactgcggtgacccagtggaacctggtctgtgaccgaaaatggcttgcaatgctgatccagcccctatttatgtttggagtcctactgggatcggtgacttttggctacttttctgacaggctaggacgccgggtggtcttgtgggccacaagcagtagcatgtttttgtttggaatagcagcggcgtttgcagttgattattacaccttcatggctgctcgcttttttcttgccatggttgcaagtggctatcttgtggtggggtttgtctatgtgatggaattcattggcatgaagtctcggacatgggcgtctgtccatttgcattccttttttgcagttggaaccctgctggtggctttgacaggatacttggtcaggacctggtggctttaccagatgatcctctccacagtgactgtcccctttatcctgtgctgttgggtgctcccagagacacctttttggcttctctcagagggacgatatgaagaagcacaaaaaatagttgacatcatggccaagtggaacagggcaagctcctgtaaactgtcagaacttttatcactggacctacaaggtcctgttagtaatagccccactgaagttcagaagcacaacctatcatatctgttttataactggagcattacgaaaaggacacttaccgtttggctaatctggttcactggaagtttgggattctactcgttttccttgaattctgttaacttaggaggcaatgaatacttaaacctcttcctcctgggtgtagtggaaattcccgcctacaccttcgtgtgcatcgccatggacaaggtcgggaggagaacagtcctggcctactctcttttctgcagtgcactggcctgtggtgtcgttatggtgatcccccagaaacattatattttgggtgtggtgacagctatggttggaaaatttgccatcggggcagcatttggcctcatttatctttatacagctgagctgtatccaaccattgtaagatcgctggctgtgggaagcggcagcatggtgtgtcgcctggccagcatcctggcgccgttctctgtggacctcagcagcatttggatcttcataccacagctcctaggacagcaccttcaggagtaa

SEQ ID NO: 330987 - DNA, 1968 bp, Artificial Sequence
  derived and/or modified sequence
gattatgttacggtgcagttgcagaatggtgagatctgggagctctcaaggtgtagcaggaataagagggagaacacatcgagtttgggctatgaatacactggcagtaagaaagagtttccttgtgtggatggctacatatatgaccagaacacatggaaaagcactgcggtgacccagtggaacctggtctgtgaccgaaaatggcttgcaatgctgatccagcccctatttatgtttggagtcctactgggatcggtgacttttggctacttttctgacaggctaggacgccgggtggtcttgtgggccacaagcagtagcatgtttttgtttggaatagcagcggcgtttgcagttgattattacaccttcatggctgctcgcttttttcttgccatggttgcaagtggctatcttgtggtggggtttgtctatgtgatggaattcattggcatgaagtctcggacatgggcgtctgtccatttgcattccttttttgcagttggaaccctgctggtggctttgacaggatacttggtcaggacctggtggctttaccagatgatcctctccacagtgactgtcccctttatcctgtgctgttgggtgctcccagagacacctttttggcttctctcagagggacgatatgaagaagcacaaaaaatagttgacatcatggccaagtggaacagggcaagctcctgtaaactgtcagaacttttatcactggacctacaaggtcctgttagtaatagccccactgaagttcagaagcacaacctatcatatctgttttataactggagcattacgaaaaggacacttaccgtttggctaatctggttcactggaagtttgggattctactcgttttccttgaattctgttaacttaggaggcaatgaatacttaaacctcttcctcctgggtgtagtggaaattcccgcctacaccttcgtgtgcatcgccatggacaaggtcgggaggagaacagtcctggcctactctcttttctgcagtgcactggcctgtggtgtcgttatggtgatcccccagaaacattatattttgggtgtggtgacagctatggttggaaaatttgccatcggggcagcatttggcctcatttatctttatacagctgagctgtatccaaccattgtaagatcgctggctgtgggaagcggcagcatggtgtgtcgcctggccagcatcctggcgccgttctctgtggacctcagcagcatttggatcttcataccacagctcctaggacagcaccttcaggagtaataatgcaggcagtagctggcaattaaggaggcactccatggtgggtcatgaaggaatgaatgagtgagtgatgagattaaacctcgttgatgaggaaaagaactcgaagtccagcacaagtaaccaaagatctcaccgagtaatcacagtgacaactgttatgtcaaattcaaatccattaccctctgaaaacagttaggaaattctattctccgaagggttcgttcctttcttgatgtgtcacttatcattatttttaattccttctagttgtttgttgggactatggccctcctgagtggagtgttaacactaaagcttccagaaacccttgggaaacggctagcaactacttgggaggaggctgcaaaactggagtcagagaatgaaagcaagtcaagcaaattacttctcacaactaataatagtgggctggaaaaaacggaagcgattacccccagggattctggtcttggtgaataaatgtgccatgcctgctgtctagcacctgaaatattatttaccctaatgcctttgtattagaggaatcttattctcatctcccatatgttgtttgtatgtctttttaataaattttgtaagaaaattttaaagcaaatatgttataaaagaaataaaaactaagatgaaaattctcagttttaaaaa

SEQ ID NO: 330988 - DNA, 1548 bp, Artificial Sequence
  derived and/or modified sequence
atgggcagcagacacttcgagggcatctacgaccacgtgggccacttcggcagattccagagagtgctgtacttcatctgcgccttccagaacatcagctgcggcatccactacctggccagcgtgttcatgggcgtgaccccccaccacgtgtgcagaccccccggcaacgtgagccaggtggtgttccacaaccacagcaactggagcctggaggacaccggcgccctgctgagcagcggccagaaggactacgtgaccgtgcagctgcagaacggcgagatctgggagctgagcagatgcagcagaaacaagagagagaacaccagcagcctgggctacgagtacaccggcagcaagaaggagttcccctgcgtggacggctacatctacgaccagaacacctggaagagcaccgccgtgacccagtggaacctggtgtgcgacagaaagtggctggccatgctgatccagcccctgttcatgttcggcgtgctgctgggcagcgtgaccttcggctacttcagcgacagactgggcagaagagtggtgctgtgggccaccagcagcagcatgttcctgttcggcatcgccgccgccttcgccgtggactactacaccttcatggccgccagattcttcctggccatggtggccagcggctacctggtggtgggcttcgtgtacgtgatggagttcatcggcatgaagagcagaacctgggccagcgtgcacctgcacagcttcttcgccgtgggcaccctgctggtggccctgaccggctacctggtgagaacctggtggctgtaccagatgatcctgagcaccgtgaccgtgcccttcatcctgtgctgctgggtgctgcccgagacccccttctggctgctgagcgagggcagatacgaggaggcccagaagatcgtggacatcatggccaagtggaacagagccagcagctgcaagctgagcgagctgctgagcctggacctgcagggccccgtgagcaacagccccaccgaggtgcagaagcacaacctgagctacctgttctacaactggagcatcaccaagagaaccctgaccgtgtggctgatctggttcaccggcagcctgggcttctacagcttcagcctgaacagcgtgaacctgggcggcaacgagtacctgaacctgttcctgctgggcgtggtggagatccccgcctacaccttcgtgtgcatcgccatggacaaggtgggcagaagaaccgtgctggcctacagcctgttctgcagcgccctggcctgcggcgtggtgatggtgatcccccagaagcactacatcctgggcgtggtgaccgccatggtgggcaagttcgccatcggcgccgccttcggcctgatctacctgtacaccgccgagctgtaccccaccatcgtgagaagcctggccgtgggcagcggcagcatggtgtgcagactggccagcatcctggcccccttcagcgtggacctgagcagcatctggatcttcatcccccagctgctgggccagcacctgcaggagtag

SEQ ID NO: 330989 - DNA, 1299 bp, Artificial Sequence
  derived and/or modified sequence
gactacgtgaccgtgcagctgcagaacggcgagatctgggagctgagcagatgcagcagaaacaagagagagaacaccagcagcctgggctacgagtacaccggcagcaagaaggagttcccctgcgtggacggctacatctacgaccagaacacctggaagagcaccgccgtgacccagtggaacctggtgtgcgacagaaagtggctggccatgctgatccagcccctgttcatgttcggcgtgctgctgggcagcgtgaccttcggctacttcagcgacagactgggcagaagagtggtgctgtgggccaccagcagcagcatgttcctgttcggcatcgccgccgccttcgccgtggactactacaccttcatggccgccagattcttcctggccatggtggccagcggctacctggtggtgggcttcgtgtacgtgatggagttcatcggcatgaagagcagaacctgggccagcgtgcacctgcacagcttcttcgccgtgggcaccctgctggtggccctgaccggctacctggtgagaacctggtggctgtaccagatgatcctgagcaccgtgaccgtgcccttcatcctgtgctgctgggtgctgcccgagacccccttctggctgctgagcgagggcagatacgaggaggcccagaagatcgtggacatcatggccaagtggaacagagccagcagctgcaagctgagcgagctgctgagcctggacctgcagggccccgtgagcaacagccccaccgaggtgcagaagcacaacctgagctacctgttctacaactggagcatcaccaagagaaccctgaccgtgtggctgatctggttcaccggcagcctgggcttctacagcttcagcctgaacagcgtgaacctgggcggcaacgagtacctgaacctgttcctgctgggcgtggtggagatccccgcctacaccttcgtgtgcatcgccatggacaaggtgggcagaagaaccgtgctggcctacagcctgttctgcagcgccctggcctgcggcgtggtgatggtgatcccccagaagcactacatcctgggcgtggtgaccgccatggtgggcaagttcgccatcggcgccgccttcggcctgatctacctgtacaccgccgagctgtaccccaccatcgtgagaagcctggccgtgggcagcggcagcatggtgtgcagactggccagcatcctggcccccttcagcgtggacctgagcagcatctggatcttcatcccccagctgctgggccagcacctgcaggagtag

SEQ ID NO: 330990 - DNA, 1021 bp, Artificial Sequence
  derived and/or modified sequence
gcggcgctcgcgatccgaaaacatctccacttcctcctcaccccgcgcagtcgggacacgggcgtccagacgccggcccctagctgggcttctcctctaggcctctggcagcgggacctggcatgattccagagagtcctctatttcatatgtgccttccagaacatctcttgtggtattcactacttggcttctgtgttcatgggagtcacccctcatcatgtctgcaggcccccaggcaatgctaggacgccgggtggtcttgtgggccacaagcagtagcatgtttttgtttggaatagcagcggcgtttgcagttgattattacaccttcatggctgctcgcttttttcttgccatggttgcaagtggctatcttgtggtggggtttgtctatgtgatggaattcattggcatgaagtctcggacatgggcgtctgtccatttgcattccttttttgcagttggaaccctgctggtggctttgacaggatacttggtcaggacctggtggctttaccagatgatcctctccacagtgactgtcccctttatcctgtgctgttgggtgctcccagagacacctttttggcttctctcagagggacgatatgaagaagcacaaaaaatagttgacatcatggccaagtggaacagggcaagctcctgtaaactgtcagaacttttatcactggacctacaaggtcctgttagtaatagccccactgaagttcagaagcacaacctatcatatctgttttataactggagcattacgaaaaggacacttaccgtttggctaatctggttcactggaagtttgggattctactcgttttccttgaattctgttaacttaggaggcaatgaatacttaaacctcttcctcctgggtgtagtggaaattcccgcctacaccttcgtgtgcatcgccatggacaaggtcgggaggagaacagtcctggcctactctcttttctgcagtgcactggcctgtggtgtcgttatggtgatcccccag

SEQ ID NO: 330991 - DNA, 525 bp, Artificial Sequence
  derived and/or modified sequence
atgggcgtaaccccacatcatgtgtgtcgaccccccgggaacgtgagccaggtggtcttccataaccacagcaactggtcgctggaagatacaggagccctgctttcatcgggccagaaggactatgtcaccgtgcagttgcagaatggagagatctgggagctgtccagatgcagtcgcaacaaaagagagaacacgtcctctctgggctatgagtacactgggtctaaaaaggagttcccttgtgtggacggttatatttacgatcagaacacgtggaaatcgacagctgtcactcagtggaacctagtctgcgaccggaaatggctcgcaatgttaattcagcccctatttatgttcggggtgttactcggctcagtgacctttggatatttctccgacagactggggcgtagggtggtgctgtgggctaccagcagttctatgtttctgtttggcattgcagccgccttcgcggtcgattactataccttcatggccgcgagattctttctcgccatgtag

SEQ ID NO: 330992 - DNA, 1056 bp, Artificial Sequence
  derived and/or modified sequence
atgggggtcacacctcaccacgtatgcagaccccccgggaacgtgtctcaagttgtattccacaatcacagtaactggtctcttgaggatacaggagcgcttctgtcctctggacagaaggactacgtgaccgtgcagttacagaacggcgagatttgggaactttccagatgttcccggaacaagagagaaaataccagttcacttggctatgagtataccggctccaaaaaagagtttccgtgcgtggacggttatatctacgaccagaatacctggaagtctactgcagttacacagtggaacttagtctgcgacagaaaatggcttgcgatgcttattcagcccctgtttatgttcggcgtcctcctcggaagcgttacttttgggtattttagcgatcggcttggcagaagggtggtgttgtgggctactagtagcagcatgttcctattcggcattgccgctgccttcgcagttgactactacactttcatggcggcgagatttttcctggctatggtagcctccggatatttagtggtcggatttgtatatgtgatggagttcataggtatgaagagtaggacctgggcttctgttcacctgcactccttctttgccgtgggaacactgcttgtagctcttaccggctatctggtcagaacctggtggctgtaccaaatgattctgagcacagtaaccgtcccatttattctttgttgctgggtgctgcccgagacccccttttggctgttatctgaaggacgatacgaggaagcacaaaagatcgtcgacatcatggcgaagtggaaccgggccagctcctgtaagctcagcgagctcttatccttggatctacagggtccggtgtccaattctccaactgaggtccagaaacataatctgtcctacctcttctataattggagcattacaaagcggacactgacggtctggcttatttggttcacgggttctctgggcttctactcatttagcctgaacagcgtgaacctgggaggtaatgagtacttaaacctgtttctgctgtag

SEQ ID NO: 330993 - DNA, 600 bp, Artificial Sequence
  derived and/or modified sequence
atgggctcccggcattttgagggcatctacgaccatgtgggtcactttgggcgcttccagcgagtgctctacttcatttgcgccttccagaatatctcttgcgggatccactacttagcctctgtgttcatgggggtcactccccatcatgtttgcaggccgcctggtaatgtgagtcaggtggtcttccataaccactcaaactggagcctagaggacacgggggcactgctgagctcagggcaaaaagactatgtgacagtccaactccagaacggagagatttgggaactgagtcggtgcagccggaacaaacgagagaatacgtctagcctgggctatgaatacactgggtctaagaaagagttcccttgtgtggatggatatatttatgaccagaatacttggaagtcgaccgccgttacccaatggaacctggtttgtgacagaaagtggttggcaatgctgattcagccattgtttatgtttggcgtgttgctcggatctgtgaccttcggatatttcagcgatagggtggggtttctcaccgcgtggtacaaaactagtggatttccgactagcagcgccccccctctctag

SEQ ID NO: 330994 - DNA, 525 bp, Artificial Sequence
  derived and/or modified sequence
atgggcgtgaccccccaccacgtgtgcaggcctcctggaaatgtgtcccaggtggtgttccacaaccacagcaactggagcctggaggacacaggagccctgctgagcagcggccagaaggactatgtgacagtgcagctgcagaatggagagatctgggagctgagccgctgcagcaggaacaagcgggagaacaccagcagcctgggctatgagtacacaggcagcaagaaggagttcccctgtgtggatggctacatctatgaccagaacacctggaagagcacagctgtgacccagtggaacctggtgtgtgacaggaagtggctggccatgctgatccagcccctcttcatgtttggagtgctgctgggctctgtgaccttcggctacttcagtgaccggctgggccggcgggtggtgctgtgggccaccagcagctccatgttcctgtttggaattgctgctgcctttgctgtggactactacaccttcatggccgcccgcttcttcctggccatgtag

SEQ ID NO: 330995 - DNA, 1056 bp, Artificial Sequence
  derived and/or modified sequence
atgggcgtgaccccccaccacgtgtgcaggcctcctggaaatgtgtcccaggtggtgttccacaaccacagcaactggagcctggaggacacaggagccctgctgagcagcggccagaaggactatgtgacagtgcagctgcagaatggagagatctgggagctgagccgctgcagcaggaacaagcgggagaacaccagcagcctgggctatgagtacacaggcagcaagaaggagttcccctgtgtggatggctacatctatgaccagaacacctggaagagcacagctgtgacccagtggaacctggtgtgtgacaggaagtggctggccatgctgatccagcccctcttcatgtttggagtgctgctgggctctgtgaccttcggctacttcagtgaccggctgggccggcgggtggtgctgtgggccaccagcagctccatgttcctgtttggaattgctgctgcctttgctgtggactactacaccttcatggccgcccgcttcttcctggccatggtggccagcggctacctggtggtgggctttgtgtatgtgatggagttcatcggcatgaagagcaggacctgggcctctgtgcacctgcacagcttctttgctgtgggcaccctgctggtggccctgaccggctacctggtgaggacctggtggctgtaccagatgatcctgagcacagtgacagtgcccttcatcctgtgctgctgggtgctgcctgagacccccttctggctgctgtctgagggccgctatgaggaggcccagaagatcgtggacatcatggccaagtggaacagagccagcagctgcaagctgtctgagctgctgagcctggacctgcagggccctgtgagcaacagccccacagaggtgcagaagcacaacctgagctacctgttctacaactggagcatcaccaagaggaccctgactgtgtggctgatctggttcaccggcagcctgggcttctacagcttcagcctgaacagcgtgaacctgggcggcaatgagtacctgaacctcttcctgctgtag

SEQ ID NO: 330996 - DNA, 600 bp, Artificial Sequence
  derived and/or modified sequence
atgggcagccgccactttgagggcatctatgaccacgtgggccacttcggccgcttccagagggtgctgtacttcatctgtgccttccagaacatcagctgtggcatccactacctggcctctgtgttcatgggcgtgaccccccaccacgtgtgccggcccccaggaaatgtgtcccaggtggtgttccacaaccacagcaactggagcctggaggacaccggggccctgctgagcagcggccagaaggactatgtgacagtgcagctgcagaatggagagatctgggagctgagccgctgcagcaggaacaagcgggagaacaccagcagcctgggctatgagtacacaggcagcaagaaggagttcccctgtgtggatggctacatctatgaccagaacacctggaagagcacagctgtgacccagtggaacctggtgtgtgacaggaagtggctggccatgctgatccagcccctcttcatgtttggagtgctgctgggctctgtgaccttcggctacttcagtgacagagtgggcttcctgacagcctggtacaagaccagcggcttccccaccagcagcgccccacccctgtag

SEQ ID NO: 330997 - DNA, 525 bp, Artificial Sequence
  derived and/or modified sequence
atgggcgtgaccccccaccacgtgtgccggccccccggcaacgtgtcccaggtcgtgtttcataaccactccaactggagcctggaagacacaggcgccctactgtcctccggtcagaaagattatgttacagttcagcttcagaatggtgaaatctgggaattgtcaaggtgctccaggaacaaaagggagaacacatcctcgctggggtacgaatataccggtagtaaaaaggagtttccttgtgttgatgggtacatctacgatcagaacacttggaaaagtaccgccgtgacccagtggaatctggtctgtgatagaaagtggttagcaatgctcatacagcctttgttcatgttcggggtgctgctcggctctgtgacttttggatacttctccgataggcttggaaggcgggtggtcctgtgggccacctcgtccagcatgtttctgttcggaattgctgcggctttcgcagtggattactatactttcatggcagctagattctttctggctatgtag

SEQ ID NO: 330998 - DNA, 1056 bp, Artificial Sequence
  derived and/or modified sequence
atgggcgtgaccccccaccacgtgtgccggccccccggcaacgtgtctcaagttgttttccacaatcattcaaactggtcgctggaggataccggggcattactctctagcggtcagaaggattacgtaactgtgcagctccagaatggagagatttgggaacttagcagatgttctcggaataaaagagagaacacttcctccctgggttatgaatatactgggtccaagaaggaattcccttgcgttgatggctacatttacgatcaaaacacctggaaatcaacggccgtcactcagtggaacttggtttgtgataggaagtggttggctatgctaattcagcccttattcatgtttggagtgctgcttggctccgtcacatttgggtacttcagcgaccgactggggagaagagttgtcttatgggccacaagcagcagcatgttcttatttggaatcgccgccgccttcgcagtggactactataccttcatggcagcccggttcttcttggctatggtggccagtggctatctagtggtaggcttcgtatacgtgatggagttcatcggaatgaaatcaaggacttgggccagcgtccatttacattcgtttttcgcggtcggcaccctcctggtcgcactgactggctacttggtaagaacctggtggctttatcaaatgatcctctcaactgtgacagtgccgttcattctatgttgttgggttctccccgaaacacctttttggcttctgtcggagggccgatacgaggaggcgcaaaagatagtcgatattatggcaaagtggaatagagcctcaagctgcaagctttcggagctgttgagcctcgacctgcagggccccgtgtcaaattctcccactgaggttcagaagcacaatctttcctacctcttctataactggtctataacaaaacgcactttaaccgtctggcttatctggttcacaggttccctgggcttctactctttttctttaaacagtgtaaacctgggaggaaatgagtatctgaacttgttcctgctttag

SEQ ID NO: 330999 - DNA, 600 bp, Artificial Sequence
  derived and/or modified sequence
atgggcagccggcacttcgagggcatctacgaccacgtgggccacttcggtaggttccaacgagtgctctacttcatctgtgccttccagaacattagttgcggaattcattacttggcatccgtgttcatgggagtgacaccccatcacgtgtgtaggccccctggtaacgtgagtcaggtagtgttccataatcactccaactggtccctagaagacacaggtgccctgctgtcttctgggcagaaggattacgtgaccgttcagctgcagaatggagagatctgggaactatccagatgttctcggaacaagagggaaaatacctccagccttggttacgaatataccggatccaaaaaggagtttccatgcgtggacggatacatttatgaccagaatacatggaagagcaccgccgtgacccagtggaatctcgtgtgcgatagaaaatggttggccatgctgattcagcccctattcatgtttggagttcttctgggaagtgtaaccttcgggtactttagtgacagggtaggattcttgaccgcctggtacaagacctcaggctttcctacaagttcagcccccccgttgtag

SEQ ID NO: 331000 - DNA, 525 bp, Artificial Sequence
  derived and/or modified sequence
atgggagtcacgccccaccatgtgtgtcgcccacctggtaacgtcagccaagtggtgtttcataatcattccaattggtcacttgaagatactggcgctctgctcagctccggacagaaggattatgtgacagtgcagttacagaatggggaaatttgggaattgtccaggtgctcgaggaataagagggagaacaccagctccctagggtatgagtatactggcagcaagaaggagtttccttgcgttgacgggtacatttatgaccaaaacacatggaaatctaccgccgtgacccaatggaatctcgtctgcgatcgaaagtggcttgcaatgttaattcagcccctattcatgtttggggtcttgctgggctctgtcacattcggatacttctccgataggctggggcgacgagtggtgctctgggctactagctcaagcatgtttctgttcggcatcgctgcagcatttgccgtggactattatacatttatggctgctagattcttcctagctatgtag

SEQ ID NO: 331001 - DNA, 1056 bp, Artificial Sequence
  derived and/or modified sequence
atgggtgtgactccccaccacgtctgcagacctcccggaaacgtgagccaagtcgtattccacaatcattccaactggagcttggaagacacaggagctctgctatccagtggccagaaagactatgtgacagtgcaactccaaaatggagagatctgggagctgtccagatgtagtcgtaataagagagaaaacacgagctcgctcggttacgagtatacgggcagcaagaaagagttcccgtgtgtggacggatacatatacgaccagaacacgtggaagagtacggcagtgacccaatggaatttggtatgcgacaggaaatggctggccatgctgatacagcctctgttcatgttcggggttctcctggggtcagtaaccttcggctattttagcgatcgcttagggagacgagtagtcctctgggccacttcaagcagcatgtttttgttcggcattgccgctgcgtttgccgtagactactacacctttatggccgcacgattcttcttagcgatggtggcatctggttacctggtggtgggattcgtgtatgtcatggagtttataggcatgaaatcccggacctgggccagtgtacatctgcattctttctttgcagtgggcactcttctggtggctctgacgggttacctggtgagaacatggtggttataccagatgatactgtccacggtaacagtgcccttcatcttatgctgctgggtcttgcctgagactcccttctggctactgtcagaaggtagatacgaggaagcgcagaagatcgtggacattatggccaagtggaatcgtgccagttcatgcaagctcagtgaacttctaagtctcgacctccagggcccagtaagcaattcccctaccgaggtacagaagcataatttatcctacctattctataattggtcaattaccaaacggacactcacagtgtggctgatatggttcacaggatccctcggattctacagtttctccctgaatagcgtgaacttggggggaaacgagtacttaaacctgttcttgctttag

SEQ ID NO: 331002 - DNA, 600 bp, Artificial Sequence
  derived and/or modified sequence
atggggagccgccacttcgagggaatctacgaccacgtgggccacttcggtcggttccaacgtgtattatattttatctgcgcatttcagaatatcagttgtggcatccactatctggcgtcagtgttcatgggcgtgacaccgcaccacgtgtgccgtccccctggcaatgtctcccaggtggttttccataaccatagcaactggtctctggaggacacaggcgctcttctatcatccggccagaaagattacgtgacagtccagctccagaacggagagatttgggaattgagcagatgttcccgaaacaaaagggagaacacaagctccttgggttatgagtacaccgggtccaagaaggagttcccctgtgttgatgggtacatttatgatcagaatacatggaaaagcacagccgtcacccaatggaacctcgtatgtgatcgcaaatggctggccatgttaatccaacctctgtttatgttcggcgtgctgctggggtctgttaccttcggatacttttccgacagagtgggttttctgacagcctggtataaaaccagtggtttccccacatcaagcgcccctcccctttag

SEQ ID NO: 331003 - DNA, 737 bp, Artificial Sequence
  derived and/or modified sequence
gcgcagtcgggacacgggcgtccagacgccggcccctagctgggcttctcctctaggcctctggcagcgggacctggcatggtgagcagaggcgctgggctcgctcggagtgcgcctgttgccgggcaggagggacctgattccagagagtcctctatttcatatgtgccttccagaacatctcttgtggtattcactacttggcttctgtgttcatgggagtcacccctcatcatgtctgcaggcccccaggcaatgtgagtcaggttgttttccataatcactctaattggagtttggaggacaccggggccctgttgtcttcaggccagaaagattatgttacggtgcagttgcagaatggtgagatctgggagctctcaaggtgtagcaggaataagagggagaacacatcgagtttgggctatgaatacactggcagtaagaaagagtttccttgtgtggatggctacatatatgaccagaacacatggaaaagcactgcggtgacccagtggaacctggtctgtgaccgaaaatggcttgcaatgctgatccagcccctatttatgtttggagtcctactgggatcggtgacttttggctacttttctgacaggctaggacgccgggtggtcttgtgggccacaagcagtagcatgtttttgtttggaatagcagcggcgtttgcagttgattattacaccttcatggctgctcgcttttttcttgccatg

SEQ ID NO: 331004 - DNA, 1213 bp, Artificial Sequence
  derived and/or modified sequence
ccgcgcagtcgggacacgggcgtccagacgccggcccctagctgggcttctcctctaggcctctggcagcgggacctggcatgattccagagagtcctctatttcatatgtgccttccagaacatctcttgtggtattcactacttggcttctgtgttcatgggagtcacccctcatcatgtctgcaggcccccaggcaatgtgagtcaggttgttttccataatcactctaattggagtttggaggacaccggggccctgttgtcttcaggccagaaagattatgttacggtgcagttgcagaatggtgagatctgggagctctcaaggtgtagcaggaataagagggagaacacatcgagtttgggctatgaatacactggcagtaagaaagagtttccttgtgtggatggctacatatatgaccagaacacatggaaaagcactgcggtgacccagtggaacctggtctgtgaccgaaaatggcttgcaatgctgatccagcccctatttatgtttggagtcctactgggatcggtgacttttggctacttttctgacaggctaggacgccgggtggtcttgtgggccacaagcagtagcatgtttttgtttggaatagcagcggcgtttgcagttgattattacaccttcatggctgctcgcttttttcttgccatggttgcaagtggctatcttgtggtggggtttgtctatgtgatggaattcattggcatgaagtctcggacatgggcgtctgtccatttgcattccttttttgcagttggaaccctgctggtggctttgacaggatacttggtcaggacctggtggctttaccagatgatcctctccacagtgactgtcccctttatcctgtgctgttgggtgctcccagagacacctttttggcttctctcagagggacgatatgaagaagcacaaaaaatagttgacatcatggccaagtggaacagggcaagctcctgtaaactgtcagaacttttatcactggacctacaaggtcctgttagtaatagccccactgaagttcagaagcacaacctatcatatctgttttataactggagcattacgaaaaggacacttaccgtttggctaatctggttcactggaagtttgggattctactcgttttccttgaattctgttaacttaggaggcaatgaatacttaaacctcttcctcctgg

SEQ ID NO: 331005 - DNA, 1233 bp, Artificial Sequence
  derived and/or modified sequence
ggagctcggctaactcggcgcccagtgcacggccgcaccatggggtcccgccacttcgaggggatttatgaccacgtggggcacttcggcagattccagagagtcctctatttcatatgtgccttccagaacatctcttgtggtattcactacttggcttctgtgttcatgggagtcacccctcatcatgtctgcaggcccccaggcaatgtgagtcaggttgttttccataatcactctaattggagtttggaggacaccggggccctgttgtcttcaggccagaaagattatgttacggtgcagttgcagaatggtgagatctgggagctctcaaggtgtagcaggaataagagggagaacacatcgagtttgggctatgaatacactggcagtaagaaagagtttccttgtgtggatggctacatatatgaccagaacacatggaaaagcactgcggtgacccagtggaacctggtctgtgaccgaaaatggcttgcaatgctgatccagcccctatttatgtttggagtcctactgggatcggtgacttttggctacttttctgacagagtaggcttcctaactgcttggtacaaaaccagtggattccccacatccagtgctcctcctctctaattcaacccactatctgtgaagtgtcatctggactcattgtgggacttggggattagaggacctgagacaaagatgctgctgccctactgcttgctaacgaagctaggacgccgggtggtcttgtgggccacaagcagtagcatgtttttgtttggaatagcagcggcgtttgcagttgattattacaccttcatggctgctcgcttttttcttgccatggttgcaagtggctatcttgtggtggggtttgtctatgtgatggaattcattggcatgaagtctcggacatgggcgtctgtccatttgcattccttttttgcagttggaaccctgctggtggctttgacaggatacttggtcaggacctggtggctttaccagatgatcctctccacagtgactgtcccctttatcctgtgctgttgggtgctcccagagacacctttttggcttctctcagagggacgatatgaagaagcacaaaaaatagttgacatcatggccaagtggaacagggcaagctcctgtaaactgtcagaacttttatcactggacctacaaggtcctgttagtaatagccccactgaagttcag

SEQ ID NO: 331006 - DNA, 525 bp, Artificial Sequence
  derived and/or modified sequence
atgggcgtgaccccccaccacgtgtgcagaccccccggcaacgtgagccaggtggtgttccacaaccacagcaactggagcctggaggacaccggcgccctgctgagcagcggccagaaggactacgtgaccgtgcagctgcagaacggcgagatctgggagctgagcagatgcagcagaaacaagagagagaacaccagcagcctgggctacgagtacaccggcagcaagaaggagttcccctgcgtggacggctacatctacgaccagaacacctggaagagcaccgccgtgacccagtggaacctggtgtgcgacagaaagtggctggccatgctgatccagcccctgttcatgttcggcgtgctgctgggcagcgtgaccttcggctacttcagcgacagactgggcagaagagtggtgctgtgggccaccagcagcagcatgttcctgttcggcatcgccgccgccttcgccgtggactactacaccttcatggccgccagattcttcctggccatgtag

SEQ ID NO: 331007 - DNA, 1056 bp, Artificial Sequence
  derived and/or modified sequence
atgggcgtgaccccccaccacgtgtgcagaccccccggcaacgtgagccaggtggtgttccacaaccacagcaactggagcctggaggacaccggcgccctgctgagcagcggccagaaggactacgtgaccgtgcagctgcagaacggcgagatctgggagctgagcagatgcagcagaaacaagagagagaacaccagcagcctgggctacgagtacaccggcagcaagaaggagttcccctgcgtggacggctacatctacgaccagaacacctggaagagcaccgccgtgacccagtggaacctggtgtgcgacagaaagtggctggccatgctgatccagcccctgttcatgttcggcgtgctgctgggcagcgtgaccttcggctacttcagcgacagactgggcagaagagtggtgctgtgggccaccagcagcagcatgttcctgttcggcatcgccgccgccttcgccgtggactactacaccttcatggccgccagattcttcctggccatggtggccagcggctacctggtggtgggcttcgtgtacgtgatggagttcatcggcatgaagagcagaacctgggccagcgtgcacctgcacagcttcttcgccgtgggcaccctgctggtggccctgaccggctacctggtgagaacctggtggctgtaccagatgatcctgagcaccgtgaccgtgcccttcatcctgtgctgctgggtgctgcccgagacccccttctggctgctgagcgagggcagatacgaggaggcccagaagatcgtggacatcatggccaagtggaacagagccagcagctgcaagctgagcgagctgctgagcctggacctgcagggccccgtgagcaacagccccaccgaggtgcagaagcacaacctgagctacctgttctacaactggagcatcaccaagagaaccctgaccgtgtggctgatctggttcaccggcagcctgggcttctacagcttcagcctgaacagcgtgaacctgggcggcaacgagtacctgaacctgttcctgctgtag

SEQ ID NO: 331008 - DNA, 600 bp, Artificial Sequence
  derived and/or modified sequence
atgggcagcagacacttcgagggcatctacgaccacgtgggccacttcggcagattccagagagtgctgtacttcatctgcgccttccagaacatcagctgcggcatccactacctggccagcgtgttcatgggcgtgaccccccaccacgtgtgcagaccccccggcaacgtgagccaggtggtgttccacaaccacagcaactggagcctggaggacaccggcgccctgctgagcagcggccagaaggactacgtgaccgtgcagctgcagaacggcgagatctgggagctgagcagatgcagcagaaacaagagagagaacaccagcagcctgggctacgagtacaccggcagcaagaaggagttcccctgcgtggacggctacatctacgaccagaacacctggaagagcaccgccgtgacccagtggaacctggtgtgcgacagaaagtggctggccatgctgatccagcccctgttcatgttcggcgtgctgctgggcagcgtgaccttcggctacttcagcgacagagtgggcttcctgaccgcctggtacaagaccagcggcttccccaccagcagcgccccccccctgtag

SEQ ID NO: 331009 - protein, 287 aa, Artificial Sequence
  derived and/or modified sequence
MKDRLAELLDLSKQYDQQFPDGDDEFDSPHEDIVFETDHILESLYRDIRDIQDENQLLVADVKRLGKQNARFLTSMRRLSSIKRDTNSIAKAIKARGEVIHCKLRAMKELSEAAEAQHGPHSAVARISRAQYNALTLTFQRAMHDYNQAEMKQRDNCKIRIQRQLEIMGKEVSGDQIEDMFEQGKWDVFSENLLADVKGARAALNEIESRHRELLRLESRIRDVHELFLQMAVLVEKQADTLNVIELNVQKTVDYTGQAKAQVRKAVQYEEKNPCRTLCCFCCPCLK

SEQ ID NO: 331010 - DNA, 1926 bp, Artificial Sequence
  derived and/or modified sequence
cgcggcggcgcggagctcgggcggccgtggaggaactcagcctcggccgcaggaggcgccgggagcggagccgccgggagtcgcgcaacaggtttccttctccatcgctgcgcccacaggggacgcgcgccctgccgggagaggggcttctcggttcgcactctcgctcccagtccaggcaaaatgaaagaccggctagcagaacttctggacttgtccaagcaatatgaccagcagttcccagacggggacgatgagtttgactcgccccacgaggacatcgtgttcgagacggaccacatcctggagtccctgtaccgagacatccgggacattcaggatgaaaaccagctgctggtggccgacgtgaagcggctgggaaagcagaacgcccgcttcctcacgtccatgcggcgcctcagcagcatcaagcgcgacaccaactccatcgccaaggccatcaaggcccggggcgaggtcatccactgcaagctgcgcgccatgaaggagctgagcgaggcggctgaggcccagcacggcccgcactcggcagtggcgcgcatttcgcgggcgcagtacaacgcgctcaccctcaccttccagcgcgccatgcacgactacaaccaggccgagatgaagcagcgcgacaactgcaagatccgcatccagcgccagctggagatcatgggcaaggaagtctcgggcgaccagatcgaggacatgttcgagcagggtaagtgggacgtgttttccgagaacttgctggccgacgtgaagggcgcgcgggccgccctcaacgagatcgagagccgccaccgcgaactgctgcgcctggagagccgcatccgcgacgtacacgagctcttcttgcagatggcggtgctggtggagaagcaggccgacaccctgaacgtcatcgagctcaacgtacaaaagacggtcgactacaccggccaggccaaggcgcaggtgcggaaggccgtgcagtacgaggagaagaacccctgccggaccctctgctgcttctgctgtccctgcctcaagtagcaggccggcccgggccgccaccgcccatcccagaccatggagcgcgctgggaaggacgcaccaaagccgggagctctgccctgcagggagttgccccaaccctttccggaactcagtctttagaaaagaaacgccaggttcaagaattgcaaaccagcctgtgcttggaaagatggttagttgataccgtccgatgattcttcagtaaagatagattcccacaaagttgtgcaatgtcattatatgacaccttgcactcttaccgtcttgacagaagccaagtaaggaactgaagttgtatctgactgtagggtgaatgtctgaggcctgcctcctaataaagactcaaggaggaagtcaattgggcatctgctaatagaatgaactcatgatggaaacttcagttcatttactttgtcctgaaaattccctggttctgttccattttgagcgaaattggccttgggaaaaaccacgttcttcctttccgattcttcatccggtctacgctatgcaattcctccccaaatatagatcttatttctgctcatttcccctacttattaaaatcacaccaaacacttactattttcttatctctttcactttttaaatatctttcaccaggttatattttggtattatttttccaaacatttttaagcactgaatatcgaacaagcactcaaattgaagtatcagtcatgttttgtgtatttttcgctgataaaaattatttaacatttatatttttacttgattacatatgcacatgtatgtaaatgtaaaatactaatattcactaatatatgtacataatgatcaattggtttaacttcttttatgtaagtatggtatataaatttcaagacgaacact

SEQ ID NO: 331011 - DNA, 393 bp, Artificial Sequence
  derived and/or modified sequence
atgggcatcagcaacagagtgaccaacgagaacagcaactgcgagatgagaaaggagaagagactgtgctacatccagccctgcgacagcaacatcctgaagaccatcaagatccccaagggcaagacctgccagcccaccttccagctgagcaaggccgagaagttcgtgttcagcggctgcagcagcacccagagctacaagcccaccttctgcggcatctgcctggacaagagatgctgcatccccaacaagagcaagatgatcaccatccagttcgactgccccaacgagggcagcttcaagtggaagatgctgtggatcaccagctgcgtgtgccagagaaactgcagagagcccggcgacatcttcagcgagctgaagatcctgtag

SEQ ID NO: 331012 - DNA, 393 bp, Artificial Sequence
  derived and/or modified sequence
atggggatctctaacagggttactaacgaaaactctaactgcgagatgcgcaaggagaagaggttgtgctacattcagccctgtgatagcaacattctcaagacgattaaaattccaaaggggaagacatgccaacccacattccagttgagcaaggccgagaagttcgtgttctccggttgctccagtacacagagctacaaacccactttttgcgggatttgcctcgataagcgatgctgcatccctaacaagtctaaaatgataacaatccaatttgattgccctaacgagggaagctttaagtggaaaatgctctggatcacgagttgtgtctgtcagcggaattgtagagagcctggcgatatcttttctgaactaaaaatactttag

SEQ ID NO: 331013 - DNA, 393 bp, Artificial Sequence
  derived and/or modified sequence
atgggcatcagcaacagagtgaccaatgaaaacagcaactgtgagatgaggaaggagaagaggctgtgctacatccagccctgtgacagcaacatcctgaagaccatcaagatccccaagggcaagacctgccagcccaccttccagctgagcaaggccgagaagtttgtgttttctggctgcagcagcacccagagctacaagcccaccttctgtggcatctgcctggacaagcgctgctgcatccccaacaagagcaagatgatcaccatccagtttgactgccccaatgaaggcagcttcaagtggaagatgctgtggatcaccagctgtgtgtgccagaggaactgccgggagcccggggacatcttcagcgagctgaagatcctgtag

SEQ ID NO: 331014 - DNA, 393 bp, Artificial Sequence
  derived and/or modified sequence
atgggcatcagcaaccgggtgaccaacgagaacagcaactgcgagatgaggaaagaaaagcgactttgctacatccagccttgcgacagtaacatcctgaaaaccataaaaatccccaaggggaagacatgccagcccacttttcagctcagtaaggctgagaaattcgtattcagcggatgttcatctactcaaagttacaagcccaccttctgtgggatatgcctggacaagcggtgttgtattccgaataagtctaaaatgataaccatacagttcgattgtccgaacgagggctctttcaagtggaaaatgctgtggataacttcttgtgtatgtcaacgtaactgtcgcgagccaggggatatattcagcgaactcaagattctatag

SEQ ID NO: 331015 - DNA, 393 bp, Artificial Sequence
  derived and/or modified sequence
atgggaattagcaaccgggtgaccaacgagaacagcaattgtgagatgaggaaagagaagcgcctctgctacatacagccgtgcgactctaatatccttaaaaccattaaaatccccaaaggaaaaacgtgccagcccacctttcaactgagtaaagctgagaagtttgtattctcaggctgcagttctactcaaagctataaaccaaccttctgcggaatctgcctggataaaaggtgctgtatccctaacaagagcaaaatgatcaccattcagttcgattgcccaaacgaagggagtttcaagtggaagatgttatggataacttcttgcgtgtgtcagcgtaactgtcgtgaacccggtgatatcttcagtgaactgaagattctgtag

SEQ ID NO: 331016 - DNA, 393 bp, Artificial Sequence
  derived and/or modified sequence
atgggaatttcgaatagagtgaccaacgagaattctaactgcgagatgcggaaggagaaacgcttgtgctatatccaaccttgcgactctaatatattaaagaccattaaaattccaaagggaaagacctgtcagccaaccttccaactttcaaaagccgaaaagtttgtgtttagcggatgctcgagcacacagagctataagcccactttctgcggaatttgtctcgataaaaggtgttgtattcccaataagtccaagatgatcaccatccaatttgactgtcctaacgaagggagcttcaaatggaaaatgctctggattactagttgcgtgtgtcagcgaaactgcagagaacctggcgatatctttagtgagctgaaaatactctag

SEQ ID NO: 331017 - DNA, 393 bp, Artificial Sequence
  derived and/or modified sequence
atgggcatctctaaccgagtaacaaatgagaattccaattgcgagatgaggaaagagaagcgattatgttatattcagccgtgcgattctaatatccttaagacgataaaaattccaaagggcaagacatgtcagcctacctttcaattatccaaggcagaaaagtttgtgttttccggatgttcatctacccaaagctataagcccacattttgcggcatttgccttgacaagcggtgttgcattcctaacaagagtaaaatgattacaattcagttcgactgccccaatgagggctcattcaaatggaagatgttgtggattacttcttgcgtctgtcagcgaaactgccgcgaacccggggacatcttttcagaacttaaaattctctag

SEQ ID NO: 331018 - DNA, 953 bp, Artificial Sequence
  derived and/or modified sequence
tgtgggaggtagagggtgtgtgcatgtaagtgtcttcttctggacctgctggaaaagattgagtctagacagaatttttttttcctgcaattgttagcttggagtgatcagcttagtttggctaaatatgagaccttgtagctgttgggtgcgagttcaaccaggtacattatcataatggccaagtgtttcagcccaaccccttgttcagctgcctctgtgtgagtggggccattggatgcacacctctgttcataccaaagctggctggcagtcactgctctggagctaaaggtggaaagaagtctgatcagtcaaactgtagcctggaaccattactacagcagctttcaacaagctacaaaacaatgccagatgtgtgccaagcttctaatctgcttcctgcattgaggtctttaaactgttgtctaccttccagcttatagaaatctcccacttatttggaaaaaaaaatgtcttgtgcaagcaacaaaatggactccctgctccagaacatgtgggatgggaatatctaacagggtgaccaatgaaaacagcaactgtgaaatgagaaaagagaaaagactgtgttacattcagccttgcgacagcaatatattaaagacaataaagattcccaaaggaaaaacatgccaacctactttccaactctccaaagctgaaaaatttgtcttttctggatgctcaagtactcagagttacaaacccactttttgtggaatatgcttggataagagatgctgtatccctaataagtctaaaatgattactattcaatttgattgcccaaatgaggggtcatttaaatggaagatgctgtggattacatcttgtgtgtgtcagagaaactgcagagaacctggagatatattttctgagctcaagattctgtaaaaccaagcaaatgggggaaaagttagtcaatcctgtca

SEQ ID NO: 331019 - protein, 1451 aa, Artificial Sequence
  derived and/or modified sequence
MALSKGLRLLGRLGAEGDCSVLLEARGRDDCLLFEAGTVATLAPEEKEVIKGQYGKLTDAYGCLGELRLKSGGTSLSFLVLVTGCTSVGRIPDAEIYKITATDFYPLQEEAKEEERLIALKKILSSGVFYFSWPNDGSRFDLTVRTQKQGDDSSEWGNSFFWNQLLHVPLRQHQVSCCDWLLKIICGVVTIRTVYASHKQAKACLVSRVSCERTGTRFHTRGVNDDGHVSNFVETEQMIYMDDGVSSFVQIRGSVPLFWEQPGLQVGSHHLRLHRGLEANAPAFDRHMVLLKEQYGQQVVVNLLGSRGGEEVLNRAFKKLLWASCHAGDTPMINFDFHQFAKGGKLEKLETLLRPQLKLHWEDFDVFTKGENVSPRFQKGTLRMNCLDCLDRTNTVQSFIALEVLHLQLKTLGLSSKPIVDRFVESFKAMWSLNGHSLSKVFTGSRALEGKAKVGKLKDGARSMSRTIQSNFFDGVKQEAIKLLLVGDVYGEEVADKGGMLLDSTALLVTPRILKAMTERQSEFTNFKRIRIAMGTWNVNGGKQFRSNVLRTAELTDWLLDSPQLSGATDSQDDSSPADIFAVGFEEMVELSAGNIVNASTTNKKMWGEQLQKAISRSHRYILLTSAQLVGVCLYIFVRPYHVPFIRDVAIDTVKTGMGGKAGNKGAVGIRFQFHSTSFCFICSHLTAGQSQVKERNEDYKEITQKLCFPMGRNVFSHDYVFWCGDFNYRIDLTYEEVFYFVKRQDWKKLLEFDQLQLQKSSGKIFKDFHEGAINFGPTYKYDVGSAAYDTSDKCRTPAWTDRVLWWRKKHPFDKTAGELNLLDSDLDVDTKVRHTWSPGALQYYGRAELQASDHRPVLAIVEVEVQEVDVGARERVFQEVSSFQGPLDATVVVNLQSPTLEEKNEFPEDLRTELMQTLGSYGTIVLVRINQGQMLVTFADSHSALSVLDVDGMKVKGRAVKIRPKTKDWLKGLREEIIRKRDSMAPVSPTANSCLLEENFDFTSLDYESEGDILEDDEDYLVDEFNQPGVSDSELGGDDLSDVPGPTALAPPSKSPALTKKKQHPTYKAGLMVKKSASDASISSGTHGQYSILQTARLLPGAPQQPPKARTGISKPYNVKQIKTTNAQEAEAAIRCLLEARGGASEEALSAVAPRDLEASSEPEPTPGAAKPETPQAPPLLPRRPPPRVPAIKKPTLRRTGKPLSPEEQFEQQTVHFTIGPPETSVEAPPVVTAPRVPPVPKPRTFQPGKAAERPSHRKPASDEAPPGAGASVPPPLEAPPLVPKVPPRRKKSAPAAFHLQVLQSNSQLLQGLTYNSSDSPSGHPPAAGTVFPQGDFLSTSSATSPDSDGTKAMKPEAAPLLGDYQDPFWNLLHHPKLLNNTWLSKSSDPLDSGTRSPKRDPIDPVSAGASAAKAELPPDHEHKTLGHWVTISDQEKRTALQVFDPLAKT

SEQ ID NO: 331020 - DNA, 4356 bp, Artificial Sequence
  derived and/or modified sequence
atggccctgagcaagggcctgagactgctgggcagactgggcgccgagggcgactgcagcgtgctgctggaggccagaggcagagacgactgcctgctgttcgaggccggcaccgtggccaccctggcccccgaggagaaggaggtgatcaagggccagtacggcaagctgaccgacgcctacggctgcctgggcgagctgagactgaagagcggcggcaccagcctgagcttcctggtgctggtgaccggctgcaccagcgtgggcagaatccccgacgccgagatctacaagatcaccgccaccgacttctaccccctgcaggaggaggccaaggaggaggagagactgatcgccctgaagaagatcctgagcagcggcgtgttctacttcagctggcccaacgacggcagcagattcgacctgaccgtgagaacccagaagcagggcgacgacagcagcgagtggggcaacagcttcttctggaaccagctgctgcacgtgcccctgagacagcaccaggtgagctgctgcgactggctgctgaagatcatctgcggcgtggtgaccatcagaaccgtgtacgccagccacaagcaggccaaggcctgcctggtgagcagagtgagctgcgagagaaccggcaccagattccacaccagaggcgtgaacgacgacggccacgtgagcaacttcgtggagaccgagcagatgatctacatggacgacggcgtgagcagcttcgtgcagatcagaggcagcgtgcccctgttctgggagcagcccggcctgcaggtgggcagccaccacctgagactgcacagaggcctggaggccaacgcccccgccttcgacagacacatggtgctgctgaaggagcagtacggccagcaggtggtggtgaacctgctgggcagcagaggcggcgaggaggtgctgaacagagccttcaagaagctgctgtgggccagctgccacgccggcgacacccccatgatcaacttcgacttccaccagttcgccaagggcggcaagctggagaagctggagaccctgctgagaccccagctgaagctgcactgggaggacttcgacgtgttcaccaagggcgagaacgtgagccccagattccagaagggcaccctgagaatgaactgcctggactgcctggacagaaccaacaccgtgcagagcttcatcgccctggaggtgctgcacctgcagctgaagaccctgggcctgagcagcaagcccatcgtggacagattcgtggagagcttcaaggccatgtggagcctgaacggccacagcctgagcaaggtgttcaccggcagcagagccctggagggcaaggccaaggtgggcaagctgaaggacggcgccagaagcatgagcagaaccatccagagcaacttcttcgacggcgtgaagcaggaggccatcaagctgctgctggtgggcgacgtgtacggcgaggaggtggccgacaagggcggcatgctgctggacagcaccgccctgctggtgacccccagaatcctgaaggccatgaccgagagacagagcgagttcaccaacttcaagagaatcagaatcgccatgggcacctggaacgtgaacggcggcaagcagttcagaagcaacgtgctgagaaccgccgagctgaccgactggctgctggacagcccccagctgagcggcgccaccgacagccaggacgacagcagccccgccgacatcttcgccgtgggcttcgaggagatggtggagctgagcgccggcaacatcgtgaacgccagcaccaccaacaagaagatgtggggcgagcagctgcagaaggccatcagcagaagccacagatacatcctgctgaccagcgcccagctggtgggcgtgtgcctgtacatcttcgtgagaccctaccacgtgcccttcatcagagacgtggccatcgacaccgtgaagaccggcatgggcggcaaggccggcaacaagggcgccgtgggcatcagattccagttccacagcaccagcttctgcttcatctgcagccacctgaccgccggccagagccaggtgaaggagagaaacgaggactacaaggagatcacccagaagctgtgcttccccatgggcagaaacgtgttcagccacgactacgtgttctggtgcggcgacttcaactacagaatcgacctgacctacgaggaggtgttctacttcgtgaagagacaggactggaagaagctgctggagttcgaccagctgcagctgcagaagagcagcggcaagatcttcaaggacttccacgagggcgccatcaacttcggccccacctacaagtacgacgtgggcagcgccgcctacgacaccagcgacaagtgcagaacccccgcctggaccgacagagtgctgtggtggagaaagaagcaccccttcgacaagaccgccggcgagctgaacctgctggacagcgacctggacgtggacaccaaggtgagacacacctggagccccggcgccctgcagtactacggcagagccgagctgcaggccagcgaccacagacccgtgctggccatcgtggaggtggaggtgcaggaggtggacgtgggcgccagagagagagtgttccaggaggtgagcagcttccagggccccctggacgccaccgtggtggtgaacctgcagagccccaccctggaggagaagaacgagttccccgaggacctgagaaccgagctgatgcagaccctgggcagctacggcaccatcgtgctggtgagaatcaaccagggccagatgctggtgaccttcgccgacagccacagcgccctgagcgtgctggacgtggacggcatgaaggtgaagggcagagccgtgaagatcagacccaagaccaaggactggctgaagggcctgagagaggagatcatcagaaagagagacagcatggcccccgtgagccccaccgccaacagctgcctgctggaggagaacttcgacttcaccagcctggactacgagagcgagggcgacatcctggaggacgacgaggactacctggtggacgagttcaaccagcccggcgtgagcgacagcgagctgggcggcgacgacctgagcgacgtgcccggccccaccgccctggccccccccagcaagagccccgccctgaccaagaagaagcagcaccccacctacaaggccggcctgatggtgaagaagagcgccagcgacgccagcatcagcagcggcacccacggccagtacagcatcctgcagaccgccagactgctgcccggcgccccccagcagccccccaaggccagaaccggcatcagcaagccctacaacgtgaagcagatcaagaccaccaacgcccaggaggccgaggccgccatcagatgcctgctggaggccagaggcggcgccagcgaggaggccctgagcgccgtggcccccagagacctggaggccagcagcgagcccgagcccacccccggcgccgccaagcccgagaccccccaggccccccccctgctgcccagaagacccccccccagagtgcccgccatcaagaagcccaccctgagaagaaccggcaagcccctgagccccgaggagcagttcgagcagcagaccgtgcacttcaccatcggcccccccgagaccagcgtggaggccccccccgtggtgaccgcccccagagtgccccccgtgcccaagcccagaaccttccagcccggcaaggccgccgagagacccagccacagaaagcccgccagcgacgaggccccccccggcgccggcgccagcgtgcccccccccctggaggccccccccctggtgcccaaggtgccccccagaagaaagaagagcgcccccgccgccttccacctgcaggtgctgcagagcaacagccagctgctgcagggcctgacctacaacagcagcgacagccccagcggccacccccccgccgccggcaccgtgttcccccagggcgacttcctgagcaccagcagcgccaccagccccgacagcgacggcaccaaggccatgaagcccgaggccgcccccctgctgggcgactaccaggaccccttctggaacctgctgcaccaccccaagctgctgaacaacacctggctgagcaagagcagcgaccccctggacagcggcaccagaagccccaagagagaccccatcgaccccgtgagcgccggcgccagcgccgccaaggccgagctgccccccgaccacgagcacaagaccctgggccactgggtgaccatcagcgaccaggagaagagaaccgccctgcaggtgttcgaccccctggccaagacctag

SEQ ID NO: 331021 - DNA, 4356 bp, Artificial Sequence
  derived and/or modified sequence
atggcactttccaagggactgagactcttaggccgacttggggctgagggcgattgttccgtattattagaggctagggggcgcgatgactgtctgctgtttgaggcgggcaccgtggcaactctggccccagaggagaaggaggtgatcaagggccagtacggaaaactcactgatgcttacggttgtctgggcgagctaagactgaaatctggaggcacatctctttccttcttagttcttgtgactgggtgtaccagcgttgggaggatccctgatgccgaaatttataaaatcaccgccacggatttctatcctttgcaggaagaggcaaaagaggaggaaaggttgatagcgctgaagaaaatcctgagcagtggagtgttttacttttcctggcctaatgacggatcgagattcgacctgacagtacgaacccagaagcagggtgatgactcatccgagtggggaaatagtttcttctggaatcagctcctccatgtgcctctaagacagcaccaagtcagctgctgcgactggctgctgaagatcatctgcggggtggtcaccattcgaacagtgtatgcctcccacaagcaggctaaggcctgccttgtgtctcgggtgtcctgcgagaggactggcacacgcttccataccaggggtgtcaatgatgacgggcatgtcagtaacttcgtcgaaactgagcagatgatctacatggatgacggcgtaagtagctttgtgcagatcagagggtctgtcccacttttttgggagcagcccggcctccaagttggatctcatcacctgagactccacagagggctggaggctaacgccccagcttttgaccggcacatggtacttctgaaggagcagtacggccagcaggtggtggtgaacctactggggtccaggggtggggaagaggttctcaacagggcattcaaaaaacttctgtgggcctcttgccatgcaggcgatacccccatgataaacttcgacttccatcagtttgcaaaaggggggaagctggaaaagctcgaaaccctccttaggccccaactgaagctccattgggaggattttgacgtttttactaagggggaaaacgtcagcccgagatttcagaagggcaccttaaggatgaactgtttggactgcctggatagaacgaacaccgtgcagagctttattgccctcgaggtattgcacctccagctgaaaactctgggactatcaagcaagccgattgtcgataggtttgtagagtcgtttaaagccatgtggtctttaaatgggcactctctctccaaagtcttcacggggtctcgcgccctagaggggaaggcgaaggttggaaagctgaaggacggggcacgcagtatgagccggactatccagagtaatttcttcgacggtgtgaaacaggaggcaattaagcttctgctagtgggagacgtgtacggcgaggaggtggcggacaagggaggaatgcttctggattctaccgccctccttgttactcccaggattctgaaagctatgaccgagcgccagagcgagttcacgaactttaaacggatacgaattgctatgggaacgtggaacgttaacggcggaaagcagttcagatcgaatgtcctgaggacagctgaattaaccgattggttactggactccccacagctctccggggccaccgactcacaggacgattcctctccagccgacattttcgctgtgggatttgaagagatggtggagctttcagcagggaacattgtcaacgcaagcaccacaaacaagaaaatgtggggcgagcaattgcagaaagccatctcgagatctcataggtacatcttactcacctctgctcagctggttggggtttgtttgtatatattcgtgcgaccctaccatgtgccttttatccgcgacgtggctatcgacacagtgaaaaccggaatggggggcaaggcaggtaacaaaggcgccgtggggattagatttcagttccattccacatccttctgttttatttgtagccacctgacggccggacaatcccaggtgaaagaaaggaacgaagattataaggagatcacccagaagctctgttttcctatgggccgaaatgttttttcacacgactatgtcttctggtgcggcgatttcaactatcgcatagacctgacgtacgaggaggtgttctacttcgtgaagcgccaagactggaagaagttgctagaatttgatcaattgcagttgcagaaatcgtcagggaagatcttcaaggactttcatgaaggcgccatcaactttggtccgacctacaaatatgacgtagggtccgcagcctacgacacaagtgacaaatgtcgaactccggcatggaccgatcgcgtcctctggtggcggaagaaacatccattcgataaaactgctggggagcttaacctgctggatagcgacctggatgtggatacaaaggtaagacatacatggtcacctggggccctgcagtactacgggcgagccgaactccaggcgtccgatcacaggcccgtcctagccatcgttgaggtggaagtccaggaagtggacgtgggtgctcgcgaaagagttttccaggaagtatcgagttttcagggtccactcgacgctacagtcgtggtgaacttgcagtctcctaccctggaagagaagaatgagtttccagaagatttgcggaccgaactaatgcaaacgctgggctcctacggcacgatagttttggtaaggattaaccaaggacaaatgcttgttacatttgcggactctcacagcgccctgtctgtgctggatgtggacggcatgaaggttaagggtcgggccgtcaagattcggccaaagactaaagactggctgaagggactccgtgaagagatcattaggaaaagagattcgatggccccagtcagtccaactgctaatagttgcctcttagaggaaaactttgacttcacctccctagactacgaatccgaaggagatattctggaggacgacgaagattacttagtggatgagttcaaccagcccggcgtgtctgattccgaacttggtggggatgatctgtccgatgttcctgggcctacagcacttgctccaccaagcaagagtccagctcttactaaaaagaagcagcatcccacatataaggcaggtctgatggtgaagaagtccgcttcagatgcttccataagttctggtacccacggacagtattcgatcttacagactgctcggctcctcccaggggccccacagcaaccccctaaggcccgcacaggcatctccaagccatacaacgtcaagcaaatcaagacaacaaacgcgcaggaggccgaagccgccatccgatgtcttcttgaggcccgggggggcgcttctgaagaggctctgtctgcagtggcaccccgggatctcgaagctagctctgaaccagagcccacacccggcgctgccaaacctgaaaccccacaggcaccacctctcttgcctcgtcggccaccacccagggtgcctgcgatcaagaaacccaccctaagaagaaccgggaagccactctcgcctgaggagcagttcgagcagcagacagtgcatttcacaattgggccacccgagacgtcagtggaggccccaccagtggtgactgcaccaagagtaccacccgttcccaagcctagaaccttccagccgggtaaggccgccgagcggccttctcatcgtaagcctgcctctgacgaagccccacctggggcaggcgcctcagttccaccaccccttgaggcgccccccctagtgcccaaagtgccaccaagacgaaaaaaatccgccccagctgccttccacttgcaggtgcttcaaagcaactctcaattgctccagggattaacctacaactcctccgatagtcctagcggacacccccccgccgcaggtacggtatttccacagggagatttcttgtcaacatccagcgccaccagccctgattctgacgggacaaaagccatgaagcccgaagcagcccctttactaggggactaccaggatccattttggaaccttctgcatcacccaaaacttttaaacaacacctggctgtccaagagctctgaccctttggactcaggaacgcgatccccaaagagagaccccattgaccccgtgagcgcgggtgcgagtgccgccaaggctgaactgccccccgaccacgagcacaagaccctgggtcactgggttacaatctcagaccaggaaaagcggacggctctgcaggtgttcgatccactcgctaaaacgtag

SEQ ID NO: 331022 - DNA, 4356 bp, Artificial Sequence
  derived and/or modified sequence
atggccctgagcaagggcctgcggctgctgggccgcctgggcgctgagggggactgcagcgtgctgctggaggcccggggcagagatgactgcctgctgtttgaggccggcaccgtggccaccctggcccctgaggagaaggaggtgatcaagggccagtatggcaagctgacagatgcctacggctgcctgggggagctgcggctgaagagcggcggcaccagcctgtccttcctggtgctggtgacaggctgcacctctgtgggccgcatcccagatgctgagatctacaagatcacagccacagacttctaccccctgcaggaggaggccaaggaggaggagcggctcatcgccctgaagaagatcctgagcagcggggtcttctacttctcctggcccaatgatggcagcagatttgacctgactgtgaggacccagaagcagggagatgacagcagcgagtggggcaacagcttcttctggaaccagctgctgcacgtgcccctgcggcagcaccaggtgtcctgctgtgactggctgctgaagatcatctgtggggtggtgaccatcagaacagtgtatgccagccacaagcaggccaaggcctgcctggtgtcccgggtgtcctgtgagaggacaggcacccgcttccacacccggggcgtgaatgatgatggccacgtgagcaactttgtggagacagagcagatgatctacatggatgatggagtgtcctcctttgtgcagatccggggctctgtgcccctcttctgggagcagcccggcctgcaggtgggcagccaccacctgcggctgcaccggggcctggaggccaatgccccagcctttgacagacacatggtgctgctgaaggagcagtatggccagcaggtggtggtgaacctgctgggcagccggggcggggaggaggtgctgaacagagccttcaagaagctgctgtgggccagctgccacgccggggacacccccatgatcaactttgacttccaccagtttgccaagggcggcaagctggagaagctggagaccctgctgcggccccagctgaagctgcactgggaggactttgatgtgttcaccaagggagaaaatgtgagcccccgcttccagaagggcaccctgaggatgaactgcctggactgcctggacaggaccaacacagtgcagagcttcatcgccctggaggtgctgcacctgcagctgaagaccctgggcctgagcagcaagcccatcgtggacagatttgtggagagcttcaaggccatgtggagcctgaatggccacagcctgagcaaggtgttcaccggcagccgggccctggagggcaaggccaaggtgggcaagctgaaggatggagcccgctccatgagcaggaccatccagagcaacttctttgatggagtgaagcaggaggccatcaagctgctgctggtgggagatgtgtatggagaggaggtggccgacaagggcggcatgctgctggacagcacagccctgctggtgaccccccgcatcctgaaggccatgacagagcggcagagcgagttcaccaacttcaagaggatccgcatcgccatgggcacctggaatgtgaatggaggcaagcagttccgcagcaatgtgctgaggacagctgagctgacagactggctgctggacagcccccagctgagcggggccacagacagccaggatgacagcagccctgctgacatctttgctgtgggctttgaggagatggtggagctgtctgctggcaacatcgtgaatgccagcaccaccaacaagaagatgtggggcgagcagctgcagaaggccatcagccgcagccaccgctacatcctgctgaccagcgcccagctggtgggcgtgtgcctgtacatctttgtgcggccctaccacgtgcccttcatcagagatgtggccatcgacacagtgaagacaggcatgggcggcaaggccggcaacaagggagctgtgggcatccgcttccagttccacagcaccagcttctgcttcatctgcagccacctgacagctggccagagccaggtgaaggagagaaatgaagactacaaggagatcacccagaagctgtgcttccccatgggcagaaatgtgttcagccatgactatgtgttctggtgtggggacttcaactacagaattgacctgacctatgaggaggtgttctactttgtgaagaggcaggactggaagaagctgctggagtttgaccagctgcagctgcagaagagcagcggcaagatcttcaaggacttccacgagggcgccatcaactttggccccacctacaagtatgatgtgggcagcgctgcctatgacaccagtgacaagtgcaggaccccagcctggacagacagagtgctgtggtggaggaagaagcacccctttgacaagacagctggggagctgaacctgctggacagcgacctggatgtggacaccaaggtgcgccacacctggagccctggggccctgcagtactacggccgggcagagctgcaggccagtgaccacaggcctgtgctggccatcgtggaggtggaggtgcaggaggtggatgtgggcgcccgggagagggtcttccaggaggtgtcctccttccagggccccctggatgccaccgtggtggtgaacctgcagagccccaccctggaggagaagaatgagttccctgaggacctgaggacagagctgatgcagaccctgggcagctatggcaccatcgtgctggtgcgcatcaaccagggccagatgctggtgacctttgctgacagccacagcgccctgtctgtgctggatgtggatggcatgaaggtgaagggccgggctgtgaagatccggcccaagaccaaggactggctgaagggcctgcgggaggagatcatcaggaagagggacagcatggcccctgtgagccccacagccaacagctgcctgctggaggagaactttgacttcaccagcctggactatgagagcgagggggacatcctggaggatgatgaggactacctggtggatgagttcaaccagcccggggtgtctgacagcgagctgggcggagatgacctgagtgatgtgcccggccccacagccctggccccacccagcaagagccctgccctgaccaagaagaagcagcaccccacctacaaggccggcctgatggtgaagaagagcgccagtgatgccagcatcagcagcggcacccacggccagtacagcatcctgcagacagcccggctgctgcccggggccccccagcagccccccaaggccaggacaggcatcagcaagccctacaacgtgaagcagatcaagaccaccaatgcccaggaggccgaggccgccatccgctgcctgctggaggcccggggcggggccagcgaggaggccctgtctgctgtggccccccgggacctggaggccagcagcgagcctgagcccacccctggggccgccaagccagagaccccccaggccccacccctgctgccccggcggcccccaccccgggtgcctgccatcaagaagcccaccctgcggaggacaggcaagcccctgagccctgaggagcagtttgagcagcagacagtgcacttcaccatcggccccccagagacctctgtggaggcccctcctgtggtgacagccccccgggtgccccctgtgcccaagcccaggaccttccagcccgggaaggctgctgagcggcccagccacaggaagccagccagtgatgaggcccctcctggggccggggcctctgtgcccccacccctggaggccccacccctggtgcccaaggtgccccccaggaggaagaagagcgccccagctgccttccacctgcaggtgctgcagagcaacagccagctgctgcagggcctgacctacaacagcagtgacagccccagcggccaccccccagctgctggcaccgtcttcccccagggcgacttcctgagcaccagcagcgccaccagcccagacagtgatggcaccaaggccatgaagccagaggccgcccccctgctgggggactaccaggaccccttctggaacctgctgcaccaccccaagctgctgaacaacacctggctgagcaagagcagtgaccccctggacagcggcaccaggagccccaagagggaccccatcgaccctgtgtctgctggggccagcgctgccaaggccgagctgcccccagaccacgagcacaagaccctgggccactgggtgaccatcagtgaccaggagaagaggacagccctgcaggtgtttgaccccctggccaagacctag

SEQ ID NO: 331023 - DNA, 4356 bp, Artificial Sequence
  derived and/or modified sequence
atggccctgagcaagggcctgcggctgctgggccggctgggcgccgaaggggattgcagcgtactcttggaagccagaggccgagacgattgcctgctctttgaggctggcacggtggctaccttagcacccgaggaaaaagaagtgattaaggggcaatacggaaagctgactgatgcctatggatgtttgggagagctgaggcttaagagcggagggactagtttatcttttcttgtcctggtgaccggctgcacttccgtgggcagaattccggatgctgaaatctataagatcacggccaccgatttctatccattacaggaagaggccaaagaggaagaacgcctgatcgccctcaagaagatcctgtccagtggcgtattctatttcagttggccgaacgacgggtccagattcgatctgactgttaggacccaaaagcagggcgacgatagctctgaatggggtaattcttttttctggaatcaactgttgcatgtccccttgcggcagcatcaggtgagttgttgtgactggttactaaagatcatttgcggggtggtgacgattagaactgtgtacgccagccacaagcaggctaaggcctgtctggtgagtcgtgtcagttgtgagagaaccggcactagattccatacccggggcgtcaacgacgacggtcatgtgagcaattttgtggagaccgagcagatgatctacatggatgacggtgtgtcttcttttgtgcagattagaggttcagtacctctgttctgggaacagcctggcttgcaggtgggctctcaccatctcaggctccacagaggactggaggcaaacgccccagcttttgatagacatatggtgctcctgaaagaacagtacggacagcaagttgtggttaacctgctaggctcaagaggcggagaggaggtgctaaatagagcgtttaagaaactgctgtgggctagctgccacgccggtgacactcccatgatcaactttgactttcaccagttcgccaagggagggaaactggagaaattagagacactgctgcggccgcagttgaaattacactgggaggactttgatgtgttcacaaagggggagaatgtctctccaagatttcaaaaggggaccctgcgcatgaattgcctagactgtctagaccggacaaataccgttcagagttttatcgcactggaagttctgcaccttcaattgaagacgctgggactaagcagtaaacctattgtggaccggtttgtggagagctttaaagccatgtggtctttaaatgggcactccctctccaaagtcttcacagggtcccgcgcgctggaaggcaaggccaaggtgggaaagctcaaggatggggctaggagcatgtcccgcaccatccagagcaattttttcgatggcgtgaagcaggaggcaatcaagctcctcttagtcggagatgtttatggcgaagaggttgcggataagggcggcatgctgctggattccacggccctgttggttactccgagaatacttaaggccatgaccgaacgccagagcgagtttactaattttaaacgcatccgcattgccatgggaacatggaacgtgaatggtggaaaacagttcaggtctaacgttttacgaacagcagaactgaccgactggttactggactccccccagctaagcggtgccactgactcacaagacgactcgagccccgccgatatattcgccgttggattcgaggagatggttgagttatctgctggcaacatcgttaacgccagcaccacaaacaagaaaatgtggggggagcagctccagaaggctattagcagatctcataggtacatcctcctgactagtgcgcaacttgtgggtgtctgtctctacatcttcgtccggccctaccatgtgccatttatccgggacgtggccatcgatacagttaagaccggcatgggtggcaaagcaggtaacaagggggcagtgggtatcaggttccagttccacagcaccagcttctgcttcatttgttcccatctaaccgctggccagtctcaagttaaggaacggaatgaggactacaaggaaatcacccagaaactttgttttccgatgggccgtaatgtattttctcacgactatgtgttttggtgcggtgacttcaactatcgcattgaccttacatatgaagaggttttctacttcgtgaagcggcaggactggaaaaagcttctagagtttgatcagctccagctccagaagtctagcggcaaaatatttaaagacttccatgagggggctattaactttgggccaacctacaaatatgacgttggatccgcagcctatgacaccagcgataaatgtcgcacaccagcatggaccgaccgagtcctttggtggcggaaaaaacatccttttgataaaactgcgggggaactgaaccttctcgacagcgacctcgatgttgacaccaaagtgcgccatacgtggagcccgggcgcgctgcagtactacggccgcgcagaactgcaggcctcagatcaccgcccagtcttggctatcgtcgaagttgaggtgcaagaagtcgatgtgggtgcgcgagaaagagtgtttcaagaagtatcctccttccaggggccactcgacgcaaccgtcgtcgtcaacttacagagtcccactctggaagagaagaatgagttccctgaggatttaagaaccgaactcatgcagacactgggatcttacgggacaatcgttctggtaagaataaaccaggggcaaatgcttgttacattcgctgattcccatagcgcattatctgttctggacgtggatgggatgaaagtgaaagggcgcgctgtgaagattaggccgaaaacgaaggattggctgaaggggttaagagaggaaatcatacgcaagcgtgactccatggctccagtgagccccactgcaaactcttgtctcctggaggaaaatttcgatttcacttcccttgattatgaatcagagggcgacatcctggaagatgatgaggactatcttgtcgacgagttcaaccagcctggggtgtctgactcagagctggggggtgacgatttatccgatgtaccaggccccacggctttggctccgcccagcaagtctccggcgttgacaaagaagaagcagcatcctacgtataaggccggcctcatggtcaaaaagtccgcgtctgatgcctctatctcctcgggaacacatgggcaatactctattctgcagaccgctcgccttctgccgggagctccccagcaaccgcctaaggcacgcacagggataagtaaaccgtataatgtcaagcaaattaaaaccacaaatgctcaggaagctgaggccgccatccgctgtcttctcgaggccaggggtggggctagcgaagaggccctcagcgctgtcgcccctcgggatctggaagcttcatctgaaccagagcccacacctggcgccgcaaaacctgagacaccacaggcaccacctctgttgcctaggcgacctccaccacgcgtgcctgccataaaaaagccaacactgagacgaacaggaaaaccactaagtcctgaggaacagtttgagcagcaaactgtgcacttcaccattgggcctcccgaaacaagtgttgaggcacctcccgtcgttacagcacctagggttccccccgtgcccaagccaaggacctttcagcctggtaaggcggctgaacggcctagccacaggaagccagctagcgacgaagcaccacccggagcaggggccagcgtcccgccaccgctggaggctcctcccctagtgcccaaagtccctcccagacggaaaaaaagtgctccggctgcgttccatctgcaggtgttacagtccaacagccagctcctccagggtctgacttacaatagctccgattctccatccggccatcctccagcggccggcactgtctttcctcagggggactttctgtccaccagttctgccacaagcccagattcagacgggacaaaagctatgaagcccgaagcggcccctctcttaggcgattaccaggaccccttttggaacctcctacaccaccccaagctgcttaacaacacctggctgtccaagagtagtgacccgctggactcgggcacccgatctcccaagcgcgaccccattgatccagttagcgccggagcctcagcagcaaaggctgaattgccacctgatcacgagcacaagacactaggtcactgggtcacaatttctgaccaggaaaaacgcaccgccttgcaggtcttcgatcccctcgcgaaaacctag

SEQ ID NO: 331024 - DNA, 4356 bp, Artificial Sequence
  derived and/or modified sequence
atggccctgagcaagggactcaggctgttggggaggctgggggctgagggcgattgcagcgtgttgctggaagcgaggggcagggatgactgcctgctgtttgaagccggtaccgtggcgactcttgcccctgaagagaaagaagtaataaaaggacagtacgggaaacttacagacgcgtatgggtgcctgggagaactgcgactcaagagtgggggaaccagtctctccttccttgtgctcgttactgggtgcacaagtgtcggacgcatccctgatgcggagatttataaaataaccgctaccgatttttatcctttgcaggaagaagccaaagaggaggaaagactgattgctctaaagaagattctctcttctggagtgttttatttctcctggcccaacgacggcagtcgcttcgacctgactgttagaacacagaagcaaggcgacgatagtagcgaatggggtaacagctttttctggaaccagctgctccacgtacctctaagacaacatcaagtgagctgctgtgattggctgctgaagattatctgtggcgttgtaacaattcgcactgtctacgcttcacataaacaggccaaagcctgtttggtgagccgcgtctcttgtgagcgaactggcacacggtttcacaccaggggcgtgaatgacgatggacacgtgtctaacttcgtggagaccgaacagatgatatatatggacgacggcgttagttcattcgttcagattagaggtagcgtgccgttgttctgggagcagcctggactgcaggtgggatcccatcatctgagattgcatagaggcctggaggccaacgctccagctttcgacagacacatggtgcttctaaaggagcagtatggacagcaagtggtagttaacctcctaggttctcgaggcggtgaagaagtgctcaatcgggcttttaagaagctgttgtgggcttcttgtcacgcgggtgacacccccatgattaactttgatttccatcaatttgctaaaggagggaagttggagaagcttgagactctcctccgaccgcagctgaagctccactgggaagatttcgacgtattcacgaaaggagagaatgtctctcctcgatttcaaaaagggactctcaggatgaactgtttggactgtctggacagaaccaacactgtccaaagcttcatcgcactggaagtgttacatttgcagctgaagaccctcggacttagctctaaaccaattgtcgatcgctttgtggagtcattcaaggcaatgtggtccctcaatgggcactccttgtcaaaagttttcaccgggtcaagagcactcgaagggaaagctaaagtcggcaagctcaaggacggggcaagatcaatgagtcggaccattcagagcaactttttcgatggcgtgaagcaggaagctatcaaattgctcctggtcggtgatgtctatggggaggaagtggccgataaaggtggaatgctgctggacagtactgctctgctcgtgacaccaagaattctcaaggcaatgaccgaaagacagtccgagtttaccaatttcaagagaattagaatcgccatgggaacctggaacgtgaacgggggaaagcagttccggtcaaacgttctgaggacagccgagttaacagactggttgctggactcgcctcagctctcaggcgctacagactcacaggatgacagttcccccgcagatattttcgcagttggttttgaggaaatggtcgagctgtctgcgggtaatatcgttaatgcttccacaaccaacaaaaagatgtggggcgaacagctgcagaaggcaatctcccgcagtcacagatatatcctcttaacgagtgcccagctggtgggtgtatgtctgtatatcttcgtccgcccttaccacgtcccgtttattcgggatgtcgccatagataccgtaaagactggcatggggggaaaggccggaaataaaggcgctgtcgggattaggttccagtttcactctactagcttttgcttcatttgtagccatctgactgccggacaatcacaggtgaaagaacgaaatgaggactacaaagaaatcacccagaaactgtgtttcccgatgggcagaaatgtattttcccatgactacgtattctggtgcggtgatttcaactacaggatcgatctgacctatgaggaagtcttttatttcgtgaagaggcaagactggaaaaagctcttagaatttgatcaactgcaactgcagaagtcatccggaaagatctttaaagacttccacgagggggcaatcaatttcggcccaacttataaatatgatgtgggctcagcagcttacgacacgtccgataagtgtagaactcctgcatggaccgacagggtactgtggtggagaaaaaaacacccatttgataagactgctggggagctaaatctgctagattctgacttggatgttgatacgaaggttcggcacacctggtcacccggtgcccttcaatattacggccgtgctgagttacaggcaagtgaccacaggcccgtcctggctatagtcgaagttgaagtccaggaggtggatgtaggggcacgggagcgtgtgttccaagaggtgtccagcttccagggccctttggacgccacggtggtagtgaatttacagagtcctacgctagaagaaaaaaatgagtttccagaagatcttcgtaccgagctgatgcagactctgggatcctacggtactatcgtcctcgtgaggattaatcagggacaaatgctcgttacctttgccgactcccattccgcgctgagtgtactggatgtggatgggatgaaggtcaaagggagggctgtcaagatacggccaaaaacaaaggactggctgaaagggctgagagaggaaattattaggaagcgggacagtatggcacctgttagccctaccgccaatagctgccttctggaggagaactttgattttacatctcttgattacgagagtgagggggacatcctcgaggatgatgaagactacctggtcgacgagttcaaccagccaggagtatccgattctgagctcggaggggacgatctctctgacgtgccgggacctactgcactggcaccgccatcaaagagtcccgcattaactaaaaaaaaacagcatcctacttacaaggcgggtctgatggtgaagaagagcgcttcagacgcttctatcagcagcggtacacatggacagtacagtatcctgcaaaccgctcggcttctccctggggctccacagcagccaccaaaagcgaggaccggtatcagcaagccctacaatgtaaagcaaatcaaaaccacgaacgctcaggaggccgaggccgctatacgatgcctcctggaagcgagggggggtgccagcgaggaggctctctcagcagtggcccctagggacctggaggcctcatctgaacctgaaccaacacccggtgctgcgaaaccagagacccctcaggctccacccctcttgccgagaagaccaccacccagagtgcctgccattaagaagccaacgctcaggcgtacaggtaagccactgtcgcctgaagagcaatttgagcaacagaccgtccacttcaccattggcccacctgagacatcagtcgaggcacccccagtggttacagctcctagggtgcccccagtgccaaagcccagaacattccagccaggaaaggcagcagagaggccaagtcaccgcaagcctgcgagcgacgaggctccaccaggagcgggtgcctctgtccccccaccactcgaagcacccccactggtgcccaaggtgccccctcggaggaagaaatcagcccctgccgctttccacctccaggtattacaatccaatagccaactcctccagggtctaacttacaattcctcagactctccttcaggtcacccgcctgctgctggcacggtcttcccacaaggtgattttctgagcacatcatctgctacctcacccgattcggatgggaccaaggcaatgaaacccgaagccgctcctctgttgggcgactaccaggacccattctggaatctgctgcaccaccctaaactgctgaacaatacctggctgtcaaagtccagcgatccactggacagcggtacccgcagccccaagcgagatcctattgatccagtctccgctggcgcatccgctgccaaggccgaactgcctcccgaccatgagcataagacactgggccattgggtcacaatctccgaccaggagaagaggactgctctccaggtgtttgatcctttagccaaaacttag

SEQ ID NO: 331025 - DNA, 7271 bp, Artificial Sequence
  derived and/or modified sequence
gcaaagtgaaactctggcaagttgcgggcgcgcggggagctgtcgcgggcagcgcgccctcgggaggacgtggccccggcccccgcccgcagtgggcccgaccctcatggccctgagcaaagggctgcggctgctggggcgcctgggggccgagggggactgtagcgtgctgctggaggcgcgcggccgcgacgactgcctgctgttcgaggccggcacggtggccacgctggctccagaagaaaaggaagtcattaaaggacagtatggcaagctcacggacgcgtacggctgcctgggggagctgaggctgaaatctggtggcacgtctctgagcttcctggtgttggtgacaggctgcacatctgtgggcagaattccagatgctgaaatctacaaaatcactgccactgacttttaccctcttcaggaagaggccaaggaggaggaacgcctcatagctttgaagaaaatcctcagctcgggggtgttctatttctcatggccaaacgatgggtctcgctttgacctgactgtccgcacgcagaagcagggggatgacagctctgaatgggggaactccttcttctggaaccagctgttgcacgtgcccttgaggcagcaccaggtgagctgctgtgactggctgctgaagatcatctgcggggtggtcaccatccgcaccgtgtatgcctcccacaagcaggccaaggcctgcctcgtctctcgcgttagctgtgagcgcacaggcactcgcttccacacccgtggcgtgaacgacgacggccatgtgtccaacttcgtggagacagagcagatgatttacatggacgatggagtgtcatcttttgtccagatcagaggctccgttccgctgttctgggaacagccagggcttcaggttggctcccatcatctgagactccacagaggcctggaagccaatgcccctgctttcgacaggcacatggtgcttctgaaggagcagtacgggcagcaggtggtcgtgaaccttctgggaagcagaggcggagaggaggtgctcaacagagccttcaagaagctgctctgggcttcttgccacgcgggcgacacgcctatgatcaattttgacttccatcagtttgccaaaggtgggaagctagagaaattggagaccctcttgaggccacagttaaagctgcactgggaagacttcgatgtgttcacaaagggggagaacgtcagtccacgttttcagaaaggcactttgcggatgaactgtcttgactgcctggaccgaaccaacactgtgcagagcttcatcgcgctcgaggtcctgcatctgcagctcaagaccctggggctgagttcaaaacccatcgttgaccgctttgtggagtccttcaaagccatgtggtctctgaatggccacagcctgagcaaggtgttcacaggcagcagagccctggaagggaaggccaaggtggggaagctgaaggatggagcccggtccatgtctcgaaccatccagtccaacttcttcgacggggtgaagcaggaggccatcaagctgctgctggttggggacgtctacggcgaggaggtggcagacaaagggggcatgctgctggacagcacggcgctcctggtgactcccaggatcctgaaagctatgactgagcgtcagtccgaattcacaaatttcaagcggatccggattgctatggggacctggaacgtgaacggaggaaagcagttccggagcaacgtgctcaggacggcggagctgacagactggctgctcgactcgccccagctctcgggagctaccgactcccaggatgacagcagcccagctgacatatttgctgtggggtttgaagagatggtggaattgagcgcagggaatattgtcaatgccagtactaccaacaagaagatgtggggtgaacagcttcagaaagccatctcacgctctcatagatacattctgttgacttcggcacagctggtgggcgtctgtctttatatctttgtacgtccataccatgtcccgttcatcagggacgtagccatcgacacagtgaagacgggcatggggggcaaggcggggaacaagggcgccgtcggcatccgcttccagttccacagcaccagcttctgcttcatatgtagtcacctgacggccgggcagtcccaggtgaaggagcggaatgaagactacaaggagatcacccagaaactctgcttcccaatggggagaaatgttttttctcatgattatgtattttggtgtggcgatttcaactaccgcattgatcttacttatgaagaagtcttctattttgttaaacgccaagactggaagaaacttctggaatttgatcaactacagctacagaaatcaagtggaaaaatttttaaggactttcacgaaggagccattaactttggacccacctacaagtatgacgttggctcagccgcctacgatacaagcgacaaatgccgcacccccgcctggacagacagggtgctgtggtggaggaagaaacatccctttgataaaacagctggagaactcaaccttctagacagtgatctagatgttgacaccaaagtcagacacacctggtctcctggtgccctgcagtattatggtcgtgcggagctacaagcgtctgatcacagacctgtgctggcgatcgtggaggtggaagttcaggaagtcgatgtgggtgctcgggagagggttttccaggaagtgtcctccttccagggccccctggatgccactgttgtagtaaaccttcaatcaccgaccttagaagagaaaaacgagtttccagaggacctgcgtactgagctcatgcagaccttggggagttatgggacaattgttcttgtcaggatcaaccaagggcagatgctggtaacttttgcagacagtcactcggctctcagtgtcctggacgtggacggtatgaaggtgaaaggcagagcagtgaagattagaccgaagaccaaggactggctgaaaggtttgcgagaggagatcattcggaaacgagacagcatggcccccgtgtctcccactgccaactcctgtttgctggaggaaaactttgacttcacaagtttggactatgagtcagaaggggatattcttgaagacgatgaagactacttggtggatgaattcaatcagcctggagtctcggacagtgaactcgggggagacgacctctctgatgtccccggccccacagcactggctcctcccagcaagtcacctgctctcaccaaaaagaagcagcatccaacgtacaaagccggtttaatggtgaaaaagtcggcttcagatgcgtccatctcctccggcacccatggacagtattcaattttgcagacggcaagacttctaccaggagcacctcagcaacctcccaaggctcggactggaataagtaaaccttataatgtcaagcagatcaaaaccaccaatgcccaggaggcagaagcagcaatccggtgtctcctggaagccagaggaggtgcctccgaagaagccctaagtgccgtggccccaagggaccttgaagcatcctctgaaccagagcccacaccgggggcagccaaaccagagaccccacaggcgcccccactccttccccgtcggcccccacccagagttcctgccatcaagaagccaaccttgagaaggacaggaaagcccctgtcaccggaagaacagtttgagcaacagactgtccattttacaatcgggcccccggagacaagcgttgaggcccctcctgtcgtgacagcccctcgagtccctcctgttcccaaaccaagaacatttcagcctgggaaagctgcagagaggccaagccacaggaagccagcatcagacgaagcccctcctggggcaggagcctctgtgccaccacctctggaggcgccgcctcttgtgcccaaggtacccccgaggaggaagaagtcagcccccgcagccttccacctgcaggtcctgcagagcaacagccagcttctccagggcctcacttacaatagcagtgacagcccctctgggcacccacctgccgcgggcaccgtcttcccacaaggggactttctcagcacttcatctgctacaagccccgacagcgatggcaccaaagcgatgaagccagaggcagccccacttcttggtgattatcaggaccccttctggaaccttcttcaccaccctaaactgttgaataacacttggctttctaagagctcagaccctttggactcaggaaccaggagccccaaaagagatcccatagacccagtgtcagctggcgcttcagctgccaaggcagagctgccaccagatcatgaacacaaaaccttaggtcactgggtgacaatcagtgaccaagaaaagaggacagcactgcaggtgtttgacccactggcaaaaacatgactgagcagctttgaaggctgcagtcctatagaatgcataccttcctccctctagacatccctccaccagaagagacatctatttaaaggcacactggccaaaacgtttgtgcatctgtcactctcgtgtagtttacaaaaatcgtgtctcttattcagtaagatggttactcagccaccaaaatatatttcactcaaggcttgtacatctgaagtttgctcttcaaggaatgggaaccttcctgttaaattcggtgtatggattttaagaaaggaatctagccaatgaggtccaagaagttctcacccattgaatttttaaatggctgttcagttcatgttgtacgtgatggagatttgtcttttgttttatttgcattttacagatttggtataacattttggggagccacctgaaggttgatgtataaagtaaggattagagaaagaggtcgttgtgaccattagtagctgtcctggcccacttaaacaaggttacaaaaaatcagagtcggaagcagccaaataggtcaacctaatgactagactgtacattcccatgagccttcatgtttaagtgtgtacatgtgcgttaaccttgatgatgcgtgaatcccgagggagccggtggcatacaccgttagcttaaccttagcttaaactagctgaaggctcctgtgccatgtcttagacattgcatgccctatcaattactataatcctgagccatggtgtgctactgaaaccaatttttatccaccatctagtccttattaaatgaaacctcacggatcctttgttccgcttatattccatgcataccacataaaagcacacagtgcgaaaactcttgctgatacgcgatattgattctcattgttagaatatggagagtgtttcagcctcgtctgtccggctggagcttcgggatggaaagtgctatgtgtccctgcatataagaatcaccaggccagtgtttctgggtttgcttgtctatatgtttgtctatattttttgcctatacatttttcccacgtttccaacagcacttctcacctattcaataactgaaaaagacattaccatagtgctttacatttttaaagtaatgttacaaggtctggaatccatttggagcagataccgtgttttcgctatttaataagaagttcagtagtgaaatcttactgtaccgcctgttgtatctgggagcctcgtacagaggctcgcacagcagtgatcaagtgtcatcccttacgtgactgggggatgtctgtcctaaaagctgactgctaggatagtaaggatcatcttgcctgggctatgccactgtcttgttaccaattagacatctggaatttcataattagttttcattgtcactgtcaagatatattgcagattacttaaatatggccatcaaaacaaaagttacaacacgtatctcttttcatctgaaaactaatacctggaaaaggataaaaaaaaaaaggaatccgtgacccacagagctagacagataagatgcatagttgaccagtcataaaaggcggtgtttaggtgatcaggatgccgttggtggcatttacgtgctttatatgatttttacctctgtaacaaacacaagaaataaacagaatggtccttaacagagtttgggggagagagcaagatgggttccttggagaagctgatttgccaagatgcacatcgctattaacagccagagtcataaatgaaatgaaattgaagaattcattcaaatgctcttttccctataacctcttttctcaccaaaaaggagataaatttgaaaacagataaatgtaacaaccagtcaaagaagcaggggaaaagtaagctcctccaaagttgcttgcagtgctggaaatagatctcatttttaggttttctcttcgttccagataccaaataaatgggacagagaataaaatttttgttaaaatatgtgctcatctcctaagtagctcttcagagtctgaccgtaagtaaaaacacacagaattgtgttgactgggggaggtgaatcacaaaaaagttacgaggagtttaagagttaaatattatttgatcgtggctgtcaaatttagtgaacaacatagattggatttggagttggtagtaggtatggttctcataccagaattctcttaaaaaaaaaaaaaaggacaattggaattgccttatttatttttaaaatcaatgcttactagttggtaggattcccaggtcagcagcagggttgattaaataatcttgacaatgagcagctgccatcttgggggatttcattctgtggttttttaaatgtttcgtctttgatgctaccatccagggcttcttattgtgaccttgtagcctattttgttcctgctgttctctaacatggtgcagttcacgcagactggtttaggtacttcacaactcaccattgtctctctgaccccaagcctagtcccttttacatcaccatcttctcagacttcttgcctattcttaaaatatgttttggttaatgattgaattaggacatcagcttaagcaattcctgtaacggtttaacgttgttgaagttcaaggcacataataaaattctccctgatgtgtgtgtaagtataaacaaagtaatgtatcaaagcgttcactttataatgaagtcatttcattgggaaggaaagctgcaaagattattgggggactagtgattaataaaatcctgtaatatttttgaagtgaaaatttgtactgaaattgtacatgatacctattaaatgtttttgtcttttttt

SEQ ID NO: 331026 - protein, 92 aa, Artificial Sequence
  derived and/or modified sequence
MFLYASGPAPPAGTCRWGGQGGTSLSFLVLVTGCTSVGRIPDAEIYKITATDFYPLQEEAKEEERLIALKKILSSGVFYFSWPNDGSRFDLT

SEQ ID NO: 331027 - DNA, 411 bp, Artificial Sequence
  derived and/or modified sequence
tgaggcagagacgactgcctgctgttcgaggccggcaccgtggccaccctggcccccgaggagaaggaggtgatcaagggccagtacggcaagctgaccgacgcctacggctgcctgggcgagctgagactgaagagcggcggcaccagcctgagcttcctggtgctggtgaccggctgcaccagcgtgggcagaatccccgacgccgagatctacaagatcaccgccaccgacttctaccccctgcaggaggaggccaaggaggaggagagactgatcgccctgaagaagatcctgagcagcggcgtgttctacttcagctggcccaacgacggcagcagattcgacctgaccgtgagaacccagaagcagggcgacgacagcagcgagtggggcaacagcttcttctag

SEQ ID NO: 331028 - DNA, 279 bp, Artificial Sequence
  derived and/or modified sequence
atgttcctgtacgccagcggccccgccccccccgccggcacctgcagatggggcggccagggcggcaccagcctgagcttcctggtgctggtgaccggctgcaccagcgtgggcagaatccccgacgccgagatctacaagatcaccgccaccgacttctaccccctgcaggaggaggccaaggaggaggagagactgatcgccctgaagaagatcctgagcagcggcgtgttctacttcagctggcccaacgacggcagcagattcgacctgacctag

SEQ ID NO: 331029 - DNA, 411 bp, Artificial Sequence
  derived and/or modified sequence
taaggacgggatgactgcctgcttttcgaagccggaactgtagctactttagccccggaagaaaaagaggtgatcaagggacagtatgggaaactgaccgatgcttatggctgtttgggagagctcaggctcaaatccggtggaacttctctgtctttccttgttttggtgaccggatgtacctcagtcgggcgaatccccgacgccgagatttataagattactgcaaccgacttctaccccctccaagaagaagccaaggaggaggaaaggctcattgccttgaaaaagatcctgagctctggggtgttctacttttcctggccaaacgacggctctcggttcgaccttaccgtacgcacacagaaacagggggatgatagtagtgagtggggaaactcatttttctag

SEQ ID NO: 331030 - DNA, 279 bp, Artificial Sequence
  derived and/or modified sequence
atgttcctctatgcatccggccccgcaccacctgccggcacctgcagatggggcggtcaggggggtacgtccctctccttcctggtcctggtgacaggctgtacttctgtggggcgcataccggatgccgagatctacaaaatcaccgcgaccgacttttatccgctgcaagaagaagccaaagaagaggagaggctcatagcacttaaaaagatcctatcttcaggggtgttctacttctcctggccaaacgacgggtcccgatttgaccttacgtag

SEQ ID NO: 331031 - DNA, 411 bp, Artificial Sequence
  derived and/or modified sequence
tgaggaagagatgactgcctgctgtttgaagctggcaccgtggccaccctggcccctgaggagaaggaggtgatcaagggccagtatggcaagctgacagatgcctacggctgcctgggggagctgcggctgaagagcggcggcaccagcctgtccttcctggtgctggtgacaggctgcacctctgtgggccgcatcccagatgctgagatctacaagatcacagccacagacttctaccccctgcaggaggaggccaaggaggaggagcggctgattgccctgaagaagatcctgagcagtggagtcttctacttctcctggcccaatgatggcagcagatttgacctgactgtgaggacccagaagcagggagatgacagcagcgagtggggcaacagcttcttctag

SEQ ID NO: 331032 - DNA, 279 bp, Artificial Sequence
  derived and/or modified sequence
atgttcctgtatgccagcggccctgcccccccagctggcacctgccgctggggcggccagggcggcaccagcctgtccttcctggtgctggtgacaggctgcacctctgtgggccgcatcccagatgctgagatctacaagatcacagccacagacttctaccccctgcaggaggaggccaaggaggaggagcggctgattgccctgaagaagatcctgagcagtggagtcttctacttctcctggcccaatgatggcagcagatttgacctgacctag

SEQ ID NO: 331033 - DNA, 411 bp, Artificial Sequence
  derived and/or modified sequence
tgaggccgggacgactgcctgctgttcgaggccggcaccgtggccaccctagcacccgaggagaaagaggtgatcaaaggccagtacggcaaattgacagacgcatacggctgtttaggtgaactcaggctgaagagcgggggcactagcctctctttcttggtgctcgttacaggttgcacctctgtcggaaggataccggatgctgagatttacaagataaccgcgaccgacttttaccccctgcaggaagaggccaaggaggaggaaaggctcatagcactgaagaagattctgagtagtggagtgttttatttttcttggcctaacgacggttctaggtttgacctgaccgttaggactcaaaaacaaggtgacgatagctctgagtggggcaactcattcttctag

SEQ ID NO: 331034 - DNA, 279 bp, Artificial Sequence
  derived and/or modified sequence
atgttcctgtacgccagcggccccgccccccccgccggcacctgcagatgggggggccaggggggtactagtttgtcgttcttagttttagtgacagggtgcacctcggtgggaagaatccctgacgcggaaatctacaagatcactgcgacagatttctaccctcttcaggaggaagctaaagaagaggagaggctgatcgccctgaagaaaatcctcagcagcggggtgttctacttctcttggcccaacgacggaagtaggttcgatctaacatag

SEQ ID NO: 331035 - DNA, 411 bp, Artificial Sequence
  derived and/or modified sequence
tgaggcagggacgattgtctccttttcgaggccggtacagtggccacgctggccccagaagagaaagaagtcatcaagggccagtacggtaagttaaccgacgcatacgggtgcttgggcgagctgcggctcaaaagtgggggaactagcctgagctttctcgttcttgtaacgggctgcacctccgtcggtagaatccctgatgccgaaatctataaaataaccgccacagatttttacccattgcaggaggaggccaaggaggaggagaggctgattgccctgaagaagatcctttcatcaggagttttctactttagctggcctaatgacggcagtagattcgacttgaccgtgcgcacccagaagcagggtgacgattcatctgaatgggggaattctttcttttag

SEQ ID NO: 331036 - DNA, 279 bp, Artificial Sequence
  derived and/or modified sequence
atgtttctatatgcgagcggcccagctcctcccgcaggaacctgcagatggggcggtcagggtggaacttcactctctttcctggtcctcgtgacgggctgtacttccgtgggacgcatccccgacgcagaaatttacaagatcacggctacggacttctacccactgcaggaagaggctaaagaggaagaacgactgatcgcgctgaaaaaaatcctgtcgtccggcgtgttttacttctcttggccaaacgacggctccagatttgatttaacctag

SEQ ID NO: 331037 - DNA, 499 bp, Artificial Sequence
  derived and/or modified sequence
gcggccgcgacgactgcctgctgttcgaggccggcacggtggccacgctggctccagaagaaaaggaagtcattaaaggacagtatggcaagctcacggacgcgtacggctgcctgggggagctgaggctgaaatctggtggcacgtctctgagcttcctggtgttggtgacaggctgcacatctgtgggcagaattccagatgctgaaatctacaaaatcactgccactgacttttaccctcttcaggaagaggccaaggaggaggaacgcctcatagctttgaagaaaatcctcagctcgggggtgttctatttctcatggccaaacgatgggtctcgctttgacctgactgtccgcacgcagaagcagggggatgacagctctgaatgggggaactccttcttctgaggcagccacaggttttcatctggccttggtgctttggattccccagaagtgaattcctgatttctgccggaagaaggggaccctcccca

SEQ ID NO: 331038 - DNA, 547 bp, Artificial Sequence
  derived and/or modified sequence
agtgcaatggcgcgatctcggctcaccacaacctctgcctcctgggttcaagcaattctcctgcctcagcctcctgaatagctgggactacaggcatgcgccaccatgcccaactaattttttgtatttttagtagagacggggtttttccatgttggtcaggctggtctgaaactccgacctcaggtggtccacctgcctcagcctcccaaagtgctgggattacagccatgagccgccgtgcctggccgacctctcttctcttttaagatgtttctttatgcctcgggacctgctcctcctgcaggaacctgcaggtggggaggtcaaggtggcacgtctctgagcttcctggtgttggtgacaggctgcacatctgtgggcagaattccagatgctgaaatctacaaaatcactgccactgacttttaccctcttcaggaagaggccaaggaggaggaacgcctcatagctttgaagaaaatcctcagctcgggggtgttctatttctcatggccaaacgatgggtctcgctttgacctgactg

SEQ ID NO: 331039 - DNA, 1551 bp, Artificial Sequence
  derived and/or modified sequence
atgttcctgtacgccagcggccccgccccccccgccggcacctgcagatggggcggccagggcggcaccagcctgagcttcctggtgctggtgaccggctgcaccagcgtgggcagaatccccgacgccgagatctacaagatcaccgccaccgacttctaccccctgcaggaggaggccaaggaggaggagagactgatcgccctgaagaagatcctgagcagcggcgtgttctacttcagctggcccaacgacggcagcagattcgacctgaccgtgagaacccagaagcagggcgacgacagcagcgagtggggcaacagcttcttctggaaccagctgctgcacgtgcccctgagacagcaccaggtgagctgctgcgactggctgctgaagatcatctgcggcgtggtgaccatcagaaccgtgtacgccagccacaagcaggccaaggcctgcctggtgagcagagtgagctgcgagagaaccggcaccagattccacaccagaggcgtgaacgacgacggccacgtgagcaacttcgtggagaccgagcagatgatctacatggacgacggcgtgagcagcttcgtgcagatcagaggcagcgtgcccctgttctgggagcagcccggcctgcaggtgggcagccaccacctgagactgcacagaggcctggaggccaacgcccccgccttcgacagacacatggtgctgctgaaggagcagtacggccagcaggtggtggtgaacctgctgggcagcagaggcggcgaggaggtgctgaacagagccttcaagttcgccaagggcggcaagctggagaagctggagaccctgctgagaccccagctgaagctgcactgggaggacttcgacgtgttcaccaagggcgagaacgtgagccccagattccagaagggcaccctgagaatgaactgcctggactgcctggacagaaccaacaccgtgcagagcttcatcgccctggaggtgctgcacctgcagctgaagaccctgggcctgagcagcaagcccatcgtggacagattcgtggagagcttcaaggccatgtggagcctgaacggccacagcctgagcaaggtgttcaccggcagcagagccctggagggcaaggccaaggtgggcaagctgaaggacggcgccagaagcatgagcagaaccatccagagcaacttcttcgacggcgtgaagcaggaggccatcaagctgctgctggtgggcgacgtgtacggcgaggaggtggccgacaagggcggcatgctgctggacagcaccgccctgctggtgacccccagaatcctgaaggccatgaccgagagacagagcgagttcaccaacttcaagagaatcagaatcgccatgggcacctggaacgtgaacggcggcaagcagttcagaagcaacgtgctgagaaccgccgagctgaccgactggctgctggacagcccccagctgagcggcgccaccgacagccagggcgagggcagcgacttcggcggcgacaagatccagctgcacctgacctag

SEQ ID NO: 331040 - DNA, 1551 bp, Artificial Sequence
  derived and/or modified sequence
atgtttctatatgcctccggacctgcgccgccggcaggcacttgcaggtggggaggacaggggggtacctcactttcctttctggtgctggtcactggatgtacctctgttggacggatacctgatgctgaaatctacaagattaccgcaaccgatttctaccccctccaggaagaagcaaaagaagaagagcggctgattgccttgaaaaaaattctgtcctccggcgtcttctacttttcttggcctaacgatggatcacgatttgatcttacagtgcgcacgcaaaaacaaggagatgactcttcagaatggggcaattccttcttctggaatcagctgctgcacgtgcctttgcgccagcatcaggtgagttgttgcgattggttgctgaagatcatctgcggcgtggttactatccgcactgtctacgctagccataaacaagctaaagcttgcctggtgagccgtgtcagttgcgaacgcaccggaacgaggtttcacacgcggggtgtaaacgatgatgggcacgtttcgaattttgtggaaacagaacaaatgatatacatggacgatggtgtatcctcattcgtgcagattaggggcagcgtgccgctgttttgggagcagccgggacttcaggtgggctctcatcatctgaggctgcacagagggctagaggccaacgcccccgcatttgatagacacatggtcctgctcaaggagcagtacggccagcaagtggtggtcaacctactcggtagcaggggaggagaagaggtgctgaaccgggctttcaagttcgcaaaaggcgggaagttagagaaacttgagacattattgaggcctcagctgaaactccattgggaggactttgacgtctttactaagggggagaatgtctccccgagatttcagaaaggaacgcttcgcatgaactgtctagattgtctagacaggaccaacacagtgcaaagtttcatcgcgttagaggtcctgcatctgcagctgaaaactctgggcctatcttctaaaccaatcgtggaccgatttgtggagagctttaaagccatgtggtcactcaatggacactcgctgtccaaggtgtttaccgggtctagagccctggagggcaaagcgaaagtgggcaagttgaaagacggcgcccggtctatgagccggaccatccaatctaattttttcgatggcgtcaaacaggaggcaattaagttgctacttgtaggcgatgtatacggggaggaggtggctgacaaagggggcatgttattagactccacggctctcctggtaaccccacgtatcctgaaggccatgacagaacgccagtccgagtttaccaattttaaaaggataagaatcgccatgggcacttggaatgttaatggcggcaagcagtttcgctcaaatgtactgcgcacagctgaactcactgactggctgctggatagccctcagctctccggcgccacagactcacagggcgaaggaagtgatttcgggggtgataaaattcaactgcatcttacatag

SEQ ID NO: 331041 - DNA, 1551 bp, Artificial Sequence
  derived and/or modified sequence
atgttcctgtatgccagcggccctgcccccccagctggcacctgccgctggggcggccagggcggcaccagcctgtccttcctggtgctggtgacaggctgcacctctgtgggccgcatcccagatgctgagatctacaagatcacagccacagacttctaccccctgcaggaggaggccaaggaggaggagcggctgattgccctgaagaagatcctgagcagtggagtcttctacttctcctggcccaatgatggcagcagatttgacctgactgtgaggacccagaagcagggagatgacagcagcgagtggggcaacagcttcttctggaaccagctgctgcacgtgcccctgcggcagcaccaggtgtcctgctgtgactggctgctgaagatcatctgtggggtggtgaccatcagaacagtgtatgccagccacaagcaggccaaggcctgcctggtgtcccgggtgtcctgtgagaggacaggcacccgcttccacacccggggcgtgaatgatgatggccacgtgagcaactttgtggagacagagcagatgatctacatggatgatggagtgagcagctttgtgcagatccggggctctgtgcccctcttctgggagcagcccggcctgcaggtgggcagccaccacctgcggctgcaccggggcctggaggccaatgccccagcctttgacagacacatggtgctgctgaaggagcagtatggccagcaggtggtggtgaacctgctgggcagcagaggaggagaggaggtgctgaacagagccttcaagtttgccaagggcggcaagctggagaagctggagaccctgctgcggccccagctgaagctgcactgggaggactttgatgtgttcaccaagggagaaaatgtgagcccccgcttccagaagggcaccctgaggatgaactgcctggactgcctggacaggaccaacacagtgcagagcttcatcgccctggaggtgctgcacctgcagctgaagaccctgggcctgagcagcaagcccatcgtggacagatttgtggagagcttcaaggccatgtggagcctgaatggccacagcctgagcaaggtgttcaccggcagccgggccctggagggcaaggccaaggtgggcaagctgaaggatggagcccgctccatgagcaggaccatccagagcaacttctttgatggagtgaagcaggaggccatcaagctgctgctggtgggagatgtgtatggagaggaggtggccgacaagggcggcatgctgctggacagcacagccctgctggtgaccccccgcatcctgaaggccatgacagagcggcagagcgagttcaccaacttcaagaggatccgcatcgccatgggcacctggaatgtgaatggaggcaagcagttccgcagcaatgtgctgaggacagctgagctgacagactggctgctggacagcccccagctgagcggggccacagacagccagggcgagggcagtgactttggaggagacaagatccagctgcacctgacctag

SEQ ID NO: 331042 - DNA, 1551 bp, Artificial Sequence
  derived and/or modified sequence
atgttcctgtacgccagcggccccgccccccccgccggcacctgcaggtggggtggtcaggggggcacctctctgtcctttctcgtgctggtgacgggttgtacctccgtgggcaggatccccgacgcggagatctataaaattacagccacagatttctaccccctccaggaggaggcaaaagaggaggaaaggcttatcgcccttaagaagatcctctcttctggagtcttctactttagttggcctaacgatgggagccgatttgacctgaccgtcaggacacagaagcaaggggacgactctagtgagtggggcaatagcttcttctggaaccaactgctgcatgtgcccctgaggcagcatcaggtctcctgctgcgattggctcctcaaaataatctgtggtgtggtgacgattagaacagtgtatgcgtctcataaacaagccaaggcatgcctagtgagcagagtgtcctgtgagcgcacaggtactaggttccatactcgtggcgtcaacgacgatgggcacgtgagcaactttgtggagacagaacagatgatctatatggatgacggagtttcatcatttgtacagattcggggaagcgttccactcttttgggagcagccgggcctgcaggtgggctctcaccacttgaggctccatagggggttagaggccaacgcccctgccttcgatcgccatatggttctgctgaaggagcaatatgggcagcaggtcgttgtgaatctgctaggctcaagaggaggagaagaagtgctcaacagagcattcaaatttgctaaaggaggaaaactggagaagctcgagacactcctgaggccacagctgaagctgcattgggaagactttgatgtcttcacaaaaggcgagaatgtgtcgccgcgctttcagaagggcaccttaaggatgaattgccttgattgcttggaccggaccaacaccgtacagtctttcatcgccctcgaagtcctacacctccagctcaagacgctgggcctctcatctaaacccatcgtggacaggttcgtggagtcttttaaggctatgtggtccctgaatggccacagcctatccaaggttttcactggctctagagccctagaggggaaggccaaggtcgggaagctgaaagatggcgcccgctcgatgtcacgaacgattcagtccaacttctttgacggcgtgaagcaagaggccatcaaactgctcctcgttggcgacgtgtatggtgaagaggtggctgataaaggcggtatgttgttggactcgactgcccttctcgttacccccaggattctgaaagcaatgacagagcgccaatcagaattcaccaacttcaaacgaatacggatcgcgatggggacgtggaatgttaatggggggaaacagttcagatcaaatgtgctccgcacagctgaactgacagactggctgcttgattcacctcaattaagcggagctacagactcccagggcgagggctccgactttgggggagacaaaattcaacttcatctgacatag

SEQ ID NO: 331043 - DNA, 1551 bp, Artificial Sequence
  derived and/or modified sequence
atgtttctgtatgcgagcgggccagcccctcctgccggtacctgcagatggggaggacaaggagggacctcactgtcttttctcgtgctggtaaccggctgcacctccgtaggacgcatccctgacgcagagatctacaaaataactgccaccgatttctatcccctgcaggaagaggctaaggaggaggaacgtcttatcgcactcaagaagatactatcatccggagtcttctacttcagctggcccaacgacggcagtcgctttgacctcaccgtcaggacccagaaacagggcgatgactcaagcgagtgggggaactccttcttttggaaccagttactacacgtgcccttacggcagcatcaagtttcctgctgtgactggctgcttaaaataatttgtggagtggtgaccattcggaccgtctacgcctcccacaagcaggctaaagcctgcttagtatctagagtttcttgtgagagaaccggcaccagatttcacaccaggggcgttaacgacgatggacatgtgtccaacttcgtggagaccgagcagatgatctatatggacgatggtgtatcttcatttgtgcagattagaggcagtgtgcctctcttctgggagcaaccaggtcttcaggtagggagccaccaccttagattgcaccggggtctagaggcaaacgcgccagcctttgatagacacatggtgctgttgaaggagcagtacgggcaacaagtcgtcgttaacttactcggcagccggggtggagaagaagttctcaatagggccttcaagttcgctaagggtggaaagttggaaaagcttgaaactttactgagaccccagttaaagctgcactgggaagacttcgatgtcttcaccaaaggggaaaatgtatcaccacgcttccagaagggaactctgcgcatgaattgcctggactgcctggaccgtacaaatacagtccagtcatttattgcccttgaagtgctccacctgcagctcaagacgctgggacttagtagcaagcctatcgtcgatcggtttgtggagtcttttaaggccatgtggtccttgaatgggcactctctgtctaaggtgtttactgggtctagagccctggagggaaaggcaaaagtcggaaagctgaaagacggcgctaggtccatgtcacgtaccatccagagcaacttcttcgacggcgtgaagcaagaggcaatcaaactgttgctcgttggtgacgtctatggcgaggaggtcgctgataagggcggaatgctgctcgactcgaccgcccttctcgtgactccccgaattcttaaggcaatgaccgaaaggcagagcgaatttaccaacttcaaaaggatacgcatcgccatgggtacctggaatgtaaacgggggaaagcagttccgctcaaatgtccttagaacagcggagctaaccgactggttactcgactctccccagctgagtggagctacggatagccaaggagaggggagcgactttgggggagacaaaatccagctgcaccttacgtag

SEQ ID NO: 331044 - DNA, 2060 bp, Artificial Sequence
  derived and/or modified sequence
agtgcaatggcgcgatctcggctcaccacaacctctgcctcctgggttcaagcaattctcctgcctcagcctcctgaatagctgggactacaggcatgcgccaccatgcccaactaattttttgtatttttagtagagacggggtttttccatgttggtcaggctggtctgaaactccgacctcaggtggtccacctgcctcagcctcccaaagtgctgggattacagccatgagccgccgtgcctggccgacctctcttctcttttaagatgtttctttatgcctcgggacctgctcctcctgcaggaacctgcaggtggggaggtcaaggtggcacgtctctgagcttcctggtgttggtgacaggctgcacatctgtgggcagaattccagatgctgaaatctacaaaatcactgccactgacttttaccctcttcaggaagaggccaaggaggaggaacgcctcatagctttgaagaaaatcctcagctcgggggtgttctatttctcatggccaaacgatgggtctcgctttgacctgactgtccgcacgcagaagcagggggatgacagctctgaatgggggaactccttcttctggaaccagctgttgcacgtgcccttgaggcagcaccaggtgagctgctgtgactggctgctgaagatcatctgcggggtggtcaccatccgcaccgtgtatgcctcccacaagcaggccaaggcctgcctcgtctctcgcgttagctgtgagcgcacaggcactcgcttccacacccgtggcgtgaacgacgacggccatgtgtccaacttcgtggagacagagcagatgatttacatggacgatggagtgtcatcttttgtccagatcagaggctccgttccgctgttctgggaacagccagggcttcaggttggctcccatcatctgagactccacagaggcctggaagccaatgcccctgctttcgacaggcacatggtgcttctgaaggagcagtacgggcagcaggtggtcgtgaaccttctgggaagcagaggcggagaggaggtgctcaacagagccttcaagtttgccaaaggtgggaagctagagaaattggagaccctcttgaggccacagttaaagctgcactgggaagacttcgatgtgttcacaaagggggagaacgtcagtccacgttttcagaaaggcactttgcggatgaactgtcttgactgcctggaccgaaccaacactgtgcagagcttcatcgcgctcgaggtcctgcatctgcagctcaagaccctggggctgagttcaaaacccatcgttgaccgctttgtggagtccttcaaagccatgtggtctctgaatggccacagcctgagcaaggtgttcacaggcagcagagccctggaagggaaggccaaggtggggaagctgaaggatggagcccggtccatgtctcgaaccatccagtccaacttcttcgacggggtgaagcaggaggccatcaagctgctgctggttggggacgtctacggcgaggaggtggcagacaaagggggcatgctgctggacagcacggcgctcctggtgactcccaggatcctgaaagctatgactgagcgtcagtccgaattcacaaatttcaagcggatccggattgctatggggacctggaacgtgaacggaggaaagcagttccggagcaacgtgctcaggacggcggagctgacagactggctgctcgactcgccccagctctcgggagctaccgactcccagggtgagggcagtgactttgggggagacaaaatccaattgcacctaacctgacatgtcacgcttgaccctttagtggccatcgtcttgtggaatttcatctttggtgtcttccctcctcacaatgtctaaatagcaccatggcctgactctcaagaatgctgcctcgcaagtaactgacctttttcctttcccagatgtttagaagagttagcagatggtgaatctctcttttctctttgcatacagtgatggtgaagtcttaggctttcatcagtagaatcttttcgtca

SEQ ID NO: 331045 - DNA, 825 bp, Artificial Sequence
  derived and/or modified sequence
atgatcatcagccacttccccaagtgcgtggccgtgttcgccctgctggccctgagcgtgggcgccctggacaccttcatcgccgccgtgtacgagcacgccgtgatcctgcccaacagaaccgagacccccgtgagcaaggaggaggccctgctgctgatgaacaagaacatcgacgtgctggagaaggccgtgaagctggccgccaagcagggcgcccacatcatcgtgacccccgaggacggcatctacggctggatcttcaccagagagagcatctacccctacctggaggacatccccgaccccggcgtgaactggatcccctgcagagacccctggagattcggcaacacccccgtgcagcagagactgagctgcctggccaaggacaacagcatctacgtggtggccaacatcggcgacaagaagccctgcaacgccagcgacagccagtgcccccccgacggcagataccagtacaacaccgacgtggtgttcgacagccagggcaagctgctggccagataccacaagtacaacctgttcgcccccgagatccagttcgacttccccaaggacagcgagctggtgaccttcgacacccccttcggcaagttcggcatcttcacctgcttcgacatcttcagccacgaccccgccgtggtggtggtggacgagttccagctgaccgccttcagcaccccccagcacggcaccaccagatgccccagcagcagactgttccccagcatccagcacggccccagaccctgggagagcatctacctgctgcagatccccaccacccccgcctgcacctag

SEQ ID NO: 331046 - DNA, 825 bp, Artificial Sequence
  derived and/or modified sequence
atgatcattagccactttcccaaatgcgtggccgtgtttgcacttctcgctctttctgtgggcgctctggacactttcatcgccgccgtctatgagcatgctgtgatactgccgaataggactgagaccccggtctctaaggaggaggcactcttgcttatgaacaagaatatagatgtgctggagaaggcagtgaaattggccgcaaagcagggagcgcatatcatcgtgacacctgaggacggcatatatggctggatctttacaagagagtccatctacccatacctggaggatattccagacccaggggtcaattggattccttgtcgggacccctggaggttcggtaacactcctgttcagcagcgtctgagttgcctggcgaaggataactccatatacgtggtcgcgaacatcggcgataaaaagccctgcaatgcttctgacagccaatgtccaccagacggtagatatcaatataacacagacgtggtcttcgatagccagggcaaacttctagccaggtatcacaagtacaacctgtttgcaccagaaatacagttcgactttcccaaggactcagagctggttacgttcgacaccccctttgggaagtttggcatttttacatgttttgacatcttcagtcacgaccccgccgtggtggtcgttgacgaattccagctgactgcctttagcactccccagcatggtaccactaggtgccccagctcaaggttgttccctagtattcaacatggaccacggccctgggagtccatctaccttctgcagatccccactacaccagcctgtacttag

SEQ ID NO: 331047 - DNA, 825 bp, Artificial Sequence
  derived and/or modified sequence
atgatcatcagccacttccccaagtgtgtggccgtgtttgccctgctggccctgtctgtgggcgccctggacaccttcatcgctgctgtgtatgaacatgctgtgatcctgcccaacagaacagagacccctgtgtccaaggaggaggccctgctgctgatgaacaagaacattgatgtgctggagaaggctgtgaagctggccgccaagcagggcgcccacatcatcgtgaccccagaagatggcatctacggctggatcttcacccgggagagcatctacccctacctggaggacatcccagaccccggggtgaactggatcccctgccgggacccctggaggtttggaaacacccctgtgcagcagaggctgagctgcctggccaaggacaacagcatctacgtggtggccaacatcggggacaagaagccctgcaatgccagtgacagccagtgccccccagatggccgctaccagtacaacacagatgtggtgtttgacagccagggcaagctgctggcccgctaccacaagtacaacctgtttgcccctgagatccagtttgacttccccaaggacagcgagctggtgacctttgacaccccatttgggaagtttggcatcttcacctgctttgacatcttcagccatgaccctgctgtggtggtggtggatgagttccagctgacagccttcagcaccccccagcacggcaccacccgctgccccagcagccgcctcttccccagcatccagcacggcccccggccctgggagagcatctacctgctgcagatccccaccaccccagcctgcacctag

SEQ ID NO: 331048 - DNA, 825 bp, Artificial Sequence
  derived and/or modified sequence
atgatcatcagccacttccccaagtgcgtggccgtgttcgccctgttagcactgtccgtcggcgcgctcgataccttcattgcggccgtgtatgaacacgctgtgatcctgccgaaccgtacagaaactcctgtgagtaaggaggaagctcttctgctgatgaacaagaacattgatgtgctagaaaaggcggtcaaactggctgctaagcagggggctcatattatcgtgaccccagaggatggtatctacgggtggatctttacccgcgaatcaatttatccttacctcgaggacataccagatcctggcgtgaattggattccctgccgggacccatggcggtttggcaatacccctgtgcagcagcgactgtcttgtctggccaaggataactcaatatacgttgtggccaacatcggagacaagaagccgtgcaacgccagcgatagccagtgtccacctgatggaaggtaccagtacaacacagacgtggtgttcgattcccaggggaagttactagccagataccacaagtataacctgttcgcccccgagattcagtttgacttccccaaggatagcgagctagtgaccttcgacacacccttcggcaaattcggtattttcacatgcttcgatatctttagtcacgacccagccgtcgtcgtggtggacgaatttcaactaacagcattctcgaccccccagcatggcaccactcgttgtccctccagccgactgtttccctccatccagcacggtccacgcccttgggagtccatatatctactgcagatcccaaccactccggcttgcacctag

SEQ ID NO: 331049 - DNA, 825 bp, Artificial Sequence
  derived and/or modified sequence
atgatcatcagtcacttcccgaagtgcgtcgccgtgtttgccttgctcgccctctccgtcggcgcactcgacacctttatagctgccgtgtacgaacatgctgtgatcctaccgaatcgaacagagaccccagtgagtaaagaagaagccttgctactcatgaacaaaaatatcgacgttctggagaaggccgtgaaattagccgctaagcagggagcccatatcattgttactcctgaagatggaatctatggctggatattcaccagagagtcaatctacccctaccttgaagacattcctgatcccggagtcaattggatcccctgtcgcgacccatggcggtttggcaacacaccggtccaacagcgcttatcatgtcttgccaaggacaattctatctatgtggttgctaacatcggcgataagaagccctgtaacgcgtccgactcacagtgccccccagacggtagatatcagtacaacaccgacgtcgtgtttgactcccaaggaaaactgcttgctaggtaccataagtacaatctgttcgcccctgagatccaattcgacttccctaaggatagcgaactggtgactttcgacactccttttggcaaatttggcatttttacgtgttttgacatattttcacacgaccccgcagtggtggtggtcgacgaattccagctcaccgccttctctacaccgcagcacggtaccactagatgcccttcttccagattgtttccctccattcagcacgggcctaggccatgggagagtatttacctcctgcagatccctactactcctgcctgtacctag

SEQ ID NO: 331050 - DNA, 825 bp, Artificial Sequence
  derived and/or modified sequence
atgataatctcccattttccgaagtgcgttgcagtattcgcattgctggcactgagcgtgggcgcattggatacatttattgccgctgtgtacgagcacgccgttatcttaccgaaccgtacagaaacacctgtatctaaggaagaggcactgctgttaatgaacaagaatattgacgtactggaaaaagccgtaaagctggctgccaagcaaggcgcacatattatagtcacacctgaagacggaatctacggatggatcttcacccgcgagtcaatttatccttacttagaggatattcccgacccaggcgttaattggatcccgtgtcgggacccctggagatttggaaacactcccgtacaacagcgtttatcatgcctggccaaggacaactccatttatgtggtcgcgaacataggtgacaaaaaaccctgcaacgccagcgattcacagtgtccaccagatggcaggtaccagtacaacacggacgttgtgtttgattctcaaggcaaactcctggcccgctatcataaatataatctgttcgcacccgaaattcagtttgacttccctaaggactcagaattagtgacattcgatacgccgtttggaaaatttggcatattcacttgttttgatattttttcacatgatcctgccgtcgtcgtcgtggatgaatttcagcttaccgctttctcaactccccagcatggcacgacacgctgcccctcgtctcggctcttcccttccatccagcatggaccgagaccctgggaatccatataccttttacagatccccaccacacccgcatgcacttag

SEQ ID NO: 331051 - DNA, 825 bp, Artificial Sequence
  derived and/or modified sequence
atgattatttcacactttcctaagtgtgtagccgtgttcgcgcttctggccttatctgtcggcgcccttgacaccttcattgcagcagtgtatgaacatgccgtcattctgccaaaccgtactgaaacacctgttagcaaggaggaggctctgcttctgatgaacaaaaatattgatgtcctcgaaaaagctgtcaagttggccgcgaaacagggagctcatattattgtgacgcccgaagacgggatctatggatggatattcaccagggaatcaatctatccctatcttgaagacatccccgaccccggcgtcaactggataccctgccgtgacccatggagattcggcaataccccagttcagcagcgactgtcctgtctcgccaaggataactcgatttacgtcgtcgccaatataggagataagaaaccttgcaacgccagcgatagtcagtgccccccggacggaaggtaccagtacaacactgatgtggtgttcgacagccagggtaaattactagcacgctatcataagtataatttattcgccccagaaattcaattcgatttccctaaggactcagaactcgtaacgttcgacacaccttttggtaagtttggtatttttacctgcttcgatattttttcccacgatccggcggtagtcgtggtggacgagttccagctaacagccttttcgacacctcagcatggcaccactcgatgtccctcttcacgcctctttccctctattcaacatggacctagaccatgggaaagcatttacctccttcagatccccactaccccagcatgcacctag

SEQ ID NO: 331052 - protein, 143 aa, Artificial Sequence
  derived and/or modified sequence
MAGNFWQSSHYLQWILDKQDLLKERQKDLKFLSEEEYWKLQIFFTNVIQALGEHLKLRQQVIATATVYFKRFYARYSLKSIDPVLMAPTCVFLASKVEEFGVVSNTRLIAAATSVCKCKKYICFKDVILKKAPEYIDFFFFSL

SEQ ID NO: 331053 - DNA, 432 bp, Artificial Sequence
  derived and/or modified sequence
atggccggcaacttctggcagagcagccactacctgcagtggatcctggacaagcaggacctgctgaaggagagacagaaggacctgaagttcctgagcgaggaggagtactggaagctgcagatcttcttcaccaacgtgatccaggccctgggcgagcacctgaagctgagacagcaggtgatcgccaccgccaccgtgtacttcaagagattctacgccagatacagcctgaagagcatcgaccccgtgctgatggcccccacctgcgtgttcctggccagcaaggtggaggagttcggcgtggtgagcaacaccagactgatcgccgccgccaccagcgtgtgcaagtgcaagaagtacatctgcttcaaggacgtgatcctgaagaaggcccccgagtacatcgacttcttcttcttcagcctgtag

SEQ ID NO: 331054 - DNA, 1704 bp, Artificial Sequence
  derived and/or modified sequence
gatttgatcgaggagcgcggttaccggacgggctgggtctatggtcgctccgcgggccgctccgccggctggtgcttttttatcagggcaagctgtgttccatggcagggaacttttggcagagctcccactatttgcaatggattttggataaacaagatctgttgaaggagcgccaaaaggatttaaagtttctctcagaggaagaatattggaagttacaaatattttttacaaatgttatccaagcattaggtgaacatcttaaattaagacaacaagttattgccactgctacggtatatttcaagagattctatgccaggtattctctgaaaagtatagatcctgtattaatggctcctacatgtgtgtttttggcatccaaagtagaggaatttggagtagtttcaaatacaagattgattgctgctgctacttctgtatgtaagtgcaaaaagtatatctgctttaaggatgtaattctaaagaaagctccagagtacatagatttttttttttttagtttatgagacatatgagattggttggctttattaaatttcctgaggataactttatatctagtgtatctggcaaaaaaatcaagctaaaaggtttttttttaaaaagatataaagatattacttttaatgttaaaatggatagtaattatcaatccaaaaacatcaactcagtggcttttaatcttgtaagagtaaagaaaaaattctgtttccgaattttattgtattttattgttttctaatgactattatgtcattcttatgggtagatattaatatctatgtgcaaacccgttcctgtgttgttgggttgttatgaggaccaaatgagttaatataagcttttagaacagtgccttgcttagtatgttactttgctgaggctgccataacaaaatgccacagaacaggtggcttaaacaacagaagcgtattttctcacagttttagagcatggaaatccaagatcaaggtgtctggctattcttacatggacctttctgtgagcacacacactcctggtttgctgtcttcttcatgtgaggacaatagtcttacagaattaggccccactcttatgtcctcatttaatcttttttttttctttcttttttttttttttttttttgagacagagtctcgctctgtcgcccaggctggagtgctcacttcaacttccgcctcctgggttcaagtgattctcctgcctcagcctcctgagtacctgggactacaggcatgtgccaccatgcccagctcatttttgtattttttagtagagacggggtttcaccatgttggccagactagtctcaaactcctgatctcgtgatccgctagcctcggcctcccaacgtgctgggattataggtgtgagccaccatgtctggcctgtcctcatttaatcttatccctttaaagaccctctctccaaatacagtcacattctgaggtactaggagttagggcttcaacatacgaattttggagggggacatatattggtccacaatacttggtaaactttaggggctatcatcatcatcatcatcttcaatgacaacaacatcattatcactggaaaacactgtgccaatgcagtggcattggtaccaaggtaaaatacaaggaatttaaggacaaaaaaagaagacagaaacataaaaatattaataca

SEQ ID NO: 331055 - DNA, 432 bp, Artificial Sequence
  derived and/or modified sequence
atggcaggcaatttttggcaatcctctcactacctccagtggattttggacaagcaagacctgctcaaagaacgacaaaaggacctgaaattcctttccgaggaagaatactggaagctgcaaatattctttaccaacgtcatacaggcgctgggcgagcacctcaagctgcggcagcaggtgattgcaaccgccacagtgtatttcaagagattttatgcacggtatagtctcaagtctatcgatccagtactaatggcccctacttgtgtttttctggcttctaaggtcgaagagttcggtgtggtttccaacaccaggttaatagctgctgccacatctgtctgcaagtgcaaaaaatacatctgcttcaaggacgtgattctcaaaaaggccccagagtacatcgatttctttttcttttccctatag

SEQ ID NO: 331056 - DNA, 432 bp, Artificial Sequence
  derived and/or modified sequence
atggccggcaacttctggcagagcagccactacctgcagtggatcctggacaagcaggacctgctgaaggagcggcagaaggacctgaagttcctgtctgaggaggagtactggaagctgcagatcttcttcaccaacgtcatccaggccctgggggagcacctgaagctgcggcagcaggtgattgccacagccaccgtgtacttcaagcgcttctacgcccgctacagcctgaagagcattgatcctgtgctgatggcccccacctgtgtgttcctggccagcaaggtggaggagtttggagtggtgagcaacacccggctgattgctgctgccacctctgtgtgcaagtgcaagaagtacatctgcttcaaggatgtgatcctgaagaaggcccctgagtacatcgacttcttcttcttcagcctgtag

SEQ ID NO: 331057 - DNA, 432 bp, Artificial Sequence
  derived and/or modified sequence
atggccggcaacttctggcagagcagccactacctgcagtggatccttgataagcaggatctcctgaaggaaaggcagaaggatctgaagttcttgagtgaggaagaatattggaagttgcagatcttttttaccaacgtcattcaagctttgggggaacatctgaaactgcgtcagcaagttatagcaaccgccactgtttacttcaagcgcttttacgctagatattcactgaagtccattgaccctgtgctcatggcccccacttgcgtgtttctggcctcaaaggtggaggaattcggagtcgtgtctaatacacgattaatcgcggctgcaacctctgtttgcaagtgtaagaagtacatatgctttaaagacgtgatactaaaaaaggctcccgagtatatagattttttcttctttagtctctag

SEQ ID NO: 331058 - DNA, 432 bp, Artificial Sequence
  derived and/or modified sequence
atggcgggaaatttctggcagtcatcacactatttgcagtggattctggataagcaggaccttcttaaggagaggcagaaagatctaaaattcctgagcgaagaggaatattggaagctacagatcttcttcacgaacgttatacaggctttgggtgagcatcttaagctgagacagcaggtcatcgccaccgccactgtctacttcaagcgcttctatgcaaggtatagcctcaaaagcattgaccctgttctgatggcccctacttgtgtgtttctcgcctctaaggtcgaggaatttggagtcgttagcaatactaggttgattgcagccgctaccagtgtgtgtaaatgtaaaaagtatatatgctttaaagatgtcatactgaaaaaggcaccagagtatatcgacttttttttcttctctttatag

SEQ ID NO: 331059 - DNA, 423 bp, Artificial Sequence
  derived and/or modified sequence
atgcccctggtgaagagaaacatcgaccccagacacctgtgccacaccgccctgcccagaggcatcaagaacgagctggagtgcgtgaccaacatcagcctggccaacatcatcagacagctgagcagcctgagcaagtacgccgaggacatcttcggcgagctgttcaacgaggcccacagcttcagcttcagagtgaacagcctgcaggagagagtggacagactgagcgtgagcgtgacccagctggaccccaaggaggaggagctgagcctgcaggacatcaccatgagaaaggccttcagaagcagcaccatccaggaccagcagctgttcgacagaaagaccctgcccatccccctgcaggagacctacgacgtgtgcgagcagcccccccccctgaacatcctgaccccctactag

SEQ ID NO: 331060 - DNA, 270 bp, Artificial Sequence
  derived and/or modified sequence
atgcccctggtgaagagaaacatcgaccccagacacctgtgccacaccgccctgcccagaggcatcaagaacgagctggagtgcgtgaccaacatcagcctggccaacatcatcagacagctgagcagcctgagcaagtacgccgaggacatcttcggcgagctgttcaacgaggcccacagcttcagcttcagagtgaacagcctgcaggagagagtggacagactgagcgtgagcgtgacccagctggaccccaaggaggaggagtag

SEQ ID NO: 331061 - DNA, 543 bp, Artificial Sequence
  derived and/or modified sequence
atgcccctggtgaagagaaacatcgaccccagacacctgtgccacaccgccctgcccagaggcatcaagaacgagctggagtgcgtgaccaacatcagcctggccaacatcatcagacagctgagcagcctgagcaagtacgccgaggacatcttcggcgagctgttcaacgaggcccacagcttcagcttcagagtgaacagcctgcaggagagagtggacagactgagcgtgagcgtgacccagctggaccccaaggaggaggagctgagcctgcaggacatcaccatgagaaaggccttcagaagcagcaccatccaggaccagcagctgttcgacagaaagaccctgcccatccccctgcaggagacctacgacgtgtgcgagcagcccccccccctgaacatcctgaccccctacagagacgacggcaaggagggcctgaagttctacaccaaccccagctacttcttcgacctgtggaaggagaagatgctgcaggacaccgaggacaagagaaaggagaagagaaagcagaagtag

SEQ ID NO: 331062 - DNA, 423 bp, Artificial Sequence
  derived and/or modified sequence
atgcccctggttaagcgaaatattgatcctaggcatttatgtcatacagctctgcctcgcgggattaagaacgaacttgagtgcgtgacgaacatttcactggccaacattattaggcagctatccagcctgtccaaatacgcggaggatatttttggcgagcttttcaatgaggcacacagtttctcgttccgcgtcaactccctgcaggagcgcgtggatagactatcagtgtccgtgactcaactggatcccaaggaagaagagttatctctgcaggacataaccatgagaaaagcattccggagcagcacaatccaggatcagcagctgttcgatcggaaaaccctgccgatccccctccaggagacctatgatgtctgtgagcaacccccccccttaaacattctcacaccatattag

SEQ ID NO: 331063 - DNA, 423 bp, Artificial Sequence
  derived and/or modified sequence
atgcctctggttaagcgcaatatcgacccccgacacttatgccacaccgctttgccgcggggaataaagaatgagcttgaatgtgttactaatatttctttggcaaatatcatacgacaactcagtagcctaagtaaatacgcagaggacatcttcggggagttatttaatgaagcacattccttcagctttcgcgtgaattccctgcaagagagagtcgaccggcttagcgtttccgtgactcagttagatcccaaagaagaagagctcagccttcaggacataactatgcggaaggctttcagatcatcaaccatacaggaccaacagctctttgatcggaagactcttcctatccctctgcaggagacctatgacgtctgtgagcagccgccgcctcttaacatcttaaccccctattag

SEQ ID NO: 331064 - DNA, 270 bp, Artificial Sequence
  derived and/or modified sequence
atgccattggttaaacgcaatatcgatccccggcacctctgccatacagccttgcctaggggcataaaaaatgagctcgagtgtgtgacgaatatctctctcgccaacattattaggcagttgagcagcctatccaaatacgcagaggacatctttggcgagctcttcaatgaggctcatagcttttcatttcgtgtcaattcgctgcaagagagggtcgataggctgtctgtttccgttacccaactggatcccaaagaagaggagtag

SEQ ID NO: 331065 - DNA, 543 bp, Artificial Sequence
  derived and/or modified sequence
atgcctctcgtgaaacggaatatcgaccctaggcacctgtgtcataccgcactgcctcgcggcattaaaaacgaacttgagtgcgtgactaatatcagcctcgctaacatcattcgccaactgagtagcctgtcgaagtacgccgaagatatttttggtgaactgttcaatgaggctcactcctttagcttcagggtaaactctctgcaggaacgcgtggacagactatcagtgagtgtaacccaactggatcccaaggaagaagagctaagtctgcaggacatcaccatgcgaaaggctttcagatcctcaacaattcaagatcagcagctgtttgaccggaaaaccctcccaatccctctgcaagagacctacgatgtgtgtgaacaaccccctcctttgaatattctgacgccttacagagacgacggtaaggagggcctcaagttctatacaaaccccagttatttttttgacctgtggaaagaaaagatgctgcaggataccgaggacaagcgaaaggaaaagaggaaacagaagtag

SEQ ID NO: 331066 - DNA, 270 bp, Artificial Sequence
  derived and/or modified sequence
atgcctttggttaaacgaaacatcgatccacgacacctgtgccataccgcactcccccgcggcatcaagaacgaactagaatgtgtcaccaacatcagtttggcaaacattatccggcagctttcttcactctccaaatatgcagaggatatctttggggaactgtttaacgaggcccactcctttagctttcgcgtgaactctttgcaagaaagagtggacaggctgagcgtgtcagtgacgcaactcgatccgaaagaggaagagtag

SEQ ID NO: 331067 - DNA, 423 bp, Artificial Sequence
  derived and/or modified sequence
atgcccctggtgaagaggaacatcgaccccaggcacctgtgccacacagccctgccccggggcatcaagaatgagctggagtgtgtgaccaacatcagcctggccaacatcatccggcagctgagcagcctgagcaaatatgcagaggacatctttggagagctgttcaatgaggcccacagcttctccttccgggtgaacagcctgcaggagcgggtggaccggctgtctgtgtctgtgacccagctggaccccaaggaggaggagctgagcctgcaggacatcaccatgaggaaggccttccgcagcagcaccatccaggaccagcagctgtttgacaggaagaccctgcccatccccctgcaggagacctatgatgtgtgtgagcagcccccacccctgaacatcctgaccccctactag

SEQ ID NO: 331068 - DNA, 270 bp, Artificial Sequence
  derived and/or modified sequence
atgcccctggtgaagaggaacatcgaccccaggcacctgtgccacacagccctgccccggggcatcaagaatgagctggagtgtgtgaccaacatcagcctggccaacatcatccggcagctgagcagcctgagcaaatatgcagaggacatctttggagagctgttcaatgaggcccacagcttctccttccgggtgaacagcctgcaggagcgggtggaccggctgtctgtgtctgtgacccagctggaccccaaggaggaggagtag

SEQ ID NO: 331069 - DNA, 543 bp, Artificial Sequence
  derived and/or modified sequence
atgcccctggtgaagaggaacatcgaccccaggcacctgtgccacacagccctgccccggggcatcaagaatgagctggagtgtgtgaccaacatcagcctggccaacatcatccggcagctgagcagcctgagcaaatatgcagaggacatctttggagagctgttcaatgaggcccacagcttctccttccgggtgaacagcctgcaggagcgggtggaccggctgtctgtgtctgtgacccagctggaccccaaggaggaggagctgagcctgcaggacatcaccatgaggaaggccttccgcagcagcaccatccaggaccagcagctgtttgacaggaagaccctgcccatccccctgcaggagacctatgatgtgtgtgagcagcccccacccctgaacatcctgaccccctacagagatgatggcaaggagggcctgaagttctacaccaaccccagctacttctttgacctgtggaaggagaagatgctgcaggacacagaggacaagaggaaggagaagaggaagcagaagtag

SEQ ID NO: 331070 - DNA, 423 bp, Artificial Sequence
  derived and/or modified sequence
atgcccctggtgaagcggaacatcgacccccggcacctgtgccacactgcactgccaagagggataaagaatgagctagaatgcgtgaccaacattagtcttgccaacatcattcgacagctgagttctctgagcaagtatgcagaggatattttcggagaactgtttaatgaggcccatagtttttcattccgagtgaattcccttcaggagagggtggatagattgtcagtgtccgttactcagcttgatcccaaggaggaggaactgagtcttcaggacatcacaatgcgcaaggcctttagaagcagtaccatccaggaccagcagctgttcgatcggaagacacttcccatcccccttcaagaaacctacgacgtctgcgagcagccgcccccattgaacatcctgaccccgtactag

SEQ ID NO: 331071 - DNA, 423 bp, Artificial Sequence
  derived and/or modified sequence
atgcccctggtgaagcggaacatcgacccccggcacctgtgccacactgcacttcctaggggaattaagaacgagctcgagtgcgttacaaacatctccctggctaatatcattaggcagttatctagcttgtcgaaatacgcagaggacatctttggcgagctgttcaacgaagcccatagcttcagctttcgtgtaaacagcctccaggagcgcgtcgacaggctgtctgtctctgtcactcagctagaccccaaagaagaggagctgagtctgcaggacattacaatgaggaaagcatttagatcttcaacaatacaagatcaacagctcttcgatcggaaaacactgccaattccactgcaggaaacatacgatgtttgtgagcagcccccaccgctcaacatactgacaccctattag

SEQ ID NO: 331072 - DNA, 270 bp, Artificial Sequence
  derived and/or modified sequence
atgcccctggtgaagcggaacatcgacccccggcacctgtgccacacggccctgccacgagggatcaaaaacgagctggagtgcgtgacaaacatatcactcgcgaacatcatccggcagctgagtagcctgtccaaatacgctgaggacatcttcggcgaattgttcaatgaagcccactcattttctttcagggtgaactccctccaggagcgcgtggacaggctgtccgtgtctgttacacaacttgatcctaaagaagaagaatag

SEQ ID NO: 331073 - DNA, 543 bp, Artificial Sequence
  derived and/or modified sequence
atgcccctggtgaagcggaacatcgacccccggcacctgtgccacacggccctgccccgcggtatcaagaatgaactggagtgtgtgaccaacatctccctggctaacatcattagacagctctcctccctctccaaatatgcggaggacatttttggggagctgttcaatgaagcacactctttctcctttcgcgtaaattctttgcaggagagagtcgaccggctttccgtgtcagtaacacagcttgatccaaaggaggaagagctgagcctgcaggacatcacgatgagaaaagcttttcgtagctctactatacaagaccaacaactattcgatcggaagacactacccattcccctacaggagacatacgacgtgtgtgagcagccgcctcccctgaacattcttaccccatacagagacgacgggaaagagggactgaagttttacactaacccatcctatttctttgacctgtggaaggagaaaatgttacaagacacagaggataagagaaaagagaaacggaaacaaaagtag

SEQ ID NO: 331074 - DNA, 270 bp, Artificial Sequence
  derived and/or modified sequence
atgcccctggtgaagcggaacatcgacccccggcacctgtgccacacagctctaccccgagggattaaaaatgaattagagtgcgtgaccaacatctccctcgccaatattataaggcagttgtctagtctcagtaaatacgctgaagacatcttcggggagctgtttaatgaggcccatagctttagctttcgcgttaacagcctccaggagagagtagatcgactgagtgtgtctgttacgcagttggaccccaaggaggaggaatag

SEQ ID NO: 331075 - DNA, 423 bp, Artificial Sequence
  derived and/or modified sequence
atgcccctggtgaagaggaatattgatccgagacatctgtgccataccgccctcccccgaggaatcaaaaatgaactggagtgtgtgacgaacataagcctggcaaacatcattcgacagctttcttcacttagtaaatatgcagaagatatcttcggggagttattcaacgaggcacacagcttctcatttcgcgtgaattcactgcaggagagagtggaccgcttaagcgtctctgtaactcagttagatcccaaggaggaggaattgtctttacaggacattaccatgagaaaggccttcaggtcatccaccatacaggatcagcaactctttgaccgcaaaacgctgccaattccacttcaggagacttatgacgtgtgtgagcaaccacccccacttaacattctgaccccttattag

SEQ ID NO: 331076 - DNA, 423 bp, Artificial Sequence
  derived and/or modified sequence
atgcccctagtcaaacggaatatcgatccacgacatctgtgccataccgcattaccgagagggataaagaacgaactcgagtgcgtaaccaacattagcctagccaatataatccgccaattgtcaagcttgagtaagtacgccgaggacatattcggtgaattgttcaacgaagctcattcgttcagcttccgcgtaaatagcctgcaagaaagagttgatcggctgtccgtgtctgtgacgcaattggacccaaaggaagaagaactcagcttgcaagatatcaccatgaggaaagcattccggagttcgacgatccaagatcaacaattgttcgaccggaaaacactgcctattccactgcaagagacatacgatgtgtgcgaacagcctccccctcttaatattctgactccatactag

SEQ ID NO: 331077 - DNA, 270 bp, Artificial Sequence
  derived and/or modified sequence
atgcctcttgtcaagagaaacatagaccctagacatctttgtcacacggccctaccccgtggcattaagaatgagttggaatgcgtgacaaatatctcgctggctaacattatcaggcagttatcatcactctctaagtatgccgaagatatcttcggcgaattattcaacgaggcccactctttctcattcagagtcaacagcctccaagagcgggtggaccgtctgtcagtctctgtaacccaattggatcctaaagaagaagagtag

SEQ ID NO: 331078 - DNA, 543 bp, Artificial Sequence
  derived and/or modified sequence
atgcccctcgtgaagaggaacattgaccctaggcacctttgtcatacggctctgcccagaggtattaagaacgagctagaatgcgtgactaatatcagccttgctaacatcattcgacagctgtcatccctgagtaagtatgctgaggatatcttcggagaattattcaacgaggcccatagcttcagtttccgcgtgaattccctccaggagcgcgttgacagactttctgtgagcgttacccaactggacccaaaagaagaggagctgagcctccaggacattaccatgaggaaggcctttcgttcatctaccatacaggatcaacaactgttcgatcgcaagacattgcccataccccttcaggaaacctatgacgtctgcgagcaacctccgcctctgaacatcctgaccccatacagggatgacgggaaggaggggctgaaattttatacaaaccctagttacttttttgacctctggaaggaaaaaatgctgcaggataccgaagacaagcggaaggagaaacggaagcagaaatag

SEQ ID NO: 331079 - DNA, 270 bp, Artificial Sequence
  derived and/or modified sequence
atgccactagtcaagcggaacatcgatcctcgccacctgtgtcatacagccctgcctcgaggaatcaaaaacgagctggaatgcgtgaccaacataagtctggccaatatcatcagacagttgtcctctctgtctaagtatgcggaagacatcttcggtgagctgtttaatgaggcccactcattcagctttcgagtgaattcactccaggaacgcgtggacaggttgtctgtgagcgtcacacaactagatccgaaagaggaggaatag

SEQ ID NO: 331080 - DNA, 904 bp, Artificial Sequence
  derived and/or modified sequence
gcgcgtcgagcacacggtgggtccggcggcgggttggcgccccaggcggcgttccctgtggcctggcgcctgggccgctgccctgagcgggttccgccccagagcccgaccctcctgggggctctaggcggagtcccgcgagccgagggggaccggcgaccgctgccgaagcatgaagaaggggtaaggcgtgagcccccaagatttcacgcatgccccctagcttcggtactctgacaccttctcttgcacttgcggatgatgaactggaataacgatgaaagaaagcacatccgatctcaacattcacgtcctgccctataaccgattaattaattgatccccagctagactagtgttggagaaatcagcatgttaaaacaactgttgatgatagctgttggagtaaagttgcagtggaagctatggctgcaaaatcgttaaaatcttcaaggtgaactggcacaaaggttaatctcaagatgccgctagtgaaaagaaacatcgatcctaggcacttgtgccacacagcactgcctagaggcattaagaatgaactggaatgtgtaaccaatatttccttggcaaatataattagacaactaagtagcctaagtaaatatgctgaagatatatttggagaattattcaatgaagcacatagtttttccttcagagtcaactcattgcaagaacgtgtggaccgtttatctgttagtgttacacagcttgatccaaaggaagaagaattgtctttgcaagatataacaatgaggaaagctttccgaagttctacaattcaagaccagcagcttttcgatcgcaagactttgcctattccattacaggagacgtacgatgtttgtgaacagcctccacctctcaatatactcactccttatag

SEQ ID NO: 331081 - DNA, 678 bp, Artificial Sequence
  derived and/or modified sequence
cttcggccccactaatgggggagtgggcggaggctggatttcccacctcggctgcacctgggcactggaggctgaagaggaaacatgccccctagcttcggtactctgacaccttctcttgcacttgcggatgatgaactggaataacgatgaaagaaagcacatccgatctcaacattcacgtcctgccctataaccgattaattaattgatccccagctagactaggtgaactggcacaaaggttaatctcaagatgccgctagtgaaaagaaacatcgatcctaggcacttgtgccacacagcactgcctagaggcattaagaatgaactggaatgtgtaaccaatatttccttggcaaatataattagacaactaagtagcctaagtaaatatgctgaagatatatttggagaattattcaatgaagcacatagtttttccttcagagtcaactcattgcaagaacgtgtggaccgtttatctgttagtgttacacagcttgatccaaaggaagaagaattgtctttgcaagatataacaatgaggaaagctttccgaagttctacaattcaagaccagcagcttttcgatcgcaagactttgcctattccattacaggagacgtacgatgtttgtgaacagcctccacctctcaatatactcactccttatag

SEQ ID NO: 331082 - DNA, 740 bp, Artificial Sequence
  derived and/or modified sequence
agtgttctcttcgtccccctcccccaaactgaggattgggcaataccacagaacctcaggaaaggggggaagagcgagcttcggccccactaatgggggagtgggcggaggctggatttcccacctcggctgcacctgggcactggaggctgaagaggaaacatgccccctagcttcggtactctgacaccttctcttgcacttgcggatgatgaactggaataacgatgaaagaaagcacatccgatctcaacattcacgtcctgccctataaccgattaattaattgatccccagctagactaggtgttacaatccaaaatacatagttgtgatcatttataagtgttggagaaatcagcatgttaaaacaactgttgatgatagctgttggagtaaagttgcagtggaagctatggctgcaaaatcgttaaaatcttcaaggtgaactggcacaaaggttaatctcaagatgccgctagtgaaaagaaacatcgatcctaggcacttgtgccacacagcactgcctagaggcattaagaatgaactggaatgtgtaaccaatatttccttggcaaatataattagacaactaagtagcctaagtaaatatgctgaagatatatttggagaattattcaatgaagcacatagtttttccttcagagtcaactcattgcaagaacgtgtggaccgtttatctgttagtgttacacagcttgatccaaaggaagaagaat

SEQ ID NO: 331083 - DNA, 898 bp, Artificial Sequence
  derived and/or modified sequence
agctcgcggtgttgttcactcgcgcgtcgagcacacggtgggtccggcggcgggttggcgccccaggcggcgttccctgtggcctggcgcctgggccgctgccctgagcgggttccgccccagagcccgaccctcctgggggctctaggcggagtcccgcgagccgagggggaccggcgaccgctgccgaagcatgaagaaggggtaaggcgtgagcccccaagatttcacgtgttggagaaatcagcatgttaaaacaactgttgatgatagctgttggagtaaagttgcagtggaagctatggctgcaaaatcgttaaaatcttcaaggtgaactggcacaaaggttaatctcaagatgccgctagtgaaaagaaacatcgatcctaggcacttgtgccacacagcactgcctagaggcattaagaatgaactggaatgtgtaaccaatatttccttggcaaatataattagacaactaagtagcctaagtaaatatgctgaagatatatttggagaattattcaatgaagcacatagtttttccttcagagtcaactcattgcaagaacgtgtggaccgtttatctgttagtgttacacagcttgatccaaaggaagaagaattgtctttgcaagatataacaatgaggaaagctttccgaagttctacaattcaagaccagcagcttttcgatcgcaagactttgcctattccattacaggagacgtacgatgtttgtgaacagcctccacctctcaatatactcactccttatagagatgatggtaaagaaggtctgaagttttataccaatccttcgtatttctttgatctatggaaagaaaaaatgttgcaagatacagaggataagaggaaggaaaagaggaagcagaag

SEQ ID NO: 331084 - DNA, 652 bp, Artificial Sequence
  derived and/or modified sequence
gcgcgtcgagcacacggtgggtccggcggcgggttggcgccccaggcggcgttccctgtggcctggcgcctgggccgctgccctgagcgggttccgccccagagcccgaccctcctgggggctctaggcggagtcccgcgagccgagggggaccggcgaccgctgccgaagcatgaagaaggggtaaggcgtgagcccccaagatttcacgcatgccccctagcttcggtactctgacaccttctcttgcacttgcggatgatgaactggaataacgatgaaagaaagcacatccgatctcaacattcacgtcctgccctataaccgattaattaattgatccccagctagactaggtgaactggcacaaaggttaatctcaagatgccgctagtgaaaagaaacatcgatcctaggcacttgtgccacacagcactgcctagaggcattaagaatgaactggaatgtgtaaccaatatttccttggcaaatataattagacaactaagtagcctaagtaaatatgctgaagatatatttggagaattattcaatgaagcacatagtttttccttcagagtcaactcattgcaagaacgtgtggaccgtttatctgttagtgttacacagcttgatccaaaggaagaagaat

SEQ ID NO: 331085 - protein, 305 aa, Artificial Sequence
  derived and/or modified sequence
RGRHIWKLGFPKGGCEDGFQQGASPLASPGGSPKGSPARSLARPGTPLPSPQAPRVDLQGAELWKRFHEIGTEMIITKAGRRMFPAMRVKISGLDPHQQYYIAMDIVPVDNKRYRYVYHSSKWMVAGNADSPVPPRVYIHPDSPASGETWMRQVISFDKLKLTNNELDDQGHIILHSMHKYQPRVHVIRKDCGDDLSPIKPVPSGEGVKAFSFPETVFTTVTAYQNQQITRLKIDRNPFAKGFRDSGRNRMGLEALVESYAFWRPSLRTLTFEDIPGIPKQEYRDLKTDYIFPERDNLVSRETKL

SEQ ID NO: 331086 - DNA, 918 bp, Artificial Sequence
  derived and/or modified sequence
cgcgggcgccatatctggaagctcggttttcccaaaggagggtgtgaagacgggtttcagcagggtgcatcccctttagcaagcccagggggatctccaaaggggagccctgctcggtctctggctagacccggaacccccctgcctagcccccaggcccctagagttgaccttcagggggccgagctatggaagcggtttcacgagattggaacggagatgatcattactaaggctgggcgtcggatgttcccggccatgagagttaagatctctggactagaccctcaccagcagtactacatcgctatggacatcgtgcccgtcgacaacaaacggtaccgatacgtgtatcattcctctaaatggatggtggcaggtaatgcggacagccccgtgccgccccgagtttatatccaccctgattcacccgcgagtggcgaaacgtggatgcggcaggtaatatccttcgataaactgaagctgacgaataatgagttagatgatcagggacacattatcctgcactcgatgcacaaatatcagcctcgggtgcatgtgatccgaaaagattgcggagacgatcttagtcctataaaacccgtgccatctggtgagggcgtgaaggcttttagtttccctgaaacagtgttcacaaccgtcactgcctaccagaaccagcagattacaagactaaagattgaccgcaatccttttgctaagggatttagagactctgggcgaaataggatgggcctggaggctctggtggaatcctatgccttctggcgcccgtctttaagaactctaactttcgaggacatccccggcattccaaagcaggaatacagggacctgaaaacggactatatctttccagaaagagataacctcgtgtcccgtgagaccaaactgtag

SEQ ID NO: 331087 - DNA, 918 bp, Artificial Sequence
  derived and/or modified sequence
cggggccgccacatctggaagctgggcttccccaagggcggctgtgaagatggcttccagcagggcgccagccccctggccagccctgggggcagccccaagggcagccctgcccggagcctggcccggcccggcacccccctgcccagcccccaggccccccgggtggacctgcagggcgctgagctgtggaagcgcttccacgagatcggcacagagatgatcatcaccaaggccggccgcaggatgtttcctgccatgagggtgaagatcagcggcctggacccccaccagcagtactacatcgccatggacatcgtgcctgtggacaacaagcgctaccgctacgtgtaccacagcagcaagtggatggtggccggaaatgctgacagccctgtgcccccccgggtgtacatccacccagacagccctgccagcggggagacctggatgaggcaggtgatcagctttgacaagctgaagctgaccaacaatgagctggatgaccagggccacatcatcctgcacagcatgcacaagtaccagccccgggtgcacgtgatcaggaaggactgtggagatgacctgagccccatcaagcctgtgcccagcggggagggcgtgaaggccttctccttccctgagaccgtcttcaccaccgtgacagcctaccagaaccagcagatcacccggctgaagattgacaggaacccctttgccaagggcttccgggacagcggcaggaacaggatgggcctggaggccctggtggagagctatgccttctggaggcccagcctgcggaccctgacctttgaggacatccctggcatccccaagcaggagtacagagacctgaagacagactacatcttccctgagcgggacaacctggtgtcccgggagaccaagctgtag

SEQ ID NO: 331088 - DNA, 918 bp, Artificial Sequence
  derived and/or modified sequence
cggggccggcacatctggaagctgggcttccccaagggcggctgcgaggatggcttccaacagggagctagccccctggccagccccggtggcagccccaagggatccccagccaggtcccttgcccgccccggtactccgctgccttccccccaggcacctagggtcgacctccaaggtgccgaactatggaagagatttcatgaaatcggaaccgagatgatcatcactaaggctggcagacgtatgttccccgctatgagagtaaagatcagcggcttggacccccaccagcagtattacattgcaatggacattgtacccgtggacaataaacgctatcggtatgtgtaccattcatcgaagtggatggtagctggaaacgccgactcccctgtgccgccccgggtgtatatccacccggactctccagcatcaggcgagacctggatgagacaggtaatctcttttgacaaattaaaactcacaaacaacgagctggatgatcagggtcatataatcctgcactccatgcataagtatcaacctcgggtgcatgtgattcgaaaggattgcggagatgacttaagccccattaagcctgttccgtctggagaaggcgtgaaggcctttagcttcccagagaccgtttttaccacagtgaccgcataccagaaccaacaaattactcgtctgaaaatcgacaggaaccctttcgccaaaggttttcgggactctgggcgtaaccgtatgggacttgaggctctggtagagagttatgccttctggagaccctctcttcgtaccttaacattcgaggatattcctggaataccaaaacaagaatatagagatttaaaaaccgattatatattcccggagcgggacaacttagtttcgagagagaccaaactgtag

SEQ ID NO: 331089 - DNA, 1237 bp, Artificial Sequence
  derived and/or modified sequence
agagggcggcatatttggaaacttggtttcccgaagggcggctgtgaggacggcttccagcagggagcttcccctctggcgtcaccgggaggctcccccaaggggtctccggcgcgctccctggcccggcccgggacccctctgccctcgccgcaggccccgcgggtggatctgcagggagccgagctctggaagcgctttcatgagataggcactgagatgatcatcaccaaggccggcaggcgcatgtttccagcaatgagagtgaagatctctggattagatcctcaccagcaatattacattgccatggatattgtaccagtggacaacaaaagatacaggtatgtttaccacagttcgaaatggatggtggcaggtaatgctgactcgcctgtgccaccccgtgtgtacattcatccagactcgcctgcctcgggggagacttggatgagacaagttatcagcttcgacaagctgaagctcaccaacaatgaactggatgaccaaggccatattattcttcattctatgcacaaataccaaccgcgagtgcacgtcatccgtaaagactgtggagacgatctttctcccatcaagcctgttccatccggggagggagtaaaggcattctcctttccagaaactgtcttcacaaccgtcactgcctatcagaatcagcagattactcgcctgaagatagataggaatccatttgctaaaggcttccgagactccgggcgcaacagaatgggtttggaagccttggtggaatcatatgcattctggcgaccatcactacggactctgacctttgaagatatccctggaattcccaagcaagaatacagggacttgaagacagactacatttttcctgagcgagacaatttggtctcaagggaaaccaaactgtagcacagaatgtgagagagagcaacaataggatggaatgcataaaatccttccccagagcaagcttctcccacttcttgaaaggctttatttttatatagcctctggaagccagacaaagtatcacttagaaagcgagcctcacagggcggctctggagagatctgaaggctgcgttcataagttcagaaagaacaaagtttatgctttaggccgctagaccgtaagctctttgagttcagtttttatcttcattgtatttcaagaactgtgcaagtatctggtacctggaatatgctcaataaatgtttgaataaagatt

SEQ ID NO: 331090 - DNA, 918 bp, Artificial Sequence
  derived and/or modified sequence
cggggacggcacatatggaagctgggattcccaaaaggcggttgcgaggacgggtttcaacaaggggcttccccattagcatcgcccggtggcagtccaaaagggtctccagctagaagccttgcgcgacccggaacacctctcccaagcccccaagcccctcgggtcgatctgcagggggcagagctgtggaaaaggttccacgagatcggtaccgaaatgattatcaccaaggccggacggcgtatgttccccgctatgcgagtgaagatctctggcctcgatccgcaccaacaatactatatcgccatggacattgtcccagtcgataataaaaggtaccgatatgtgtaccactcttccaaatggatggttgccggaaacgctgattccccagtgccgcctcgagtgtacatccacccagattccccagctagtggggagacttggatgcggcaggttatcagtttcgacaaactcaagctgacgaacaacgagctcgacgatcagggacatataattctgcattccatgcacaaatatcagccacgagtgcacgtcataaggaaagactgtggcgacgatctgtcgcccattaagccagttccctctggagagggcgttaaagcattcagtttccctgagacagtcttcacaacggttaccgcatatcagaatcaacagatcaccagactgaaaattgacaggaacccctttgcaaagggctttagggactcaggtcggaaccgaatgggtctagaggcattagtggagagttatgccttctggagaccatctctgcgcacccttacatttgaggacatccctgggatccccaagcaggagtatcgggatctcaaaactgactatatttttcctgaaagggataatctggtgtctcgcgaaactaaactatag

SEQ ID NO: 331091 - DNA, 918 bp, Artificial Sequence
  derived and/or modified sequence
agaggcagacacatctggaagctgggcttccccaagggcggctgcgaggacggcttccagcagggcgccagccccctggccagccccggcggcagccccaagggcagccccgccagaagcctggccagacccggcacccccctgcccagcccccaggcccccagagtggacctgcagggcgccgagctgtggaagagattccacgagatcggcaccgagatgatcatcaccaaggccggcagaagaatgttccccgccatgagagtgaagatcagcggcctggacccccaccagcagtactacatcgccatggacatcgtgcccgtggacaacaagagatacagatacgtgtaccacagcagcaagtggatggtggccggcaacgccgacagccccgtgccccccagagtgtacatccaccccgacagccccgccagcggcgagacctggatgagacaggtgatcagcttcgacaagctgaagctgaccaacaacgagctggacgaccagggccacatcatcctgcacagcatgcacaagtaccagcccagagtgcacgtgatcagaaaggactgcggcgacgacctgagccccatcaagcccgtgcccagcggcgagggcgtgaaggccttcagcttccccgagaccgtgttcaccaccgtgaccgcctaccagaaccagcagatcaccagactgaagatcgacagaaaccccttcgccaagggcttcagagacagcggcagaaacagaatgggcctggaggccctggtggagagctacgccttctggagacccagcctgagaaccctgaccttcgaggacatccccggcatccccaagcaggagtacagagacctgaagaccgactacatcttccccgagagagacaacctggtgagcagagagaccaagctgtag

SEQ ID NO: 331092 - protein, 1130 aa, Artificial Sequence
  derived and/or modified sequence
MKRSEKPEGYRQMRPKTFPASNYTVSSRQMLQEIRESLRNLSKPSDAAKAEHNMSKMSTEDPRQVRNPPKFGTHHKALQEIRNSLLPFANETNSSRSTSEVNPQMLQDLQAAGFDEDMVIQALQKTNNRSIEAAIEFISKMSYQDPRREQMAAAAARPINASMKPGNVQQSVNRKQSWKGSKESLVPQRHGPPLGESVAYHSESPNSQTDVGRPLSGSGISAFVQAHPSNGQRVNPPPPPQVRSVTPPPPPRGQTPPPRGTTPPPPSWEPNSQTKRYSGNMEYVISRISPVPPGAWQEGYPPPPLNTSPMNPPNQGQRGISSVPVGRQPIIMQSSSKFNFPSGRPGMQNGTGQTDFMIHQNVVPAGTVNRQPPPPYPLTAANGQSPSALQTGGSAAPSSYTNGSIPQSMMVPNRNSHNMELYNISVPGLQTNWPQSSSAPAQSSPSSGHEIPTWQPNIPVRSNSFNNPLGNRASHSANSQPSATTVTAITPAPIQQPVKSMRVLKPELQTALAPTHPSWIPQPIQTVQPSPFPEGTASNVTVMPPVAEAPNYQGPPPPYPKHLLHQNPSVPPYESISKPSKEDQPSLPKEDESEKSYENVDSGDKEKKQITTSPITVRKNKKDEERRESRIQSYSPQAFKFFMEQHVENVLKSHQQRLHRKKQLENEMMRVGLSQDAQDQMRKMLCQKESNYIRLKRAKMDKSMFVKIKTLGIGAFGEVCLARKVDTKALYATKTLRKKDVLLRNQVAHVKAERDILAEADNEWVVRLYYSFQDKDNLYFVMDYIPGGDMMSLLIRMGIFPESLARFYIAELTCAVESVHKMGFIHRDIKPDNILIDRDGHIKLTDFGLCTGFRWTHDSKYYQSGDHPRQDSMDFSNEWGDPSSCRCGDRLKPLERRAARQHQRCLAHSLVGTPNYIAPEVLLRTGYTQLCDWWSVGVILFEMLVGQPPFLAQTPLETQMKVINWQTSLHIPPQAKLSPEASDLIIKLCRGPEDRLGKNGADEIKAHPFFKTIDFSSDLRQQSASYIPKITHPTDTSNFDPVDPDKLWSDDNEEENVNDTLNGWYKNGKHPEHAFYEFTFRRFFDDNGYPYNYPKPIEYEYINSQGSEQQSDEDDQNTGSEIKNRDLVYV

SEQ ID NO: 331093 - DNA, 3393 bp, Artificial Sequence
  derived and/or modified sequence
atgaagagaagcgagaagcccgagggctacagacagatgagacccaagaccttccccgccagcaactacaccgtgagcagcagacagatgctgcaggagatcagagagagcctgagaaacctgagcaagcccagcgacgccgccaaggccgagcacaacatgagcaagatgagcaccgaggaccccagacaggtgagaaacccccccaagttcggcacccaccacaaggccctgcaggagatcagaaacagcctgctgcccttcgccaacgagaccaacagcagcagaagcaccagcgaggtgaacccccagatgctgcaggacctgcaggccgccggcttcgacgaggacatggtgatccaggccctgcagaagaccaacaacagaagcatcgaggccgccatcgagttcatcagcaagatgagctaccaggaccccagaagagagcagatggccgccgccgccgccagacccatcaacgccagcatgaagcccggcaacgtgcagcagagcgtgaacagaaagcagagctggaagggcagcaaggagagcctggtgccccagagacacggcccccccctgggcgagagcgtggcctaccacagcgagagccccaacagccagaccgacgtgggcagacccctgagcggcagcggcatcagcgccttcgtgcaggcccaccccagcaacggccagagagtgaacccccccccccccccccaggtgagaagcgtgacccccccccccccccccagaggccagacccccccccccagaggcaccaccccccccccccccagctgggagcccaacagccagaccaagagatacagcggcaacatggagtacgtgatcagcagaatcagccccgtgccccccggcgcctggcaggagggctacccccccccccccctgaacaccagccccatgaacccccccaaccagggccagagaggcatcagcagcgtgcccgtgggcagacagcccatcatcatgcagagcagcagcaagttcaacttccccagcggcagacccggcatgcagaacggcaccggccagaccgacttcatgatccaccagaacgtggtgcccgccggcaccgtgaacagacagcccccccccccctaccccctgaccgccgccaacggccagagccccagcgccctgcagaccggcggcagcgccgcccccagcagctacaccaacggcagcatcccccagagcatgatggtgcccaacagaaacagccacaacatggagctgtacaacatcagcgtgcccggcctgcagaccaactggccccagagcagcagcgcccccgcccagagcagccccagcagcggccacgagatccccacctggcagcccaacatccccgtgagaagcaacagcttcaacaaccccctgggcaacagagccagccacagcgccaacagccagcccagcgccaccaccgtgaccgccatcacccccgcccccatccagcagcccgtgaagagcatgagagtgctgaagcccgagctgcagaccgccctggcccccacccaccccagctggatcccccagcccatccagaccgtgcagcccagccccttccccgagggcaccgccagcaacgtgaccgtgatgccccccgtggccgaggcccccaactaccagggccccccccccccctaccccaagcacctgctgcaccagaaccccagcgtgcccccctacgagagcatcagcaagcccagcaaggaggaccagcccagcctgcccaaggaggacgagagcgagaagagctacgagaacgtggacagcggcgacaaggagaagaagcagatcaccaccagccccatcaccgtgagaaagaacaagaaggacgaggagagaagagagagcagaatccagagctacagcccccaggccttcaagttcttcatggagcagcacgtggagaacgtgctgaagagccaccagcagagactgcacagaaagaagcagctggagaacgagatgatgagagtgggcctgagccaggacgcccaggaccagatgagaaagatgctgtgccagaaggagagcaactacatcagactgaagagagccaagatggacaagagcatgttcgtgaagatcaagaccctgggcatcggcgccttcggcgaggtgtgcctggccagaaaggtggacaccaaggccctgtacgccaccaagaccctgagaaagaaggacgtgctgctgagaaaccaggtggcccacgtgaaggccgagagagacatcctggccgaggccgacaacgagtgggtggtgagactgtactacagcttccaggacaaggacaacctgtacttcgtgatggactacatccccggcggcgacatgatgagcctgctgatcagaatgggcatcttccccgagagcctggccagattctacatcgccgagctgacctgcgccgtggagagcgtgcacaagatgggcttcatccacagagacatcaagcccgacaacatcctgatcgacagagacggccacatcaagctgaccgacttcggcctgtgcaccggcttcagatggacccacgacagcaagtactaccagagcggcgaccaccccagacaggacagcatggacttcagcaacgagtggggcgaccccagcagctgcagatgcggcgacagactgaagcccctggagagaagagccgccagacagcaccagagatgcctggcccacagcctggtgggcacccccaactacatcgcccccgaggtgctgctgagaaccggctacacccagctgtgcgactggtggagcgtgggcgtgatcctgttcgagatgctggtgggccagccccccttcctggcccagacccccctggagacccagatgaaggtgatcaactggcagaccagcctgcacatccccccccaggccaagctgagccccgaggccagcgacctgatcatcaagctgtgcagaggccccgaggacagactgggcaagaacggcgccgacgagatcaaggcccaccccttcttcaagaccatcgacttcagcagcgacctgagacagcagagcgccagctacatccccaagatcacccaccccaccgacaccagcaacttcgaccccgtggaccccgacaagctgtggagcgacgacaacgaggaggagaacgtgaacgacaccctgaacggctggtacaagaacggcaagcaccccgagcacgccttctacgagttcaccttcagaagattcttcgacgacaacggctacccctacaactaccccaagcccatcgagtacgagtacatcaacagccagggcagcgagcagcagagcgacgaggacgaccagaacaccggcagcgagatcaagaacagagacctggtgtacgtgtag

SEQ ID NO: 331094 - DNA, 3393 bp, Artificial Sequence
  derived and/or modified sequence
atgaaaagatctgagaaacctgaaggctatagacagatgagaccaaagacatttcctgcgtccaactatacagtatcttctagacagatgttgcaagagattagggagtctctccggaatctgtccaagcccagtgacgctgcgaaagctgagcataatatgtctaaaatgagcactgaggatccacgccaggttagaaatcctcctaagtttgggacccatcataaagccttacaggagatccgcaacagcttgctccctttcgccaatgagaccaactcctctagatccacctcagaagtgaacccccaaatgctccaggatcttcaggcggcaggttttgatgaggacatggtaatccaagcactccaaaagaccaataaccggagtattgaggccgcaattgaattcataagcaaaatgagttaccaggacccgcgtcgggaacagatggcggctgccgcagccagaccgataaacgcgagtatgaaacccgggaatgtgcagcagtccgtgaacaggaaacagagttggaaaggcagcaaagagtcactggtcccacagcgccatggaccccctcttggcgaatccgttgcatatcacagtgagtcgcccaattcacagaccgatgttggtaggcccttgtcgggttctggtatttcagcattcgtgcaggctcacccaagtaatggtcagagagtgaatcctccgcctccgcctcaggtcaggagtgtgaccccgccacctccacctagaggtcagacccctcctcctaggggaaccacccctcctcctccctcgtgggagcccaactcacagacaaagaggtacagtggaaatatggagtatgtcatcagccggatcagccctgttccaccaggcgcctggcaagagggctatccaccacctcctctgaacaccagcccgatgaatccgcctaaccaggggcagcggggcatatcttccgtacccgtggggcggcagccaatcatcatgcagagctcgtctaagttcaatttccccagtggcaggcccggcatgcaaaatggcactggccagacagatttcatgattcatcagaacgtcgtgccagctgggaccgtcaacaggcagccccctccgccataccctctcacagctgcgaatggccagtcaccgagtgctctgcagactggaggcagcgctgctcctagctcctatacaaacggtagcatccctcaatcaatgatggtacccaaccggaatagccacaacatggaactatataatatcagcgtcccaggactccaaaccaattggccacagagttcttctgcacccgcccaatcctctccctccagcggccacgagattcctacctggcagccgaacatccctgttcgttcaaattcattcaataacccattgggtaacagggcctcacacagtgctaatagtcagcctagcgccaccaccgtgacagccatcacccctgcccctatccagcagccagtaaaatcaatgcgcgttctgaagccggaactgcagaccgccctagcgccaacacatccttcctggatccctcagccaattcaaactgtgcagccaagcccatttcctgagggcactgctagcaatgttaccgttatgcctcctgtggctgaagcccccaattaccagggcccacctcccccctaccctaagcatctgctccatcaaaatcctagcgtacctccgtacgaaagcatatccaagcctagcaaggaagaccagccttctctgcccaaggaggacgaatcagaaaaaagttacgaaaatgtcgatagcggggacaaagagaagaagcagattacaacatctccaataacagtccgcaaaaataagaaagacgaagagcggagagagagcaggatccagagttacagccctcaggctttcaaattttttatggaacagcacgtggagaatgtcctaaaaagccaccagcagagactgcacagaaagaagcagctggaaaatgagatgatgcgggtgggactgtcacaggacgcacaagatcagatgcgcaaaatgctgtgccaaaaagagagcaattatattaggctgaagagagctaagatggacaaaagtatgtttgtgaaaatcaagactctcggcattggtgcctttggcgaggtctgtctcgcccgaaaggtcgatactaaagctctttatgccacaaaaactctgagaaaaaaagacgtgcttcttaggaaccaggtcgcccacgtcaaagctgagagggacattctggcggaggctgacaacgagtgggttgtcaggctttattacagctttcaggacaaagataacttatattttgtgatggactacattcccgggggcgacatgatgtccctgctaatccggatggggatcttccctgagagtcttgccaggttctatatcgccgaactcacatgtgctgtggaatcggtccataaaatgggttttatccacagagatatcaaaccagacaatatattgatcgacagagacggtcacatcaaactcaccgactttggtctctgtaccgggtttcggtggactcacgactccaagtattatcagagcggtgaccatcctcgccaggattccatggacttcagtaacgagtggggtgatccctcctcatgccggtgtggcgacagattgaagcccctggaacgacgggccgccaggcagcaccagagatgcctggcccactccttggtgggcacacctaactatattgcacccgaggtgctcctgcgtaccgggtatacacagctatgcgactggtggtcagttggggtcattctgtttgaaatgctcgtgggacagcctccattcttggcacagacccctttggaaacacagatgaaagtcataaactggcagaccagcctacacattcccccacaggccaagctgtccccagaagcctcagacctgattattaagctatgtcgtgggcctgaggataggctaggaaaaaacggcgccgatgagatcaaagcgcatccttttttcaaaacgattgatttcagcagcgatctgcgacagcaatcagcctcctatattcccaagatcacgcaccctacggacaccagcaattttgatcctgttgatcctgacaaactgtggtctgatgacaacgaggaggaaaacgtgaacgacacacttaacggttggtataaaaacggcaagcacccagaacatgccttttatgaatttacctttcggcgcttcttcgatgacaacggttatccatacaattatcctaaacctatagaatacgagtatattaactcacagggatctgagcaacaatctgacgaggatgatcagaacacagggtcggaaataaagaaccgcgatctcgtttatgtttag

SEQ ID NO: 331095 - DNA, 3393 bp, Artificial Sequence
  derived and/or modified sequence
atgaagcgatccgagaaaccagagggctatcgccagatgagacctaagaccttccccgccagtaattacacagtgagtagcagacagatgctgcaagagattcgggagtcacttcggaacctgagtaagccttcagatgcagcgaaagccgagcacaatatgtctaagatgtctaccgaagatccacggcaggtgcgcaacccgcccaaattcgggacgcaccacaaggccctccaggagatccgcaatagcctcctaccatttgcaaatgagaccaacagcagccgtagcactagtgaggtgaacccacagatgctgcaagacttacaagccgcaggctttgatgaagacatggttatccaagcgctccagaagacaaataaccggtcaattgaggccgctattgagtttatatccaagatgtcctatcaagacccaaggagggagcagatggccgctgccgccgcacgcccaattaacgccagtatgaaaccggggaacgtgcagcagtcggttaataggaagcaatcatggaagggatctaaggagtctctggtgcctcagcgacacggcccccctctcggcgagagcgtcgcgtaccactcagaatcccctaactcgcaaacagacgtgggtcgaccattaagcggcagtggaataagtgcattcgtgcaggcacatccttctaacgggcagcgggtcaatccccccccaccaccccaagtcagaagcgtaacaccaccaccccccccaagaggacagacaccgccccccagaggcacaacaccaccacccccctcctgggagcctaacagtcagactaaaaggtattccgggaatatggaatacgtgatcagcagaatttctccagtgcctcctggagcatggcaggaaggctatccgcctcccccactgaatacctctcctatgaatccccccaatcaggggcagcggggaatctcctctgtgccagtgggacgtcagccaatcattatgcagagctcaagcaagttcaattttccttctggacgcccagggatgcagaatggcaccggccaaacagacttcatgatccatcaaaacgtggtcccagccggtacagtgaacagacaacctcccccgccgtaccccctgaccgctgctaacggacagagcccgagcgccttgcagactggcggcagcgcagccccctctagctacactaacggcagcattccacaatcaatgatggtgcccaacaggaatagccataacatggagctgtacaacattagtgtccctggactccagaccaactggccacagagtagctctgcaccagcccaatcatctcctagttcaggccatgaaataccaacctggcagcctaacatcccggttcgctcaaattcctttaataatccccttggaaatcgagcgagtcatagtgcgaacagccagccgtccgccactaccgtgaccgctattacgccagccccaatccagcagcccgtgaagagcatgcgcgtccttaagcccgagctgcagaccgctctggcacccacgcacccttcctggatcccccaacctattcaaactgttcagccaagcccctttcctgaagggaccgctagcaacgtgacagtcatgcctcctgtggcggaagcacccaattatcagggcccaccccccccgtatcctaagcacctccttcatcagaatcctagcgtgcctccttatgagtcaatcagtaaacccagcaaggaagaccaacccagcctccccaaggaagacgaatctgaaaaatcatacgagaacgtggactccggcgataaggagaagaagcaaattactacttctcctatcacagtcagaaaaaacaagaaagacgaagagcgcagggaaagccggatccagagctattcccctcaggcgtttaaattctttatggagcaacatgtggaaaatgtgcttaagagccatcagcagcgactccaccgcaaaaaacagctcgagaacgaaatgatgcgggttggcctgagtcaggacgcacaggaccagatgcgcaaaatgctatgtcagaaggaatctaattatattaggctaaaaagagctaagatggataaatcaatgttcgtcaaaatcaaaacactgggtattggggcttttggtgaggtgtgcctggcacgtaaagtggatacgaaggccttgtacgctacaaaaactctcagaaagaaggatgttcttctgaggaaccaggtcgcccatgtgaaagccgaacgtgacattttggccgaggccgataatgagtgggtggttagattgtactactcttttcaggataaggataatctgtattttgtaatggactacattcctggaggagatatgatgtccttgctgatcaggatgggtatattcccagaatcccttgctaggttttacattgctgaactgacatgtgctgtagagtctgttcacaagatgggattcattcaccgggatattaagcccgacaacattctgattgatagagatggccatatcaagttgaccgatttcggattgtgcacaggttttcggtggactcatgattcgaaatattaccaatctggggatcatcctagacaggactctatggatttcagtaacgagtggggggatccatcatcgtgcaggtgtggcgataggctcaaacctctggagcgtagggctgcccgccagcaccagcgctgtctggcccactcactggtcgggacccccaattatatcgcccccgaggtgctgcttcgcaccgggtatactcagttgtgtgattggtggtccgtaggtgtcatcctcttcgagatgttggtgggacagcctcccttcttagcgcagactccactcgagacccagatgaaggttattaattggcagacaagtttacacatcccgcctcaggccaaattgtcccctgaggccagcgatctaatcataaaactttgccgaggaccagaggatcggttgggcaaaaatggcgccgatgagattaaagcacacccatttttcaagacaattgacttcagttccgatcttagacagcagtcagcatcatatattccaaagattactcacccaactgatacatctaactttgatcccgtggacccggataagctgtggtcggatgataacgaggaggaaaatgtgaacgataccttaaacgggtggtataaaaacggcaaacatcccgagcacgccttctacgagttcaccttcaggaggttttttgacgacaatggctatccctataactacccaaaacctatcgaatatgagtacatcaacagccagggctcagaacagcagagtgacgaggatgaccagaacactggatcggaaatcaaaaacagagacttggtctatgtctag

SEQ ID NO: 331096 - DNA, 3393 bp, Artificial Sequence
  derived and/or modified sequence
atgaagaggtctgagaagccagagggctaccggcagatgaggcccaagaccttccctgccagcaactacacagtgagcagccggcagatgctgcaggagatccgggagagcctgaggaacctgagcaagcccagtgatgctgccaaggccgagcacaacatgagcaagatgagcacagaggacccccggcaggtgaggaacccccccaagtttggcacccaccacaaggccctgcaggagatccggaacagcctgctgccctttgccaatgagaccaacagcagccgcagcaccagcgaggtgaacccccagatgctgcaggacctgcaggccgccggctttgatgaggacatggtgatccaggccctgcagaagaccaacaacagaagcattgaagctgccatcgagttcatcagcaagatgagctaccaggacccccggcgggagcagatggctgctgctgctgcccggcccatcaatgcctccatgaagccaggaaatgtgcagcagagcgtgaacaggaagcagagctggaagggcagcaaggagagcctggtgccccagagacatggcccccccctgggggagagcgtggcctaccacagcgagagccccaacagccagacagatgtgggccggcccctgagcggcagcggcatcagcgcctttgtgcaggcccaccccagcaatggccagagggtgaaccccccacctccaccccaggtgcgctctgtgaccccacctcctccaccccggggccagaccccaccaccccggggcaccaccccacctcctccttcctgggagcccaacagccagaccaagcgctacagcggcaacatggagtatgtgatcagccgcatcagccctgtgcccccaggggcctggcaggagggctacccacctccacccctgaacaccagccccatgaacccccccaaccagggccagaggggcatcagctctgtgcctgtgggccggcagcccatcatcatgcagagcagcagcaagttcaacttccccagcggccggcccggcatgcagaatggaacaggccagacagacttcatgatccaccagaatgtggtgcctgctggcaccgtgaaccggcagcccccaccaccctaccccctgacagctgccaacggccagagccccagcgccctgcagacaggaggcagcgctgcccccagcagctacaccaacggcagcatcccccagagcatgatggtgcccaacagaaacagccacaacatggagctgtacaacatctctgtgcccggcctgcagaccaactggccccagagcagcagcgccccagcccagagcagccccagcagcggccacgagatccccacctggcagcccaacatccctgtgcgcagcaacagcttcaacaaccccctgggcaacagagccagccacagcgccaacagccagcccagcgccaccaccgtgacagccatcaccccagcccccatccagcagcctgtgaagtccatgagggtgctgaagccagagctgcagacagccctggcccccacccaccccagctggatcccccagcccatccagacagtgcagcccagccccttccctgagggcacagccagcaatgtgacagtgatgcctcctgtggccgaggcccccaactaccagggccccccaccaccctaccccaagcacctgctgcaccagaaccccagcgtgcccccctatgagagcatcagcaagcccagcaaggaggaccagcccagcctgcccaaggaggatgaaagtgagaagagctatgaaaatgtggacagcggggacaaggagaagaagcagatcaccaccagccccatcaccgtgaggaagaacaagaaggatgaggagcggcgggagagccgcatccagagctacagcccccaggccttcaagttcttcatggagcagcacgtggagaatgtgctgaagagccaccagcagaggctgcacaggaagaagcagctggagaatgagatgatgagggtgggcctgagccaggatgcccaggaccagatgaggaagatgctgtgccagaaggagagcaactacatccggctgaagagggccaagatggacaagtccatgtttgtgaagatcaagaccctgggcattggagccttcggggaggtgtgcctggccaggaaggtggacaccaaggccctgtatgccaccaagaccctgaggaagaaggatgtgctgctgaggaaccaggtggcccacgtgaaggccgagcgggacatcctggccgaggccgacaatgagtgggtggtgcggctgtactacagcttccaggacaaggacaacctgtactttgtgatggactacatccctggaggagacatgatgagcctgctgatccgcatgggcatcttccctgagagcctggcccgcttctacatcgccgagctgacctgtgctgtggagagcgtgcacaagatgggcttcatccaccgggacatcaagccagacaacatcctgattgacagagatggccacatcaagctgacagactttggcctgtgcaccggcttccgctggacccatgacagcaagtactaccagagcggggaccacccccggcaggacagcatggacttcagcaatgagtggggagaccccagcagctgccgctgtggggaccggctgaagcccctggagcggcgggccgcccggcagcaccagcgctgcctggcccacagcctggtgggcacccccaactacatcgcccctgaggtgctgctgaggacaggctacacccagctgtgtgactggtggagcgtgggcgtcatcctgtttgagatgctggtgggccagccccccttcctggcccagacccccctggagacccagatgaaggtgatcaactggcagaccagcctgcacatccccccccaggccaagctgagccctgaggccagtgacctgatcatcaagctgtgccggggcccagaagatcggctgggcaagaatggagcagatgagatcaaggcccaccccttcttcaagaccatcgacttcagcagtgacctgcggcagcagagcgccagctacatccccaagatcacccaccccacagacaccagcaactttgatcctgtggaccctgacaagctgtggagcgatgacaatgaggaggagaatgtgaatgacaccctgaatggctggtacaagaatggcaagcaccctgagcacgccttctatgagttcaccttccgccgcttctttgatgacaatggctacccctacaactaccccaagcccattgaatatgagtacatcaacagccagggcagcgagcagcagagtgatgaagatgaccagaacacaggcagcgagatcaagaacagagacctggtgtatgtgtag

SEQ ID NO: 331097 - DNA, 4256 bp, Artificial Sequence
  derived and/or modified sequence
aacccctatatcaatggacttttcctctaatacatggtactgctgtattaaccactttatagctttcctttctttctttcttttacagagttaattatttatattgtaaagaattttaacagtcctggggacttccttgaaggatcattttcacttttgctcagaagaaagctctggatctatcaaataaagaagtccttcgtgtgggctacatatatagatgttttcatgaagaggagtgaaaagccagaaggatatagacaaatgaggcctaagacctttcctgccagtaactatactgtcagtagccggcaaatgttacaagaaattcgggaatcccttaggaatttatctaaaccatctgatgctgctaaggctgagcataacatgagtaaaatgtcaaccgaagatcctcgacaagtcagaaatccacccaaatttgggacgcatcataaagccttgcaggaaattcgaaactctctgcttccatttgcaaatgaaacaaattcttctcggagtacttcagaagttaatccacaaatgcttcaagacttgcaagctgctggatttgatgaggatatggttatacaagctcttcagaaaactaacaacagaagtatagaagcagcaattgaattcattagtaaaatgagttaccaagatcctcgacgagagcagatggctgcagcagctgccagacctattaatgccagcatgaaaccagggaatgtgcagcaatcagttaaccgcaaacagagctggaaaggttctaaagaatccttagttcctcagaggcatggcccgccactaggagaaagtgtggcctatcattctgagagtcccaactcacagacagatgtaggaagacctttgtctggatctggtatatcagcatttgttcaagctcaccctagcaacggacagagagtgaaccccccaccaccacctcaagtaaggagtgttactcctccaccacctccaagaggccagactccccctccaagaggtacaactccacctcccccttcatgggaaccaaactctcaaacaaagcgctattctggaaacatggaatacgtaatctcccgaatctctcctgtcccacctggggcatggcaagagggctatcctccaccacctctcaacacttcccccatgaatcctcctaatcaaggacagagaggcattagttctgttcctgttggcagacaaccaatcatcatgcagagttctagcaaatttaactttccatcagggagacctggaatgcagaatggtactggacaaactgatttcatgatacaccaaaatgttgtccctgctggcactgtgaatcggcagccaccacctccatatcctctgacagcagctaatggacaaagcccttctgctttacaaacagggggatctgctgctccttcgtcatatacaaatggaagtattcctcagtctatgatggtgccaaacagaaatagtcataacatggaactatataacattagtgtacctggactgcaaacaaattggcctcagtcatcttctgctccagcccagtcatccccgagcagtgggcatgaaatccctacatggcaacctaacataccagtgaggtcaaattcttttaataacccattaggaaatagagcaagtcactctgctaattctcagccttctgctacaacagtcactgcaattacaccagctcctattcaacagcctgtgaaaagtatgcgtgtattaaaaccagagctacagactgctttagcacctacacacccttcttggataccacagccaattcaaactgttcaacccagtccttttcctgagggaaccgcttcaaatgtgactgtgatgccacctgttgctgaagctccaaactatcaaggaccaccaccaccctacccaaaacatctgctgcaccaaaacccatctgttcctccatacgagtcaatcagtaagcctagcaaagaggatcagccaagcttgcccaaggaagatgagagtgaaaagagttatgaaaatgttgatagtggggataaagaaaagaaacagattacaacttcacctattactgttaggaaaaacaagaaagatgaagagcgaagggaatctcgtattcaaagttattctcctcaagcatttaaattctttatggagcaacatgtagaaaatgtactcaaatctcatcagcagcgtctacatcgtaaaaaacaattagagaatgaaatgatgcgggttggattatctcaagatgcccaggatcaaatgagaaagatgctttgccaaaaagaatctaattacatccgtcttaaaagggctaaaatggacaagtctatgtttgtgaagataaagacactaggaataggagcatttggtgaagtctgtctagcaagaaaagtagatactaaggctttgtatgcaacaaaaactcttcgaaagaaagatgttcttcttcgaaatcaagtcgctcatgttaaggctgagagagatatcctggctgaagctgacaatgaatgggtagttcgtctatattattcattccaagataaggacaatttatactttgtaatggactacattcctgggggtgatatgatgagcctattaattagaatgggcatctttccagaaagtctggcacgattctacatagcagaacttacctgtgcagttgaaagtgttcataaaatgggttttattcatagagatattaaacctgataatattttgattgatcgtgatggtcatattaaattgactgactttggcctctgcactggcttcagatggacacacgattctaagtactatcagagtggtgaccatccacggcaagatagcatggatttcagtaatgaatggggggatccctcaagctgtcgatgtggagacagactgaagccattagagcggagagctgcacgccagcaccagcgatgtctagcacattctttggttgggactcccaattatattgcacctgaagtgttgctacgaacaggatacacacagttgtgtgattggtggagtgttggtgttattctttttgaaatgttggtgggacaacctcctttcttggcacaaacaccattagaaacacaaatgaaggttatcaactggcaaacatctcttcacattccaccacaagctaaactcagtcctgaagcttctgatcttattattaaactttgccgaggacccgaagatcgcttaggcaagaatggtgctgatgaaataaaagctcatccattttttaaaacaattgacttctccagtgacctgagacagcagtctgcttcatacattcctaaaatcacacacccaacagatacatcaaattttgatcctgttgatcctgataaattatggagtgatgataacgaggaagaaaatgtaaatgacactctcaatggatggtataaaaatggaaagcatcctgaacatgcattctatgaatttaccttccgaaggttttttgatgacaatggctacccatataattatccgaagcctattgaatatgaatacattaattcacaaggctcagagcagcagtcggatgaagatgatcaaaacacaggctcagagattaaaaatcgcgatctagtatatgtttaacacactagtaaataaatgtaatgaggatttgtaaaagggcctgaaatgcgaggtgttttgaggttctgagagtaaaattatgcaaatatgacagagctatatatgtgtgctctgtgtacaatattttattttcctaaattatgggaaatccttttaaaatgttaatttattccagccgtttaaatcagtatttagaaaaaaattgttataaggaaagtaaattatgaactgaatattatagtcagttcttggtacttaaagtacttaaaataagtagtgctttgtttaaaaggagaaacctggtatctatttgtatatatgctaaataattttaaaatacaagagtttttgaaatttttttgaaagacagttttagttttatcttgctttaaccaaatatgaaacataccccctattttacagagctcttttttcccctcataaccttgtttttggtagaaaataagctagagaaattaagccatcgtgttggtgagtgttcctaggctaatgataatctgtataattcacatcctgaaactaaggaatacagggttgaaaaaatattaatatgtttgtcagaaggaaaaataatgcatttatcttcccccccaccccccgccccatggaatatt

SEQ ID NO: 331098 - DNA, 7517 bp, Artificial Sequence
  derived and/or modified sequence
gcgacgctcacgaacgatcagagctgcgggcgacgcaacgaagcccggaggccgcaggctgcgcgctccctcgcagcagccgggcgggcaaaagcccccagtcctcggcccccgcgcaagcgacgccgggaaatgcccacatccgggaaacctgcagcggagtgcggcggcggcgacactgagtggaaggcaaaatggcggcggcggcggcggtggcctggtgttaaggggagagccaggtcctcacgacccctgggacgggccgcgctggcccgcggcagcccccccgttcgtctccccgctctgccccaccagggatacttggggttgctgggacggactctggccgcctcagcgtccgccctcaggcccgtggccgctgtccaggagctctgctctcccctccagagttaattatttatattgtaaagaattttaacagtcctggggacttccttgaaggatcattttcacttttgctcagaagaaagctctggatctatcaaataaagaagtccttcgtgtgggctacatatatagatgttttcatgaagaggagtgaaaagccagaaggatatagacaaatgaggcctaagacctttcctgccagtaactatactgtcagtagccggcaaatgttacaagaaattcgggaatcccttaggaatttatctaaaccatctgatgctgctaaggctgagcataacatgagtaaaatgtcaaccgaagatcctcgacaagtcagaaatccacccaaatttgggacgcatcataaagccttgcaggaaattcgaaactctctgcttccatttgcaaatgaaacaaattcttctcggagtacttcagaagttaatccacaaatgcttcaagacttgcaagctgctggatttgatgaggatatggttatacaagctcttcagaaaactaacaacagaagtatagaagcagcaattgaattcattagtaaaatgagttaccaagatcctcgacgagagcagatggctgcagcagctgccagacctattaatgccagcatgaaaccagggaatgtgcagcaatcagttaaccgcaaacagagctggaaaggttctaaagaatccttagttcctcagaggcatggcccgccactaggagaaagtgtggcctatcattctgagagtcccaactcacagacagatgtaggaagacctttgtctggatctggtatatcagcatttgttcaagctcaccctagcaacggacagagagtgaaccccccaccaccacctcaagtaaggagtgttactcctccaccacctccaagaggccagactccccctccaagaggtacaactccacctcccccttcatgggaaccaaactctcaaacaaagcgctattctggaaacatggaatacgtaatctcccgaatctctcctgtcccacctggggcatggcaagagggctatcctccaccacctctcaacacttcccccatgaatcctcctaatcaaggacagagaggcattagttctgttcctgttggcagacaaccaatcatcatgcagagttctagcaaatttaactttccatcagggagacctggaatgcagaatggtactggacaaactgatttcatgatacaccaaaatgttgtccctgctggcactgtgaatcggcagccaccacctccatatcctctgacagcagctaatggacaaagcccttctgctttacaaacagggggatctgctgctccttcgtcatatacaaatggaagtattcctcagtctatgatggtgccaaacagaaatagtcataacatggaactatataacattagtgtacctggactgcaaacaaattggcctcagtcatcttctgctccagcccagtcatccccgagcagtgggcatgaaatccctacatggcaacctaacataccagtgaggtcaaattcttttaataacccattaggaaatagagcaagtcactctgctaattctcagccttctgctacaacagtcactgcaattacaccagctcctattcaacagcctgtgaaaagtatgcgtgtattaaaaccagagctacagactgctttagcacctacacacccttcttggataccacagccaattcaaactgttcaacccagtccttttcctgagggaaccgcttcaaatgtgactgtgatgccacctgttgctgaagctccaaactatcaaggaccaccaccaccctacccaaaacatctgctgcaccaaaacccatctgttcctccatacgagtcaatcagtaagcctagcaaagaggatcagccaagcttgcccaaggaagatgagagtgaaaagagttatgaaaatgttgatagtggggataaagaaaagaaacagattacaacttcacctattactgttaggaaaaacaagaaagatgaagagcgaagggaatctcgtattcaaagttattctcctcaagcatttaaattctttatggagcaacatgtagaaaatgtactcaaatctcatcagcagcgtctacatcgtaaaaaacaattagagaatgaaatgatgcgggttggattatctcaagatgcccaggatcaaatgagaaagatgctttgccaaaaagaatctaattacatccgtcttaaaagggctaaaatggacaagtctatgtttgtgaagataaagacactaggaataggagcatttggtgaagtctgtctagcaagaaaagtagatactaaggctttgtatgcaacaaaaactcttcgaaagaaagatgttcttcttcgaaatcaagtcgctcatgttaaggctgagagagatatcctggctgaagctgacaatgaatgggtagttcgtctatattattcattccaagataaggacaatttatactttgtaatggactacattcctgggggtgatatgatgagcctattaattagaatgggcatctttccagaaagtctggcacgattctacatagcagaacttacctgtgcagttgaaagtgttcataaaatgggttttattcatagagatattaaacctgataatattttgattgatcgtgatggtcatattaaattgactgactttggcctctgcactggcttcagatggacacacgattctaagtactatcagagtggtgaccatccacggcaagatagcatggatttcagtaatgaatggggggatccctcaagctgtcgatgtggagacagactgaagccattagagcggagagctgcacgccagcaccagcgatgtctagcacattctttggttgggactcccaattatattgcacctgaagtgttgctacgaacaggatacacacagttgtgtgattggtggagtgttggtgttattctttttgaaatgttggtgggacaacctcctttcttggcacaaacaccattagaaacacaaatgaaggttatcaactggcaaacatctcttcacattccaccacaagctaaactcagtcctgaagcttctgatcttattattaaactttgccgaggacccgaagatcgcttaggcaagaatggtgctgatgaaataaaagctcatccattttttaaaacaattgacttctccagtgacctgagacagcagtctgcttcatacattcctaaaatcacacacccaacagatacatcaaattttgatcctgttgatcctgataaattatggagtgatgataacgaggaagaaaatgtaaatgacactctcaatggatggtataaaaatggaaagcatcctgaacatgcattctatgaatttaccttccgaaggttttttgatgacaatggctacccatataattatccgaagcctattgaatatgaatacattaattcacaaggctcagagcagcagtcggatgaagatgatcaaaacacaggctcagagattaaaaatcgcgatctagtatatgtttaacacactagtaaataaatgtaatgaggatttgtaaaagggcctgaaatgcgaggtgttttgaggttctgagagtaaaattatgcaaatatgacagagctatatatgtgtgctctgtgtacaatattttattttcctaaattatgggaaatccttttaaaatgttaatttattccagccgtttaaatcagtatttagaaaaaaattgttataaggaaagtaaattatgaactgaatattatagtcagttcttggtacttaaagtacttaaaataagtagtgctttgtttaaaaggagaaacctggtatctatttgtatatatgctaaataattttaaaatacaagagtttttgaaatttttttgaaagacagttttagttttatcttgctttaaccaaatatgaaacataccccctattttacagagctcttttttcccctcataaccttgtttttggtagaaaataagctagagaaattaagccatcgtgttggtgagtgttcctaggctaatgataatctgtataattcacatcctgaaactaaggaatacagggttgaaaaaatattaatatgtttgtcagaaggaaaaataatgcatttatcttcccccccaccccccgccccatggaatatttaatctatttaatcttcttgcatttatttctcaagaattactggctttaaaagaagccaaagcactactagctttttttccatattggtatttttgatgctgcttccaattttaaaagggaacaaagctgccataaatcgaaatgttcaatactaaaagctaaaatatttctcaccatcctaagcagataattattttaattttcatatacttttcctgtatagtaactattttgattatatcatcaatgttacctgtttcctctttcagaacagtgctgcatatacagattgttattggcaaaggaaaatctggctatctggcaatattttacctaagcgcagattaattggtgaaaaaattaactcttaagatggccattaataattaggaaagtttacagagtggtcttagtagaaaattcaagtcctcctaatttatttaaggttcaataatgcgttcaacatgcctgttatgtataacgcttaggttctaaggaagattaaggtttcataccaaaatacatgtagcttatcttttaggaaggggaaaaaggctccattttgaccatagtaaaatttgtgttgtgttttatttccttttcttaagctccactgataagggattgtttttatcaaaagttactatttgtagattggaggcataattttagtgattttcatacttttagctttcttcgcataaaagctaattgaaaccgtatatgtagtaaaattaaaggcagagctgttgcagttgaattggagagttagggcaaagaacacttattagcccacacttcccacctttctacaggtggtcctttcagagctcagcctgaaaacccactactgtgttatcgtgcgtcttttggggttagtggttcttttgagaatctgaaggaagctgtggactcttcctagaaaaaaaaaccacacatacacatacaatgttgcatgcagtttcaagggattttggacatattgaaacctatcacaggctgtaggttatggacctctgtgccatgagaaaattgatacattaaactaagaactttgtttttaacttaccaatcactactcagcacatcttatataagctgataatttgtgatggaaaaggtctgtagcatgtgatataaggtgaccttatgaatgcctctcttgctggtacattaagttgttttaatatatcatttggaggggactgaaatgttaggctcattacaagcttgatacagaaatatttctgaaggatttctaatcagaattgtaaaacaatgtgctatcatgaaatcgcagtcttcacctcatggttcatggaacatttggttagtcccataaaatcctatgcaaaacaaagtagttcaagaatttttaggtgggtagtcacatttataaggtattcctcttactctttgggctttttcagtctgatttatttaaattttcatttagttgttttacttttggactaaggtgcaatacagtagaagataactttgttacatttatgttgtaggaaaactaaggtgctgtctcctcccccttcccttcccacaaaatctgtattccccctattgctgaaatgtaacagacactacaaattttgtattctttttttgttttttgttttgagacagggtctcactctgtcacccaggctggagggcagtggcgcttcacagctcactgcatcctcaaccttgggggctcacgcagtcctcccgcctcagcctcccaagtagctgggcatgcgccaccaagcccagctaatttttgtatctttagtagagatggggtttcgccatgttgcccaggttggtgtggaattcctgggctccagttatatgcccacctcagcctcccaaagtgctgggattacagacgtgacccaccgcgcctggcgcaaatatgtattcttttaaaatttcctctgatactataagctttttgcatttatctgaagcagtatacatgcctttggtatcagcaattttaacagtttggatatacttatcagctatcttattccaaaactacatctacttcttccagtatagaatctggtgcttcctgaccaaaaagatgagaaaaacaatgttaaaaatatagatgctttccattgaaatggagtgaaaacattggttctatatgttttcttttaaaataattttcttattaaaaacttgctgtctttattatacttaccctttttatgcatatcaatagtatttataagatgtgttctataattatgtaattgtagatactgttatgcattgtccagtgacatcataaggcaggccctactgctgtatcttttctaccttcttatttgtaatagaaactatagaatgtatgactaaaaagtcactttgagattgacttttttaaaaagttattaccttctgctgttgcaaagtgcaaaactgtgagtggaattgttttattctgacttaatgtgttagaaattagagaatacagtgggaggatttttagacattgctgctgctgttacccaaggtattttagataaaaaatttttaataaacatccctttggtatttaaagtggaacatttagcctgttcattttaatctaaagcaaaaagtaatttgggtcaaaatattggtatatttgtaaagcgccttaatatatccctttgtggaaggcactacacagtttacttttatattgtattgtgtatataagtattttgtattaaaattgaatcagtggcaacattaaagttttataaaatcatgctttgttagaaaaagaattacagctttgcaatataactaattgtttcgcataattctgaatgtaatagatatgaataatcagcctgtgtttttaatgaacttatttgtattttcccaatcattttctctagtgtaatgtttgctgggataataaaaaaaattcaaatctttcaa

SEQ ID NO: 331099 - DNA, 3393 bp, Artificial Sequence
  derived and/or modified sequence
atgaagcggagcgagaagcccgagggctaccggcagatgcggcccaagacttttcccgcctccaactatactgtatctagccggcagatgctgcaggagatcagggagagcctgcgtaacctgtcaaagccttccgacgctgccaaggccgaacacaacatgtccaaaatgagtacagaggaccccaggcaggtgcggaacccacccaaattcggaacacaccacaaggctctgcaggagattcgcaactctttactgcctttcgctaatgaaacgaacagctccaggtcaacctctgaggttaaccctcagatgctccaggatttacaggctgctggttttgacgaggatatggtgatccaggcgttacaaaagaccaacaacaggtctatcgaggccgcaatagagtttatcagtaaaatgtcgtaccaggaccccaggcgcgaacagatggcggccgcggccgcgaggccaattaacgcctccatgaagcctggcaatgtccaacagtcagtaaaccgtaagcaatcctggaaaggttccaaagaaagcctggttccacagcggcatgggccccctctgggagaatcagtcgcatatcacagtgagagtcctaacagtcaaacagatgttggtcggcccctgtccggctccggcatctcggcttttgtgcaagcacacccctcgaacggccagcgcgttaatccaccgcctcctccccaggtgcggagtgttacccccccaccccccccccgtgggcagacaccgccgccaagagggacaactccgccaccgccttcctgggaacccaattcacaaaccaagcgatactcaggcaacatggaatatgttatcagtagaatctcccccgtccctcccggcgcgtggcaagagggttaccctcccccgcctttaaatacaagccccatgaacccaccaaatcagggacagagaggcatttcgagtgtaccagtgggacgtcagccaattattatgcaatcaagctcgaagttcaacttcccaagtgggagaccaggaatgcaaaacgggacaggccagacggactttatgatacatcaaaatgtcgttccagcggggaccgtcaatagacaaccaccccctccctaccccttaacagctgccaacggacagtctccctctgccctacaaacagggggtagcgccgcgcccagcagttataccaacgggtccatcccccaatctatgatggtgcccaacaggaactcacacaatatggagctttacaacatcagcgttcccggcctgcaaacaaattggccccagtccagcagtgcccctgcccagagctccccttcctccgggcatgagatcccaacgtggcagcccaacattcctgtgcggagtaacagtttcaacaacccactcggtaatagggcttcacattctgctaactcccagcccagtgctacaaccgtcacggcgattacccccgcccctattcagcaaccggttaagagcatgcgggtgcttaaaccagaactgcagactgctttggcaccgacacatccctcgtggatcccccagcccattcagacagttcaacctagccccttcccagaaggtacggctagtaacgtgaccgtgatgccccccgtggcggaagcgcccaactaccagggaccacccccaccgtacccgaagcatttgctccatcagaatcctagcgtgcctccgtatgagagcatcagcaagccttcaaaagaagatcaaccttccctgccaaaagaggacgagtctgaaaagtcttacgaaaatgtcgattctggggataaggagaaaaagcagatcaccacaagtcccatcacggtgcggaagaacaagaaagatgaagaacgccgggagtctcgcatccaatcatattccccgcaggcattcaagttttttatggaacaacacgtggagaatgttctgaagtcccatcaacagagattgcatcggaaaaagcagctagagaatgaaatgatgcgggttggcttgagtcaggatgcccaggaccaaatgcgtaaaatgttgtgccagaaagagagtaactacatacggctcaaaagagcaaagatggataagtccatgtttgtgaagattaaaactctgggcataggagcatttggggaggtgtgcctggctcgcaaggtggacaccaaagcgctttacgcaacaaagaccttacgcaagaaggacgtgctgctccggaatcaggtcgcccacgtcaaggcggaacgggatatcctggccgaagctgataacgaatgggtcgttagactatactacagctttcaggataaagacaacctttactttgtgatggactatatacccggcggggatatgatgagcctgttaatccgcatggggatctttccagaatcattagcccggttctatattgccgagctcacctgtgcagttgagtcagtccataaaatgggttttatccatagggacataaaaccagataatattctcattgatcgcgacggacacatcaaactgaccgactttggactttgtaccgggtttcgctggacccacgacagtaagtactaccagagcggtgatcaccctcgccaagattcaatggatttttcaaatgagtggggagatccatcctcttgccgctgtggagatcgacttaagcctctggaacgaagagctgctagacagcatcaacgctgcttagcgcatagcttagtgggcaccccaaactacatcgctcccgaagtgttattacgcacaggctacactcagttgtgtgattggtggagcgtcggagtcatactctttgagatgctggtcggtcaacctcctttcctggcccaaacgcctcttgaaacacagatgaaggtgataaattggcagacaagcctgcatatcccgcctcaagcaaaattaagcccagaagcttcagatctcataatcaaactgtgcaggggacccgaagacaggctgggaaagaacggcgctgacgagatcaaggcacacccattttttaagactatcgacttttcctctgatcttaggcagcagtctgcttcctatattccaaagattacccacccaacggacacttctaattttgatcccgtggatccagacaagctgtggtccgacgataatgaagaggaaaacgtcaatgacaccctcaatggctggtataagaatgggaaacacccggagcacgctttctatgagtttacattccgacggtttttcgatgataacgggtatccttataattacccaaagccaattgaatacgagtatattaactcccaaggttccgagcagcagtcagacgaggatgaccagaataccggaagtgagattaaaaatcgagacctggtgtacgtgtag

SEQ ID NO: 331100 - DNA, 3393 bp, Artificial Sequence
  derived and/or modified sequence
atgaagcggagcgagaagcccgagggctaccggcagatgcggcccaaaaccttcccagccagtaattacaccgtctcttcaaggcagatgctgcaagagattcgcgaatctttacggaacctctcaaagccgtcggacgccgccaaggccgaacataacatgagcaaaatgagtaccgaggatcctcggcaggttagaaacccccctaaattcggcacccatcataaagcgttacaggagatacgaaactcgctgttaccatttgcgaacgagactaactcatcaaggtctacatccgaggtgaacccccagatgctacaggatctgcaggccgctgggttcgatgaagatatggtcatccaagcactgcagaaaacgaataatagatctatcgaagctgcgattgagttcatttctaagatgagctaccaggacccacggcgggaacaaatggcagcagccgccgcccgccccattaacgccagtatgaagcccggcaacgtgcagcaatccgtgaataggaaacagagctggaaaggctctaaggagtcccttgtgccccagaggcacgggccccccttgggggagtcagtcgcctaccattccgaatctccaaactcacagactgatgtcggtcgccccctctccggatccggtatttccgcctttgtacaagcacaccctagtaatggccaacgtgtgaaccctcctccccctcctcaggtgaggagcgtcaccccacctcctcccccgaggggccagacaccgccacctcggggcacaactcccccccctcctagttgggaacctaactctcagaccaagcggtactctggtaacatggagtatgtgatatcccgcatttccccagtaccacccggggcttggcaagagggctacccacccccccctctgaataccagtcctatgaacccaccaaatcagggtcagagagggatatcctctgtgcccgttgggagacagccaatcatcatgcagtctagctccaagttcaacttcccttcgggaagacctggaatgcagaatggcaccgggcaaaccgatttcatgatccatcagaatgttgtgcccgccggcaccgtgaaccgccagcctccgcctccttatcccctcaccgccgcgaacggtcagtccccaagcgcactgcagactgggggttcagctgccccctcctcctataccaatggatctattccacagtcaatgatggtcccgaatcgaaattcgcacaacatggagctgtacaacatctctgtgcctggtctgcagacaaactggcctcagagctctagtgcgcctgcacagtcctccccatcttccggccacgagatccctacctggcaaccaaacattcccgtccggagcaatagctttaataatccattgggtaacagagcctctcacagcgcgaacagccagccttcagccactacggttacagccatcacaccggcccctatccaacagccggtgaaaagcatgagggtcctgaagccagaacttcagactgccctagccccaacacatccctcttggattccccaaccaattcaaactgtgcaacccagcccattccccgaggggacagcaagtaatgtgaccgtcatgcctcccgtcgctgaagcccccaattaccaagggcctccgcctccgtaccctaaacacctgctgcatcagaacccgagtgtccctccttacgagtcgatttccaaaccctctaaggaagaccagccttcgttacctaaggaggacgagtctgagaagagctatgagaacgtcgattccggcgacaaagagaaaaaacaaatcaccacatcacctatcactgtacggaaaaacaagaaggacgaggagagacgggaatctcgcatacagtcctattccccccaagccttcaaattcttcatggaacaacacgtggagaacgtgttgaaaagtcatcaacagagactgcaccgcaaaaaacaacttgagaatgagatgatgagggttggcctctcacaggacgcccaggaccaaatgagaaagatgctctgtcagaaggagtccaattacattagactcaaaagggctaagatggacaagtcaatgttcgttaaaatcaagactttgggcattggcgcgttcggcgaggtatgtctggcccgcaaggtggataccaaagccttatacgccacgaaaacgctgagaaagaaggatgtgttgctgcggaatcaagtagctcacgtcaaagcagagcgagatattctagccgaggctgacaatgagtgggtggtacgcttatactacagcttccaggacaaagacaatttgtactttgttatggattacatcccagggggcgatatgatgtcgctccttatccgtatgggcatcttcccagagtcgttggcccgcttttacattgctgagcttacctgtgccgttgagtctgtacacaagatgggattcattcatcgagacattaaacccgataatatcctgatagaccgtgatggacatattaaactgaccgacttcggcctgtgtactgggttccgctggacacatgatagcaaatactaccagtcaggcgaccacccccggcaggactctatggattttagcaacgagtggggagacccgagctcttgtcgatgcggagataggctgaagccgctagagaggcgtgctgccagacagcatcagaggtgtctggcacattcgctggtcgggacccctaactatatagctcctgaggtgttgctcaggaccggatatacccaattatgcgattggtggtcagtgggtgtgatactttttgaaatgctcgttggtcaaccacctttcctcgcacagactcccctcgagactcagatgaaggtgataaactggcagacaagcctgcatatacctccccaagccaagctctccccggaagcttccgacctgattattaaattatgcagaggacctgaagatagactgggcaaaaatggcgccgatgaaatcaaagctcaccccttctttaaaaccattgacttctcctctgatcttcgacagcaaagcgcatcatacataccaaagattacacaccctacagacacatctaactttgacccagtcgacccggacaagttgtggagcgatgataacgaagaggaaaacgtcaatgatactctgaatggctggtataaaaatggcaaacaccctgaacacgcgttctatgaattcaccttcaggcgctttttcgatgacaatggctacccctataattaccctaagcccattgagtatgaatatatcaacagccagggcagtgagcaacagtctgatgaagacgatcagaacacaggttctgaaattaagaaccgggacctggtgtacgtttag

SEQ ID NO: 331101 - DNA, 3393 bp, Artificial Sequence
  derived and/or modified sequence
atgaaacgcagcgagaaacccgaggggtacagacaaatgcgccctaagacttttccagcttctaattatactgtgtcatctcgccagatgcttcaggagatcagagaaagtcttcggaaccttagtaagccctccgatgcagccaaagctgaacacaatatgagcaagatgtcgaccgaggaccccaggcaagtgcgcaatccgccaaagtttggtacacaccacaaggccctccaggagataaggaacagtctgctgccatttgctaatgagacgaattcctctcgatctacttcagaagtcaatccccagatgctgcaggatctgcaggcagctggctttgatgaggacatggttatccaggctttgcagaagactaataatcgatctatagaggctgccatcgagttcatcagtaagatgtcttaccaagacccacggcgtgaacagatggctgcagccgcagctcgaccaattaacgcatctatgaagcccggaaatgttcaacagagtgtaaaccgaaaacaatcatggaaaggttctaaggagtctctggttcctcaacggcatgggcctccgctcggtgagtctgtggcttatcatagcgaaagcccaaattcccagaccgatgtcgggagaccactttccggatcaggcatcagtgcattcgtgcaggctcatccatcgaacgggcagagggtgaatcctccacctccgccacaggtcagatccgtgactccaccgccacccccacgcggacagacccctccgccaagaggaactaccccgccacctccttcctgggagccgaattctcaaaccaaacggtacagcggtaacatggaatacgtcatcagccgaatctcccctgtgccccctggcgcatggcaggagggctacccccctccgccactcaatacatcacctatgaaccctccaaatcagggccaacgcggaatctcgtctgtaccagtgggtcgtcagcccattattatgcagagcagcagtaagtttaactttccatcgggtagaccgggaatgcaaaatggtaccggccagaccgactttatgatccatcagaacgtggtccctgccggaaccgtgaatcgccagccacctccaccgtacccactgactgcggctaatggccagtctccgtccgcccttcaaaccggcggttccgcagccccaagtagctatacgaatgggtccataccccaaagcatgatggtgcctaacaggaattcccataacatggaactctacaatatatctgtgccaggactgcagacaaactggcctcagagtagcagtgcccctgcccagagctcaccgagttcaggccacgagattccaacatggcagcccaacatacctgtacgcagtaactcattcaataaccccctcggcaatcgggctagccattccgccaactcgcagccttccgccactacggtgaccgcaattacaccggctccaatccagcagccagtcaaaagtatgcgcgttctgaaacctgagctgcagaccgcccttgccccaacacaccctagctggataccccagccaatccagactgttcagccctctcccttccccgaaggcaccgcttccaatgtgaccgtgatgcctcctgttgccgaggctcccaattaccaagggccacctcctccataccctaaacatttactgcaccaaaaccccagtgtaccaccgtacgagagcatttccaagccaagtaaggaggaccagccaagcttgccaaaggaagacgaatctgagaagagttacgaaaatgtagacagcggggataaggaaaaaaagcagatcacaacttcacctatcacagtacggaagaataagaaggacgaagagaggcgagaatctagaatacagtcgtatagcccgcaggcctttaagttcttcatggaacagcacgttgagaacgtgctaaagtcacatcagcagcgtctgcatcgcaaaaaacagcttgagaatgagatgatgcgggtagggctgtcacaggatgcacaggaccagatgcgaaaaatgctgtgtcagaaagaatcgaactatatccggttgaaaagagctaaaatggacaagagcatgttcgttaaaatcaagactctgggcattggcgctttcggcgaggtctgcctggcgagaaaggtcgacaccaaagccttgtacgccacaaaaacgttacggaagaaggacgtgctcctgagaaaccaagtggcgcatgttaaggccgaaagggatatcctggcagaagccgataacgaatgggtggtgagactctattactcctttcaggacaaggacaatttgtattttgtgatggactacattcctggcggtgatatgatgagtttgctcataaggatggggatcttcccagagtctctggctcggttctatattgcagaattgacatgtgccgtggagagcgtgcataagatgggctttatacatagggatatcaaacctgacaatattctaattgatagagatggccacattaaactcaccgacttcggtctgtgcaccggctttcggtggacacacgattctaaatactaccaatccggggatcacccacggcaggatagtatggacttctctaacgaatggggagatccttcttcttgtcgctgcggggacaggctcaaaccactggaacgccgtgcagccagacagcatcaacgctgcctagctcatagcctcgtcggtacaccaaattatattgccccagaagtcctcttgagaacaggctatactcagctttgcgactggtggtctgtgggagtaattctgttcgagatgttggttgggcaacccccttttctggctcagactccactcgagacacaaatgaaagtgatcaattggcagacctcactgcacattcctcctcaggccaagctgagtccagaagcctccgacttgattatcaaattgtgtcggggaccagaagaccgcctgggtaagaacggagccgatgagattaaagcccatcctttctttaaaactattgatttctcctcagatctccggcagcaatcggcttcttacattccgaaaatcacacatcccaccgacacatcaaacttcgaccccgtggatcctgataagttgtggagcgacgacaatgaggaggagaacgtgaacgatacccttaacggctggtacaagaacggcaaacatcctgaacacgccttttatgagtttacctttcggcgattttttgatgacaatggctacccatataactaccctaaaccaattgaatatgaatatatcaattctcagggaagcgaacagcagagtgacgaggatgaccagaacaccgggtcagagatcaaaaaccgggatttggtgtacgtgtag

SEQ ID NO: 331102 - DNA, 3393 bp, Artificial Sequence
  derived and/or modified sequence
atgaaacgtagcgagaaacctgaagggtacaggcaaatgcggccaaaaacatttcctgccagtaattatacggtttcctcaagacagatgctgcaggagatacgcgaaagtctccgcaacctgtccaagccatccgacgccgcaaaggcagagcataatatgtctaagatgtcaacagaggaccccagacaagttcggaatccgcctaaattcggcacacaccacaaggcccttcaagaaatccggaactccctcctcccgttcgctaacgagacgaattcatcacgttcgacttccgaagttaatcctcagatgctgcaagacttacaggctgccggattcgatgaagatatggtgattcaggctttgcagaagacaaacaaccgtagcatcgaggctgctatagagtttattagtaaaatgtcctaccaggatccccgacgggaacagatggctgccgctgccgctaggcccattaatgcctctatgaagcctggcaacgttcaacaatcagttaacaggaagcagagctggaaagggtcaaaagagtctcttgtgccccagagacatggacccccactcggcgaatcagtcgcttatcactctgaaagccctaattcacagactgatgtcgggagaccactcagtgggagcgggatctctgcatttgtccaggctcacccatctaacggccagcgcgtgaacccgccacccccaccccaggtgagatccgtgaccccaccgccacccccacgaggacagactccccctcctcgcggaacaacacctccacccccaagttgggaacctaacagccagacaaagcgatactctgggaacatggagtatgttatctctcgcatctccccagtaccaccaggcgcatggcaagagggataccccccaccccctctgaacactagtcctatgaaccccccaaaccagggtcaacgtggaattagcagtgtgcctgttggtcgccagccaatcatcatgcagagctcttccaagttcaacttccctagtgggagacctgggatgcagaacggcacaggccaaacggactttatgattcatcaaaacgtggtgcccgctggcactgtgaaccgacagcctccacctccctacccattgactgcagcaaatggccagtctccaagcgccttgcagacagggggaagcgccgctccttcctcatacacgaatggtagcatcccgcagagcatgatggttcctaacagaaacagccacaatatggagctatataacatcagcgtccccggtctccagacaaactggccccaaagtagcagcgcacccgctcagagtagccccagttcgggacacgaaatcccaacctggcagcctaatattcctgttagatcaaactcctttaacaatccgttaggaaaccgggcttctcacagtgcaaactcacagcctagtgcaactacggtcactgccattaccccggcaccaattcagcagcccgttaaatcaatgcgcgttttgaaacccgaactccagacagcattggctccaacccatcccagctggattccccagcctattcagaccgttcagccttctccctttcctgaggggaccgctagtaacgtgactgtaatgccgcctgtcgcagaggcacccaactatcagggcccaccgccaccataccccaagcacctgttgcaccagaatccttcagtgcccccatatgagagtatcagtaaaccatctaaggaggatcaaccaagtctcccaaaagaagatgagtctgaaaagtcgtatgaaaatgtggactccggggacaaggaaaaaaaacagattaccacgtctcctatcacagtgaggaagaacaagaaagacgaggagcggcgtgaatcgcggatccagagctactctcctcaggcattcaaattctttatggagcagcatgtggagaatgtcctcaagtcacatcagcagagacttcatcggaagaaacagctcgaaaacgagatgatgagagtgggtctctcccaggatgcacaagaccagatgagaaaaatgctgtgtcagaaggagtccaattacataagactcaagagggccaaaatggataaatccatgtttgtaaagatcaaaaccctaggaataggggctttcggggaagtctgtctggcacgcaaggtggacaccaaagcactgtacgcgacgaagactttgcgtaagaaggacgtgctcctgaggaatcaggtggcacacgtgaaggcggaacgcgacattttggccgaggccgacaatgagtgggtggtccgcttgtattacagttttcaggacaaggacaatctttactttgtaatggactatatacctgggggtgacatgatgagtcttctgattaggatgggaattttccccgaaagcctagcaaggttttatatcgccgagctgacatgtgctgttgagtcggtgcataaaatgggctttattcatagggatatcaagcccgataacatccttatcgacagagacggccatatcaaacttacggactttgggttatgtactgggtttcgatggacccatgacagcaaatactatcagagcggagatcaccccagacaggatagcatggacttttctaacgaatggggagatccctcctcttgtagatgtggtgaccgcctgaaaccattagaacggcgagcagccagacagcatcagaggtgcttagctcattctttggttggaacacccaactatattgcaccagaggtgctcttaagaaccggctatacccaactgtgcgactggtggagtgttggcgtcatactgtttgaaatgctggtaggccaaccccctttccttgcacaaacacctctcgaaactcagatgaaggtgataaattggcaaacatcactccacatccctcctcaggccaagctgtccccagaggcatcggatcttatcatcaagttatgcagaggacccgaggaccgcctagggaagaatggagcagacgaaatcaaggcgcacccctttttcaagaccattgacttctcttccgatctccgccaacagtcagcttcctatattcctaagataacccacccgactgatacctctaattttgatccagtcgatcccgacaaactgtggtcggatgataatgaggaggagaatgttaatgacacgctcaatggttggtacaaaaatggcaagcaccctgaacacgcgttctacgaatttacatttagaaggttttttgatgataacggctatccgtacaattatccgaagccaatcgaatacgagtacattaactctcagggcagtgagcagcaatcggacgaagacgaccagaataccggcagcgagattaagaatcgagatttggtgtacgtctag

SEQ ID NO: 331103 - protein, 43 aa, Artificial Sequence [sequence omitted]

SEQ ID NO: 331104 - DNA, 1206 bp, Artificial Sequence
  derived and/or modified sequence
gagctacggtttcctccagaggtctccgcccctctgcccctatattcccagagctcgagtctgatccgggccttgccgggcaccctggaaaggcgggggtgatagtacagatggagacgcaactgcagagcattttcgaagaggtggtgaaaacggaagttatagaagaggcttttcctggcatgtttatggatactcctgaagatgagaaaagctcaaaatgacaactccaagctacagattccaatacctcattccctaagacttcaccatgagttcctgcagcagagtctaagaaataaaagtttacagatgaatgactataagattgctctattgtgtaatgcatactctacaaattcagaatgttttacattacccatgggagctctggtagaaactatttatggaaatggaattatgaggatacctctccctggaacaaactgtatggcttcaggatctattacccccttacctatgaacctcctggattcactgacagttcatgccaaaatgagccttattcacagcattgcaaccagggtgataaaacttgctcatgcaaagtccagtgtggccttggctccagccctagtggaaacttacagtcgtttattggtctatatggaaatagagtctttgggcatcaaaggatttatcagtcagcttttgccaactgttttcaaatcacatgcatgggggatcttacacacactccttgagatgtttagctaccggatgcatcatattcagcctcattacagagttcagctcctgagtcatcttcatactttggctgcagttgcacaaacaaaccagaaccagctccatctttgtgtcgagagcactgctctcaggcttataacagcattaggtagctcagaggtacaaccgcagtttacacgcttccttagtgatcccaaaacagtgctctcagcagaatctgaagaactgaaccgagccttgatattgaccttggctagagcaactcatgtaacagatttttttacaggctctgattcaattcagggaacttggtgtaaagacatacttcagaccatcatgagtttcactcctcataattgggcttcacacaccctgagctgttttccaggcccactacaggcattcttcaaacaaaataatgtgcctcaggaaagccgttttaatctgaaaaaaaatgtggaggaggagtataggaag

SEQ ID NO: 331105 - protein, 207 aa, Artificial Sequence
  derived and/or modified sequence
AAVFTVVNQCPFTVWAASVPVGGGRQLNRGESWRITAPAGTTAARIWARTGCKFDASGRGSCRTGDCGGVLQCTGYGRAPNTLAEYALKQFNNLDFFDISLIDGFNVPMSFLPDGGSGCSRGPRCAVDVNARCPAELRQDGVCNNACPVFKKDEYCCVGSAANDCHPTNYSRYFKGQCPDAYSYPKDDATSTFTCPAGTNYKVVFCP

SEQ ID NO: 331106 - protein, 58 aa, Artificial Sequence
  derived and/or modified sequence
MSGQTLTDRIAAAQYSVTGSAVARAVCKATTHEVMGPKKKHLDYLQTFFQQVLPNFEI

SEQ ID NO: 331107 - protein, 902 aa, Artificial Sequence
  derived and/or modified sequence
MSGQTLTDRIAAAQYSVTGSAVARAVCKATTHEVMGPKKKHLDYLIQATNETNVNIPQMADTLFERATNSSWVVVFKALVTTHHLMVHGNERFIQYLASRNTLFNLSNFLDKSGSHGYDMSTFIRRYSRYLNEKAFSYRQMAFDFARVKKGADGVMRTMAPEKLLKSMPILQGQIDALLEFDVHPNELTNGVINAAFMLLFKDLIKLFACYNDGVINLLEKFFEMKKGQCKDALEIYKRFLTRMTRVSEFLKVAEQVGIDKGDIPDLTQAPSSLMETLEQHLNTLEGKKPGNNEGSGAPSPLSKSSPATTVTSPNSTPAKTIDTSPPVDLFATASAAVPVSTSKPSSDLLDLQPDFSSGGAAAAAAPAPPPPAGGATAWGDLLGEDSLAALSSVPSEAQISDPFAPEPTPPTTTAEIATASASASTTTTVTAVTAEVDLFGDAFAASPGEAPAASEGAAAPATPTPVAAALDACSGNDPFAPSEGSAEAAPELDLFAMKPPETSVPVVTPTASTAPPVPATAPSPAPAVAAAAAATTAATAAATTTTTTSAATATTAPPALDIFGDLFESTPEVAAAPKPDAAPSIDLFSTDAFSSPPQGASPVPESSLTADLLSVDAFAAPSPATTASPAKVDSSGVIDLFGDAFGSSASEPQPASQAASSSSASADLLAGFGGSFMAPSPSPVTPAQNNLLQPNFEAAFGTTPSTSSSSSFDPSGDLLMPTMAPAGQPAPVSMVPPSPAMAASKALGSDLDSSLASLVGNLGISGTTTKKGDLQWNAGEKKLTGGANWQPKVAPATWSAGVPPSAPLQGAVPPTSSVPPVAGAPSVGQPGAGFGMPPAGTGMPMMPQQPVMFAQPMMRPPFGAAAVPGTQLSPSPTPASQSPKKPPAKDPLADLNIKDFL

SEQ ID NO: 331108 - DNA, 2709 bp, Artificial Sequence
  derived and/or modified sequence
atgagcggccagaccctgaccgacagaatcgccgccgcccagtacagcgtgaccggcagcgccgtggccagagccgtgtgcaaggccaccacccacgaggtgatgggccccaagaagaagcacctggactacctgatccaggccaccaacgagaccaacgtgaacatcccccagatggccgacaccctgttcgagagagccaccaacagcagctgggtggtggtgttcaaggccctggtgaccacccaccacctgatggtgcacggcaacgagagattcatccagtacctggccagcagaaacaccctgttcaacctgagcaacttcctggacaagagcggcagccacggctacgacatgagcaccttcatcagaagatacagcagatacctgaacgagaaggccttcagctacagacagatggccttcgacttcgccagagtgaagaagggcgccgacggcgtgatgagaaccatggcccccgagaagctgctgaagagcatgcccatcctgcagggccagatcgacgccctgctggagttcgacgtgcaccccaacgagctgaccaacggcgtgatcaacgccgccttcatgctgctgttcaaggacctgatcaagctgttcgcctgctacaacgacggcgtgatcaacctgctggagaagttcttcgagatgaagaagggccagtgcaaggacgccctggagatctacaagagattcctgaccagaatgaccagagtgagcgagttcctgaaggtggccgagcaggtgggcatcgacaagggcgacatccccgacctgacccaggcccccagcagcctgatggagaccctggagcagcacctgaacaccctggagggcaagaagcccggcaacaacgagggcagcggcgcccccagccccctgagcaagagcagccccgccaccaccgtgaccagccccaacagcacccccgccaagaccatcgacaccagcccccccgtggacctgttcgccaccgccagcgccgccgtgcccgtgagcaccagcaagcccagcagcgacctgctggacctgcagcccgacttcagcagcggcggcgccgccgccgccgccgcccccgccccccccccccccgccggcggcgccaccgcctggggcgacctgctgggcgaggacagcctggccgccctgagcagcgtgcccagcgaggcccagatcagcgaccccttcgcccccgagcccaccccccccaccaccaccgccgagatcgccaccgccagcgccagcgccagcaccaccaccaccgtgaccgccgtgaccgccgaggtggacctgttcggcgacgccttcgccgccagccccggcgaggcccccgccgccagcgagggcgccgccgcccccgccacccccacccccgtggccgccgccctggacgcctgcagcggcaacgaccccttcgcccccagcgagggcagcgccgaggccgcccccgagctggacctgttcgccatgaagccccccgagaccagcgtgcccgtggtgacccccaccgccagcaccgccccccccgtgcccgccaccgcccccagccccgcccccgccgtggccgccgccgccgccgccaccaccgccgccaccgccgccgccaccaccaccaccaccaccagcgccgccaccgccaccaccgccccccccgccctggacatcttcggcgacctgttcgagagcacccccgaggtggccgccgcccccaagcccgacgccgcccccagcatcgacctgttcagcaccgacgccttcagcagccccccccagggcgccagccccgtgcccgagagcagcctgaccgccgacctgctgagcgtggacgccttcgccgcccccagccccgccaccaccgccagccccgccaaggtggacagcagcggcgtgatcgacctgttcggcgacgccttcggcagcagcgccagcgagccccagcccgccagccaggccgccagcagcagcagcgccagcgccgacctgctggccggcttcggcggcagcttcatggcccccagccccagccccgtgacccccgcccagaacaacctgctgcagcccaacttcgaggccgccttcggcaccacccccagcaccagcagcagcagcagcttcgaccccagcggcgacctgctgatgcccaccatggcccccgccggccagcccgcccccgtgagcatggtgccccccagccccgccatggccgccagcaaggccctgggcagcgacctggacagcagcctggccagcctggtgggcaacctgggcatcagcggcaccaccaccaagaagggcgacctgcagtggaacgccggcgagaagaagctgaccggcggcgccaactggcagcccaaggtggcccccgccacctggagcgccggcgtgccccccagcgcccccctgcagggcgccgtgccccccaccagcagcgtgccccccgtggccggcgcccccagcgtgggccagcccggcgccggcttcggcatgccccccgccggcaccggcatgcccatgatgccccagcagcccgtgatgttcgcccagcccatgatgagaccccccttcggcgccgccgccgtgcccggcacccagctgagccccagccccacccccgccagccagagccccaagaagccccccgccaaggaccccctggccgacctgaacatcaaggacttcctgtag

SEQ ID NO: 331109 - DNA, 2709 bp, Artificial Sequence
  derived and/or modified sequence
atgagtggccagacactgacagacaggattgccgcggcccagtacagcgtgacggggtcagctgtagctcgtgctgtgtgtaaagccactacacacgaggtgatgggaccaaagaaaaagcacctggattatctgatacaggctacaaatgaaaccaacgtgaacatcccacagatggcagatacactctttgagagggctacgaatagttcatgggtcgtggtgtttaaggccctggttacaacccatcatcttatggttcacggcaatgaacgtttcatacagtacctcgcttctcgaaacacattatttaatctcagcaattttctggacaaatccggcagtcacggctatgacatgagcacttttattcgcaggtacagccgatatctgaacgaaaaagcgttttcctacagacaaatggcctttgattttgccagagttaagaagggagcagatggggtgatgagaacaatggcccctgagaagcttttgaagagtatgcctatcttgcagggccagattgacgcgctgctcgagtttgacgtgcatcctaatgagcttaccaatggagtgattaacgccgccttcatgctgctgtttaaggatctgatcaagctgtttgcctgctataacgatggcgtgattaatcttctcgaaaagttttttgaaatgaagaaggggcagtgcaaggatgctttggagatctacaaaagattccttaccagaatgacacgcgtgagcgagttcttgaaggttgccgagcaggtcggcattgacaagggcgacataccagacctcacacaggcccctagtagccttatggagacgctagaacaacacctgaacacactcgagggcaagaaacccggcaataacgaaggttctggtgctcccagtcccctttcaaagtcttcacctgccaccactgtgaccagcccgaacagcacaccggctaagacaatagacacttctccacctgtggatcttttcgcaactgcttcagccgcagtgccagtcagcacctctaaaccttcctctgacctgctggatctgcaaccagatttctccagcggcggggcagccgcagccgctgcacccgcccctccgccacccgctgggggggcaacagcctggggggacctcctgggagaagactctctcgcagccctcagctcggtacctagcgaggcacagatcagtgatccattcgctccggagcccaccccccctaccactacggctgagattgcaaccgccagcgcatcagcttccaccacaaccaccgtcaccgcggtaacggccgaagtggatctattcggggacgcctttgccgcgagtccaggggaggcgcctgccgcctcggagggtgcagctgctcctgctaccccaacaccagtggcagccgcactggatgcctgcagcggcaacgacccattcgcccccagtgaaggctccgcagaggccgcacccgagctcgacttgttcgctatgaagccaccagagacgtccgtgccagttgtgacgcccactgcttcaacagcgccccccgttcctgctacggcaccctcccccgcgccagccgtggctgcggcagccgcagctaccaccgccgcaaccgctgccgcaaccactacaactactacatcagctgcaacagccaccacagcccctccagctttggacattttcggagatttattcgagtccacccctgaagtggctgctgcacccaaaccagatgctgcaccctctatagacctgttctccacagacgccttttcatccccccctcagggagcgtccccagtacctgaaagctcgctgaccgctgacctcctaagcgtggacgcttttgctgcgccatcccctgccacaaccgcgagtcccgccaaagttgattcatctggggtgatagacctattcggcgacgcctttggcagctcagcgtcggagccccaaccagccagccaggccgccagttcttctagtgctagcgctgacttgctggctggctttggcggttctttcatggctccatcgccctctcccgtgacccccgcacagaataacttacttcagcccaatttcgaggccgcctttggaaccaccccgagcacttcgtcttctagttcgttcgatcccagcggggatctcctgatgccaaccatggctcctgctggccagccagcgccggtgtcaatggttcctccctcacccgccatggccgcctctaaggccttgggctccgacctcgatagctccctcgccagcctggtcgggaatttagggataagcgggacaacgaccaaaaagggtgacctccaatggaatgcaggggaaaagaagcttaccggaggtgctaactggcagcctaaggtcgcccccgctacttggagtgccggggttccacccagtgccccactacagggcgcagtccctcctaccagttccgtgccgccggtcgccggtgccccttcggtcggacagcccggagccggttttggcatgcctcctgctgggaccggtatgccaatgatgcctcagcagccagtaatgttcgctcagcctatgatgagaccgccattcggagctgctgctgtcccaggaacccaactctcgccaagcccgacacctgcgtctcagagtcctaaaaagccccccgctaaggacccccttgccgacctcaacatcaaggatttcctttag

SEQ ID NO: 331110 - DNA, 2709 bp, Artificial Sequence
  derived and/or modified sequence
atgtcaggccagacgctgacagatagaatcgctgctgcgcaatacagtgttactggatccgcagtggcacgtgctgtatgtaaggctacgactcatgaagttatggggccgaagaaaaagcacttagactatttgatccaggcaacaaacgagacaaatgtcaatatccctcagatggccgacacgctattcgaaagagccacaaatagttcctgggtggttgtgtttaaggctctcgtgacgactcaccacctgatggtccatgggaatgaacgcttcatccagtatctcgccagtagaaatacactcttcaatctgtctaactttctagacaaatcaggcagccacggatacgacatgtcaacattcatccggcgctattcccgctaccttaacgagaaagccttctcctatcggcagatggcgttcgacttcgctcgggtaaaaaagggtgccgatggagtgatgcggacaatggccccagagaagttgttaaagagtatgcctatcttgcaggggcaaatcgacgccctactcgagttcgacgtccatcccaatgaattgactaacggtgttattaacgccgcgttcatgctgctgttcaaagacttaataaagctgtttgcatgttacaacgacggcgttataaacctgctagaaaagttttttgaaatgaaaaaaggacagtgcaaggacgccttggaaatctacaaacggtttttaacccgtatgacgagggttagcgagtttctgaaggttgccgaacaggtgggcatcgataagggcgatattcccgacctgacccaggccccttccagccttatggagactctggaacagcacctcaatacactggaaggcaaaaagcccggcaacaacgaggggagcggggctccgtcccctttgtccaagagctcacccgctacaactgtcaccagtccgaactcgaccccagctaaaacaattgacacatcacctcctgtggacctgttcgcgaccgcatctgctgctgtgccagtaagcacatccaagcctagtagcgacctcctggatttgcagcccgatttttctagcggaggtgcagctgctgccgcagcgcctgccccccccccgcccgccgggggtgctacagcctggggggacctgctcggtgaggattcactcgccgctttgagcagcgtcccgagcgaagcgcagatctcagacccatttgctccagaaccgaccccgcccaccactacagctgaaattgctaccgcctctgcgtccgcctccacgactaccacggtgacagcggtcacggcggaagtggacctttttggggacgcattcgccgcatcaccgggcgaggcacccgcggcctccgaaggggctgccgcacccgctacccccacgcccgtggccgccgccctggacgcctgctccgggaacgatccctttgcacctagcgagggctccgccgaggccgcacccgaactggatctgtttgcaatgaagcctcccgagacaagcgtgcccgtcgtgactccaacagcctcaactgccccgcctgtccctgctacagcgccatctcccgctccagctgtggccgccgcagcagcagccaccaccgctgccacggcagcagcaactactactaccacgacatccgctgcaacagcgacaacggctccccccgctctggacattttcggggatcttttcgaatctaccccggaggtggcggcagcgcccaagcctgatgccgctccatcaattgacctgttttctacagacgctttcagtagtccacctcagggggcatcccctgttcctgagtcttctctgacggcagatttactgagtgttgacgctttcgcagcaccttcacctgcgacaacggcctcgcccgcaaaggtagacagctccggggtgatcgatctctttggtgacgcctttgggagctcggccagcgagccacagcctgcttcacaggcggcttcgtcaagcagtgcatcagcggacctgctggccgggttcgggggatccttcatggcccccagcccctctcccgtgactccagctcagaataatcttcttcagcctaactttgaagccgccttcggcactaccccttccacctcctcgtcatctagcttcgatccaagcggtgacttgctgatgcccaccatggcccccgccggccagcctgccccagtgtccatggtccctccatcccctgcaatggctgcaagtaaggccctggggagcgacctggattcttcacttgcctctcttgtcggaaatctcggtatctccggcaccaccaccaaaaaaggggacctacaatggaacgccggcgagaagaaactgacggggggggccaattggcagcctaaggtcgcccccgctacatggagtgcaggagtgccaccctctgcacccttacaaggcgcagtacctcccacctcatcagtgcctcccgtcgccggggccccatccgttggtcagcctggcgctggcttcggaatgcctcccgcgggaaccggtatgcctatgatgccccagcagcccgtcatgtttgcccaacctatgatgcggccgcctttcggcgccgctgccgtgccagggacacagctgagcccctctcctacgcccgctagccagagcccaaagaagcctccggccaaagatcccctggccgacctgaacattaaggactttctgtag

SEQ ID NO: 331111 - DNA, 2709 bp, Artificial Sequence
  derived and/or modified sequence
atgagcggccagaccctgacagacagaattgctgctgcccagtacagcgtgacaggcagcgctgtggcccgggctgtgtgcaaggccaccacccatgaggtgatgggccccaagaagaagcacctggactacctgatccaggccaccaatgagaccaacgtgaacatcccccagatggctgacaccctgtttgagcgggccaccaacagctcctgggtggtggtgttcaaggccctggtgaccacccaccacctgatggtgcacggcaatgaacgcttcatccagtacctggccagcaggaacaccctcttcaacctgagcaacttcctggacaagagcggcagccacggctatgacatgagcaccttcatccgccgctacagccgctacctgaatgagaaggccttctcctaccggcagatggcctttgattttgcccgggtgaagaagggagcagatggagtgatgaggaccatggcccctgagaagctgctgaagtccatgcccatcctgcagggccagattgatgccctgctggagtttgatgtgcaccccaatgagctgaccaacggggtcatcaatgctgccttcatgctgctcttcaaggacctgatcaagctgtttgcctgctacaatgatggagtcatcaacctgctggagaagttctttgagatgaagaagggccagtgcaaggatgccctggagatctacaagcgcttcctgaccaggatgaccagggtgtctgagttcctgaaggtggccgagcaggtgggcatcgacaagggggacatcccagacctgacccaggcccccagcagcctgatggagaccctggagcagcacctgaacaccctggagggcaagaagccaggcaacaatgaaggcagcggggcccccagccccctgagcaagagcagccctgccaccaccgtgaccagccccaacagcaccccagccaagaccatcgacaccagcccccctgtggacctgtttgccacagccagcgctgctgtgcctgtgtccaccagcaagcccagcagtgacctgctggacctgcagcctgacttcagcagcggcggcgctgctgctgctgctgccccagcccctcctcctcctgctggaggagccacagcctggggagacctgctgggggaggacagcctggccgccctgagctctgtgcccagcgaggcccagatcagtgacccctttgcccctgagcccaccccacccaccaccacagctgagatcgccacagccagcgccagcgccagcaccaccaccaccgtgacagctgtgacagctgaggtggacctgtttggagatgcctttgctgccagccctggagaggccccagctgccagcgagggcgctgctgccccagccacccccacccctgtggccgccgccctggatgcctgcagcggaaatgacccctttgcccccagcgagggcagcgctgaggccgcccctgagctggacctgtttgccatgaagcccccagagacctctgtgcctgtggtgacccccacagccagcacagcccctcctgtgcctgccacagcccccagccctgccccagctgtggccgctgctgctgctgccaccacagctgccacagctgctgccaccaccaccaccaccaccagcgctgccacagccaccacagcccccccagccctggacatctttggagacctgtttgagagcaccccagaggtggccgccgcccccaagccagatgctgcccccagcattgacctcttcagcacagatgccttcagcagccccccccagggcgccagccctgtgcctgagagcagcctgacagctgacctgctgtctgtggatgcctttgctgcccccagccctgccaccacagccagccctgccaaggtggacagcagcggcgtgattgacctgtttggagatgccttcggcagcagcgccagcgagccccagcctgccagccaggccgccagcagcagcagcgccagcgctgacctgctggccggctttggaggcagcttcatggcccccagccccagccctgtgaccccagcccagaacaacctgctgcagcccaactttgaagctgccttcggcaccacccccagcaccagcagcagcagcagctttgaccccagcggggacctgctgatgcccaccatggccccagctggccagcctgcccctgtgtccatggtgccccccagccctgccatggccgccagcaaggccctgggcagtgacctggacagcagcctggccagcctggtgggcaacctgggcatcagcggcaccaccaccaagaagggggacctgcagtggaatgctggggagaagaagctgactggaggagccaactggcagcccaaggtggccccagccacctggagcgctggggtgccccccagcgcccccctgcagggcgctgtgccccccaccagctctgtgccccctgtggccggggcccccagcgtgggccagcctggagctggcttcggcatgcccccagctggcaccggcatgcccatgatgccccagcagcctgtgatgtttgcccagcccatgatgaggcccccatttggagctgctgctgtgcccggcacccagctgagccccagccccaccccagccagccagagccccaagaagcccccagccaaggaccccctggccgacctgaacatcaaggacttcctgtag

SEQ ID NO: 331112 - DNA, 2709 bp, Artificial Sequence
  derived and/or modified sequence
atgagcggccagaccctgaccgaccggatcgccgccgcccagtactcggtcacagggtctgccgtggcaagagcggtttgtaaggctactacgcatgaggtcatgggcccgaagaagaaacacctggactacctgattcaggccacaaatgagaccaacgtgaatatccctcagatggctgatactctgtttgagcgcgctacaaattcgagctgggtcgtagtgtttaaggctctggttactactcaccacttgatggtacacggcaacgagcggttcatccaatacctagctagcagaaacaccctgtttaatcttagcaattttctggataagagcggttctcatggctatgacatgtccaccttcatccggcgttactctcggtatcttaatgagaaagccttctcttaccgtcagatggcattcgacttcgcacgtgtgaagaaaggcgcggatggagtcatgcgaactatggctcctgagaaactattgaaatccatgcctatcctgcagggccaaattgacgctctccttgagttcgatgtccatcccaacgagctcactaacggggtgattaacgctgcttttatgttgctcttcaaagatcttatcaaactgttcgcctgctacaatgacggcgtaatcaatctgctggagaagttttttgagatgaagaagggccaatgtaaggacgccctggaaatctataagcgcttcctcacaagaatgactcgcgtgtccgagtttcttaaggttgctgagcaggtgggcatagacaaaggagacatcccagacctgactcaggctcctagctcattgatggagactctggagcagcacctcaacactctggaaggcaagaaaccaggcaacaatgaggggtccggagcacccagtcccctatctaagtcttctcccgcgaccactgtgactagcccaaacagcacgccggctaaaacgatcgataccagcccaccagtggatctcttcgctactgccagcgctgctgttcctgttagtaccagcaaaccttcctccgatctcttagatctgcagcctgacttttcatctggtggagccgccgccgctgctgcaccagccccaccgccaccggctgggggtgctacagcctggggtgatcttctcggcgaagacagtctggcagctctgagtagcgtgccgagcgaagcacagatatcagaccctttcgctccagagccaacgcctcctactaccactgcagagatcgctactgccagcgcttccgcatccacaaccaccacagtgaccgcagtcacagccgaagtggacctgttcggcgatgcatttgctgcctcccctggcgaggccccagccgcctctgagggtgcagccgctcccgctactcccacccccgttgccgcggcactggatgcgtgctcaggcaatgaccccttcgcaccttcagaaggaagcgccgaggctgcacctgagctcgacctgtttgctatgaaacctcccgaaacatcggtgccagtggtgacgcctacagctagtaccgctccccctgtgcccgctaccgccccgtcacctgctcccgccgtggcagcagccgccgctgctaccaccgcagccacagccgcggccacaactaccaccacaacgtcagctgcaaccgccaccaccgctcctccagccttagatatcttcggtgacctctttgagtccacccctgaggtggcagccgcgcccaaacccgacgcagcaccatctattgatctcttcagtacagacgcgttctcttccccaccccagggtgccagccctgtgccagagtcttcgctcactgccgacttactatctgtcgacgctttcgcagcaccctcaccagcgacgacggccagtcccgcaaaagtagactcctccggggtcatagacctgtttggagatgcttttggaagttctgctagcgaaccccaaccggcttcacaggccgcttcttctagttcagcttcagcggatcttctggcaggatttggcggcagctttatggcaccttcaccaagcccggttacaccggcccagaacaacctcctacagccaaatttcgaggcagcattcggaactacgcctagcacctctagctccagcagtttcgatccctctggggacctccttatgccgaccatggcccctgcaggccagccggctcccgtgtccatggtgcccccatctcccgccatggcagcctcaaaagcgttgggatcagatttggattcctccctcgccagcctagtgggcaatctcgggatttctggaactacaacaaagaagggtgatttgcagtggaatgcaggggaaaaaaaactgactggcggagcaaattggcagcccaaggtggcccccgcaacatggtctgctggggtccccccttctgccccgctgcagggcgctgtgccgcctacctcctccgtacctccggtggctggggcaccgtccgtcggacagcctggagccggtttcggcatgcctccagcagggaccgggatgccaatgatgcctcagcagcccgtgatgttcgcccagcccatgatgagacccccgtttggtgctgccgccgtaccggggacccaactttccccctcacccacccctgcgtcacaatcccctaagaagcctcccgctaaagacccccttgcggatttaaatattaaggatttcctctag

SEQ ID NO: 331113 - DNA, 2709 bp, Artificial Sequence
  derived and/or modified sequence
atgagcggccagaccctgaccgaccggatcgccgccgcccagtacagtgtgacagggagcgcagtcgctagagctgtttgcaaggcaaccactcatgaggtcatgggcccaaagaaaaagcacttagattatttaatccaggcaacaaacgaaactaacgtgaacatccctcagatggcagacacactcttcgagagggcgacaaactctagctgggtggtcgtgtttaaagcgctagttacaacccatcaccttatggtgcacggcaacgagcggttcatccaatatctcgcctctagaaacacactctttaatcttagtaattttctggacaaatcaggctctcatgggtatgatatgagtacgttcatacggcgctactcaaggtacctcaacgagaaggctttctcttatcggcagatggcatttgatttcgctagagttaaaaaaggtgccgacggcgtgatgcggacaatggctcccgagaagttactgaagtctatgcctattctgcaggggcagattgatgctttattagagtttgacgtacaccccaacgaacttaccaacggagtgatcaacgccgcctttatgctactgttcaaagacctcattaagttattcgcttgttacaatgacggggttatcaatctgctagagaaattcttcgaaatgaaaaagggacagtgcaaagacgcactcgaaatctataagcgatttctcacgagaatgacccgggtctccgagtttctgaaggttgctgaacaggtggggatcgataagggcgatattcccgacctgactcaggcgccatctagcttgatggagaccctggagcagcacctgaacactctcgagggcaagaagccggggaacaatgagggaagcggagctcctagcccccttagtaagagtagcccagcgactactgtcacctccccaaactctacccccgccaagaccattgatacctctcctcctgtggacctgttcgctacggcaagtgccgcagtaccagtcagtacaagcaaaccttctagcgatttactcgacttacagcccgatttctcctcagggggggctgctgctgccgctgcaccagccccacccccccccgctggcggtgccaccgcctggggggacttactgggagaagactcccttgcagccctgagctccgtgccgagcgaggctcagatatctgaccccttcgcgcctgagccgacaccccctacgacaaccgctgagattgcaaccgcttctgcgagcgcctcaactacaaccacagtaacagccgtgaccgctgaggtcgacctgttcggagacgcattcgctgcttcccccggtgaggcaccggccgcctcggagggggccgctgcaccggcaactccaacacccgtggcggcagccctagatgcttgctcgggaaacgatccttttgcgccctccgagggtagcgccgaagcggccccggagctggatctgttcgccatgaaacctcctgagacaagtgtcccggttgttactccgactgcttcaaccgcacctccagtgcccgctaccgcacccagccccgcccctgccgtagcagcagccgcagcagccaccaccgccgcaactgccgcagctacaactaccacaaccacctccgcggccacagccaccacggcgccgccagcattagacatcttcggagacctgtttgagagtacgcccgaagtggcggcagctcccaaaccagacgctgcgccaagcattgacctgttctctaccgacgcattttccagcccaccccagggagcatcccccgttcctgaaagtagcctgacggccgatttgttaagcgttgacgccttcgccgctcccagtcctgccaccactgcctcccccgctaaggtggacagtagtggcgtcattgatctgttcggagatgctttcggatcctccgctagtgagcctcagcctgcttcccaggctgcatcatcgagcagcgcaagtgcagacctcctggcaggctttggcggcagttttatggctccgtctccctcccccgttactccagcacagaataatctgttgcagcccaactttgaagcagccttcgggacaacaccttccacgagctccagtagcagttttgaccctagcggggacctgctgatgcccaccatggcgccagcaggccagcctgcccccgtgtccatggtgccgccatctccagccatggccgcttcaaaggctctgggctccgacctcgattcatccttagcaagcctcgtgggcaatctaggaattagtgggaccaccaccaagaagggggatttacagtggaacgctggtgagaaaaagttgacaggaggagccaattggcagcctaaggtggcaccagccacctggtccgccggcgtccccccttccgcccccctgcagggagccgtgccccctacaagcagtgtgccacctgtagccggtgctccttccgtgggccagccaggcgcaggattcggaatgccacccgccggcacgggcatgcctatgatgccccagcagcccgtgatgttcgcccaaccaatgatgagacccccattcggcgcagccgctgtgccaggcacccagctgtctccttctcccactccggcttctcagtctccgaaaaaaccacccgcaaaggatccgttggccgatctgaacatcaaagacttcctttag

SEQ ID NO: 331114 - DNA, 2709 bp, Artificial Sequence
  derived and/or modified sequence
atgagcggccagaccctcactgaccgcatagcagcagctcaatactccgtgacgggcagcgccgtagcacgggcagtatgcaaagctaccacccacgaagtgatgggcccaaaaaagaagcaccttgattacctgattcaagctaccaacgagactaacgtgaacatccctcagatggccgatacactgttcgaacgggcaaccaatagctcgtgggtggtagtcttcaaggccctagtgacgactcaccacctaatggtccacggtaatgaaagattcattcaatacctagcgtcccgcaatactctgtttaacctctcaaactttcttgacaaaagcggatctcatggctatgacatgagcacctttatccgaagatattccagatatcttaatgaaaaggcattctcttacagacagatggcctttgactttgcacgcgttaagaagggggctgatggcgtgatgagaaccatggccccagagaaactgctcaagtctatgccaattttacaggggcagatcgatgcacttctggagtttgatgtgcaccccaacgaactaaccaacggggtaattaacgccgcattcatgctcctcttcaaggatttgattaaactcttcgcctgctataatgatggtgttattaacctgctggagaagttttttgagatgaagaagggccagtgcaaggacgctttagaaatctacaaacggtttctgacacggatgacacgtgtttcggagttcctcaaggtggccgagcaggtgggcatcgacaagggagatatccctgatctgacccaggcacctagcagcttaatggagactctcgagcagcacctgaacacactcgagggtaagaaacccggaaataatgagggttctggcgctccaagccccctgtcgaaatctagtcctgctaccaccgtcacaagccctaattctacccccgcaaaaacaattgatacatcacctccagtagacctattcgccaccgcctctgcggcagtgcctgtgagtacaagtaagccgtcttcagatcttctggatctgcagccagacttctcatccggtggcgctgcagctgccgcagcccctgctccgcctcccccagctggcggagctactgcttggggcgatctcctaggtgaggactctctggctgcattgagcagcgtaccatctgaggctcaaatatctgatccttttgccccagagccaacccccccaacgacgacagctgagattgccactgccagtgcctctgctagcactacaacgacggtgaccgccgtgaccgctgaagtcgacctgtttggtgatgcatttgctgcctcccctggggaggcccctgccgcatccgagggagcagcagctcctgctacaccaaccccagtggcagcggcactggatgcatgttctggcaatgacccatttgccccatcagagggaagtgctgaggctgctccggaattagatttgtttgcaatgaaacctccagaaacaagcgtgccagtggtcaccccaactgctagcaccgcacccccagtcccagctaccgcacctagcccggcacctgctgttgccgctgccgctgccgcaacaactgcggctacggctgcagccacaacaactacaactaccagtgccgctaccgctactaccgctcctccggcactcgacatctttggcgatctattcgaatctacgcccgaggtggccgcagctccgaaacccgacgctgcgccatccattgaccttttttccacagatgcattttcaagcccacctcagggagcttccccggtacccgagtcttctctgacagctgacctgctttcggtggacgccttcgccgctccatcaccggcaacaaccgcttctcccgctaaggttgatagctccggagtgatcgacctgttcggagatgctttcgggagttctgcctctgagccccaacccgcttcacaggccgcttcctcttcatccgcatcagcggaccttctagccggtttcggaggaagcttcatggctccttcgccatctcccgtcactccagcacaaaataacctcctgcagcctaatttcgaagcggcttttggtacgacacccagcacttctagctcttcgagcttcgatccctccggagacctactgatgcctactatggctcctgccggacagcctgccccagtgagcatggtgccccctagccccgcaatggccgcttcaaaggcccttgggtcggatctggatagttcccttgcttctctggtaggtaaccttggcatcagcggaaccacgacaaagaaaggggacctgcagtggaacgccggtgaaaaaaagctgacagggggagcgaactggcagcccaaagtggcccctgcaacctggtcggccggtgtgcctccctctgccccacttcagggcgcagtgccccctaccagctccgtgcccccagtggcaggcgctccatctgtcggtcaacctggggcagggtttggcatgcccccagcaggcacggggatgcccatgatgcctcagcagcctgtcatgtttgcccagccaatgatgcggcctccttttggtgccgctgccgttcccggtactcagttatccccatctcccacaccagcgagtcagagccccaaaaagcctccggctaaagaccctctcgcggatctgaacatcaaagacttcttgtag

SEQ ID NO: 331115 - DNA, 2709 bp, Artificial Sequence
  derived and/or modified sequence
atgagtggtcagaccctgactgatcggatcgccgctgcacagtatagcgtcacgggatcagccgttgctcgggcagtgtgcaaggccactacccacgaggtgatggggccaaaaaaaaagcatcttgactacttaatccaggccaccaatgagacgaacgtgaacataccccagatggccgataccctgtttgagcgtgcaaccaactcctcttgggtggtagtgtttaaagctctggtcaccacgcatcacttaatggttcacggcaatgagagattcatccagtacctggccagtcgcaatacgctcttcaatttgtccaatttcctcgacaagtccggatcgcacggctatgacatgagcacattcattcgacggtattctagatatctaaacgaaaaagcgttttcctaccggcagatggcctttgatttcgcgcgagttaaaaaaggcgctgacggcgtgatgcgtaccatggctcccgagaaactattgaagagcatgccaatccttcagggtcagatcgacgcccttctcgagtttgatgtccatccaaacgagttaacaaacggtgtgatcaacgccgcattcatgctcctttttaaggatctgattaagttgttcgcctgctacaacgatggagtaataaatctcctcgaaaaattttttgaaatgaaaaaagggcagtgcaaagacgcactggaaatctacaaacggttcttaacgagaatgactcgagtttcagagttcctgaaagttgccgagcaggtaggaatcgacaaaggggacatccccgacctcactcaggctccttcatctctgatggagactttggaacagcatcttaacactttggagggaaagaagcctggtaataacgagggttctggggctcctagccctctgtccaagagcagccctgctaccacagtaacgagccctaactccacacccgcaaaaacgattgatacgtcacccccagtggacctgtttgcaactgccagcgccgctgtcccagtaagcactagtaagccgagtagtgacttgctggacctgcagcccgatttctcgtctggcggagcagccgctgccgctgctcctgcccctcccccacccgctggtggtgccacagcttggggcgacttactgggcgaagacagtctggcagccctgtcaagcgtgccgagcgaagctcagatttctgacccattcgccccagagcctacccccccaactaccaccgctgaaattgccacggcttccgcctctgcttccacgaccacaacagtgacagccgtgactgcagaggtcgatctttttggcgatgctttcgcagcttctcccggagaggcaccggctgcatccgaaggggcagccgctccagccactcccactccagtggctgctgccctcgatgcatgttctgggaacgatccgtttgctccatccgaaggctcagccgaggccgcacccgaactggacctttttgcgatgaagccgcctgaaactagtgtcccggtggtcactccaaccgcaagcaccgctccacctgttcccgctaccgctccctcacccgctccagccgttgccgcagcagccgcagctaccacagcagccacagctgcagcgaccactaccacaacaacgtccgccgcaacagccaccaccgccccacctgctctagacatctttggtgacctgttcgagtctactccggaagtcgccgcagcgcctaaacccgatgctgcaccttccatcgaccttttctccaccgacgcattttcgtcaccgccacagggtgctagcccagtgccagaatcctcactgaccgcagatttgctgagcgtcgatgcattcgcagccccaagcccagccaccactgcctctcctgccaaggttgattcctccggagttatagacttattcggagacgccttcgggtcaagcgccagcgaacctcagccagcctcccaggccgcaagtagctcaagcgcctctgctgatttgttagccggatttggcggttcttttatggccccaagcccatcaccggtgactcctgcccaaaataacctgctgcagcctaatttcgaggctgccttcggaaccacgcctagcacttctagttcatcctccttcgatccaagcggcgacctgctgatgcccactatggcaccagccggacagccagcccctgtgagcatggtacctccatcgcccgctatggccgcttccaaggccttgggatctgatctggacagtagcctggcctcgctagtggggaatctaggcattagtgggacaaccacaaagaagggcgatctccagtggaacgcaggggaaaagaagcttactggcggagcgaattggcagcccaaagtagctccggctacctggagcgccggtgttcccccatctgctcccctgcagggcgctgtcccaccgacctctagtgtcccccctgtagctggggcacctagcgtcggccagcctggcgctggcttcggaatgccacccgctgggacaggaatgcctatgatgccacagcagcccgtgatgtttgcacaaccaatgatgcgaccaccttttggcgcagctgccgtgccaggcacacagctaagtccgagccctactccagcttctcagtcacccaagaagcctcccgcaaaggatccacttgcggatctgaacattaaggacttcctctag

SEQ ID NO: 331116 - DNA, 4434 bp, Artificial Sequence
  derived and/or modified sequence
agctgaggtgggggcggggatggggacgcagctcggagcgctagagagacgcggcggcgctggcagaagaggcggcggcgggcgggtactggcttctggggccaggggccaggggcggtgggcgccgggaccgcggagctgaggagcggggcccggccagggctggagactttgcgcccgggggcaccggggctacgcgcggtcgcacacatccaccggcgcggcttccctcggcggcccgggctccgctcatcctgcggcgggcggcgccgctcaggggcgggaagaggaggcggtagacgcgaccacagaagatgtcgggccaaacgctcacggatcggatcgccgccgctcagtacagcgttacaggctctgctgtagcaagagcggtctgcaaagccactactcatgaagtaatgggccccaagaaaaagcacctggactatttgatccaggctaccaacgagaccaatgttaatattcctcagatggccgacactctctttgagcgggcaacaaacagtagctgggtggttgtgtttaaggctttagtgacaacacatcatctcatggtgcatggaaatgagagatttattcaatatttggcttctagaaatacactattcaatctcagcaattttttggacaaaagtggatcccatggttatgatatgtctaccttcataaggcgctatagtagatatttgaatgaaaaggctttttcttacagacagatggcctttgattttgccagggtgaagaaaggggccgatggtgtaatgaggacaatggctcccgaaaagctgctaaagagtatgccaatactacagggacaaattgatgcactgcttgaatttgatgtgcatccaaatgaactaacaaatggtgtcataaatgcagcatttatgcttcttttcaaagatcttatcaaactttttgcttgctacaatgatggtgttattaacttactcgaaaagttttttgaaatgaagaaaggacaatgtaaagatgctctagaaatttacaaacgatttctaactagaatgacacgagtgtctgaatttctcaaggttgcagagcaagttggtattgataaaggtgacattcctgacctcacacaggctcccagcagtcttatggagacgcttgaacagcatctaaatacattagaaggaaagaaacctggaaacaatgaaggatctggtgctccctctccattaagtaagtcttctccagccacaactgttacgtctcctaattctacaccagctaaaactattgacacatccccaccggttgatttatttgcaactgcatctgcggctgtcccagtcagcacttctaaaccatctagtgatctcctggacctccagccagacttttcctctggaggggcagcagcagccgcagcaccagcaccaccaccacctgctggaggagccactgcatggggagaccttttgggagaggattctttggctgcactttcctctgttccctctgaagcacagatttcagatccatttgcaccagaacctacccctcctactacaactgctgaaattgcaactgcctcagcttctgcctccactactacaactgttactgctgtcactgctgaagtggatctctttggagatgcctttgcagcttctcctggggaggcccctgcagcatccgaaggggccgccgcaccagctaccccaacccctgtagcagcagcacttgatgcatgttcaggaaatgacccctttgccccgtctgaaggtagtgcagaggctgcacctgagctggacctctttgcaatgaagccacctgagaccagtgttcctgtagttacccctacagctagcacagcccctccagttcccgcaactgctccttctcctgctcctgccgttgcagctgctgctgctgccactactgctgccaccgccgctgccaccaccactaccaccacctccgctgccaccgccaccactgctcctcctgctctagatatctttggtgatttatttgagtccactcctgaagttgctgcagcgcctaagccagatgctgctcctagcatagacctgtttagtacagatgctttctcctctccaccacaaggggcctctcctgtgcctgagagttctctcactgctgacctcttatctgtggatgcatttgcagcaccatctcctgcaaccactgcctcgccagcaaaggtggattcttcaggtgtcatagacctttttggggatgcatttggaagtagtgcttctgaaccccaacctgcatctcaggctgcttctagttcatcagcatcggcagacctactagctggatttgggggttctttcatggcgccttccccatctccagtgactccagctcagaataacctgctacagcccaattttgaggcagcttttgggacaacgccttcaacttccagcagcagctcctttgatccatcaggtgatcttttgatgccaaccatggcaccagctgggcagcctgcacctgtctcaatggtaccacccagtcctgcaatggcagccagcaaagcccttggaagtgatcttgattcatctcttgccagcttagtaggcaatcttggaatttctggtaccacaacaaaaaagggagatcttcagtggaatgctggagagaaaaagttgactggtggagccaactggcagcctaaagtagctccagcaacctggtcagcaggcgttccaccaagtgcacctttgcaaggagctgtacctccaaccagttcagttcctcctgttgccggggccccatcggttggacaacctggagcaggatttggaatgcctcctgctgggacaggcatgcccatgatgcctcagcagccggtcatgtttgcacagcccatgatgaggcccccctttggagctgccgctgtacctggcacgcagctttctccaagccctacacctgccagtcagagtcccaagaaacctccagcaaaggacccattagcggatcttaacatcaaggatttcttgtaaacaatttaagctgcaatatttgtgactgaataggaaaataaatgagtttggagacttcaaataagattgatgctgagtttcaaagggagccaccagtaccaaacccaatacttactcataacttctcttccaaaatgtgtaacacagccgtgaaagtgaacattaggaatatgtactaccttagctgttatccctactcttgaaattgtagtgtatttggattatttgtgtattgtacgatgtaaacaatgaatggatgttactgatgccgttagtgcttttttggacttcacctgaggacagatgatgcagctgttgtgtggcgagctatttggaaagacgtctgtgtttttgaaggtttcaatgtacatataacttttgaacaaaccccaaactcttcccataaattatcttttcttctgtatctctgttacaagcgtagtgtgataataccagataataaggaaaacactcataaatatacaaaactttttcagtgtggagtacatttttccaatcacaggaacttcaactgttgtgagaaatgtttatttttgtggcactgtatatgttaagaaattttattttaaaaaatataaaggttaacgtccataataaatacttctctttgaagctaccttatcaagaacgaaaaatcgtatgggaagaatcccctatttatcactgctatattaaaatatatatattttaattatatttgacaggttttgcatctaaattgacctatttattcattcttgattaaatgcactgaaaagtaaagggtctgtttgtgtcatgttcatgaaaatgcggttagagaggtgctattcaagtgattctgaaggcaccccaaggtatatctgtaatttaaagattactgcaaatatctttactttactgtgggtttttagtacatctgttaatttagtgtttctttgtgtgttttgtagactagtgttcttccatccttcaactgagctcaaagtaggttttgttgtaacattgtgattaggatttaaactaattcagagaattgtatcttttactgtacatactgtattctttaagttttaatttgttgtcatactgtctgtgctgatggcttggcttaagattttgatgcataaatgaggtcactgttgatcagtgttgctagtagcttggcagctcttcataaaagcatattgggttggaaaggtgtttgcctatttttcaaattatttaatagatgtatggtaccatttaaaagtggttgtatctgaatttactgtggggataacatacactgtaatggggaaaaattacctaaaaccaatttcaaaatggctttctttgtatttcagtttaaaaacccagtgcatgtacgccctctgagatgcaataaacaccttgaacaaagaaatgcaaa

SEQ ID NO: 331117 - DNA, 4521 bp, Artificial Sequence
  derived and/or modified sequence
gagacaagcggaggagcctgaggagctgaagacgcacaggtgacggtcgcggatggccggcaggatctgacatttaaaatcgccctgctcatctgggcctcggagcctttgacaggcgggcgtgtcagcgacagtgtggggaaggggctgggctccgccaggcagcgcgcgacgacgcccttgccttggccttcacagagtagaacccgagaagcccactcgcccgtcttggccaacgcccccaacgcccagggctccccccgcagtcggcgggcaggtgtgcgtggtgcgcgagcccagtgcgtgccgggtgcggcgccagcagcggaggggcggcccggcgcccagcggagagccgctggctggaagaggaggcggtagacgcgaccacagaagatgtcgggccaaacgctcacggatcggatcgccgccgctcagtacagcgttacaggctctgctgtagcaagagcggtctgcaaagccactactcatgaagtaatgggccccaagaaaaagcacctggactatttgatccaggctaccaacgagaccaatgttaatattcctcagatggccgacactctctttgagcgggcaacaaacagtagctgggtggttgtgtttaaggctttagtgacaacacatcatctcatggtgcatggaaatgagagatttattcaatatttggcttctagaaatacactattcaatctcagcaattttttggacaaaagtggatcccatggttatgatatgtctaccttcataaggcgctatagtagatatttgaatgaaaaggctttttcttacagacagatggcctttgattttgccagggtgaagaaaggggccgatggtgtaatgaggacaatggctcccgaaaagctgctaaagagtatgccaatactacagggacaaattgatgcactgcttgaatttgatgtgcatccaaatgaactaacaaatggtgtcataaatgcagcatttatgcttcttttcaaagatcttatcaaactttttgcttgctacaatgatggtgttattaacttactcgaaaagttttttgaaatgaagaaaggacaatgtaaagatgctctagaaatttacaaacgatttctaactagaatgacacgagtgtctgaatttctcaaggttgcagagcaagttggtattgataaaggtgacattcctgacctcacacaggctcccagcagtcttatggagacgcttgaacagcatctaaatacattagaaggaaagaaacctggaaacaatgaaggatctggtgctccctctccattaagtaagtcttctccagccacaactgttacgtctcctaattctacaccagctaaaactattgacacatccccaccggttgatttatttgcaactgcatctgcggctgtcccagtcagcacttctaaaccatctagtgatctcctggacctccagccagacttttcctctggaggggcagcagcagccgcagcaccagcaccaccaccacctgctggaggagccactgcatggggagaccttttgggagaggattctttggctgcactttcctctgttccctctgaagcacagatttcagatccatttgcaccagaacctacccctcctactacaactgctgaaattgcaactgcctcagcttctgcctccactactacaactgttactgctgtcactgctgaagtggatctctttggagatgcctttgcagcttctcctggggaggcccctgcagcatccgaaggggccgccgcaccagctaccccaacccctgtagcagcagcacttgatgcatgttcaggaaatgacccctttgccccgtctgaaggtagtgcagaggctgcacctgagctggacctctttgcaatgaagccacctgagaccagtgttcctgtagttacccctacagctagcacagcccctccagttcccgcaactgctccttctcctgctcctgccgttgcagctgctgctgctgccactactgctgccaccgccgctgccaccaccactaccaccacctccgctgccaccgccaccactgctcctcctgctctagatatctttggtgatttatttgagtccactcctgaagttgctgcagcgcctaagccagatgctgctcctagcatagacctgtttagtacagatgctttctcctctccaccacaaggggcctctcctgtgcctgagagttctctcactgctgacctcttatctgtggatgcatttgcagcaccatctcctgcaaccactgcctcgccagcaaaggtggattcttcaggtgtcatagacctttttggggatgcatttggaagtagtgcttctgaaccccaacctgcatctcaggctgcttctagttcatcagcatcggcagacctactagctggatttgggggttctttcatggcgccttccccatctccagtgactccagctcagaataacctgctacagcccaattttgaggcagcttttgggacaacgccttcaacttccagcagcagctcctttgatccatcaggtgatcttttgatgccaaccatggcaccagctgggcagcctgcacctgtctcaatggtaccacccagtcctgcaatggcagccagcaaagcccttggaagtgatcttgattcatctcttgccagcttagtaggcaatcttggaatttctggtaccacaacaaaaaagggagatcttcagtggaatgctggagagaaaaagttgactggtggagccaactggcagcctaaagtagctccagcaacctggtcagcaggcgttccaccaagtgcacctttgcaaggagctgtacctccaaccagttcagttcctcctgttgccggggccccatcggttggacaacctggagcaggatttggaatgcctcctgctgggacaggcatgcccatgatgcctcagcagccggtcatgtttgcacagcccatgatgaggcccccctttggagctgccgctgtacctggcacgcagctttctccaagccctacacctgccagtcagagtcccaagaaacctccagcaaaggacccattagcggatcttaacatcaaggatttcttgtaaacaatttaagctgcaatatttgtgactgaataggaaaataaatgagtttggagacttcaaataagattgatgctgagtttcaaagggagccaccagtaccaaacccaatacttactcataacttctcttccaaaatgtgtaacacagccgtgaaagtgaacattaggaatatgtactaccttagctgttatccctactcttgaaattgtagtgtatttggattatttgtgtattgtacgatgtaaacaatgaatggatgttactgatgccgttagtgcttttttggacttcacctgaggacagatgatgcagctgttgtgtggcgagctatttggaaagacgtctgtgtttttgaaggtttcaatgtacatataacttttgaacaaaccccaaactcttcccataaattatcttttcttctgtatctctgttacaagcgtagtgtgataataccagataataaggaaaacactcataaatatacaaaactttttcagtgtggagtacatttttccaatcacaggaacttcaactgttgtgagaaatgtttatttttgtggcactgtatatgttaagaaattttattttaaaaaatataaaggttaacgtccataataaatacttctctttgaagctaccttatcaagaacgaaaaatcgtatgggaagaatcccctatttatcactgctatattaaaatatatatattttaattatatttgacaggttttgcatctaaattgacctatttattcattcttgattaaatgcactgaaaagtaaagggtctgtttgtgtcatgttcatgaaaatgcggttagagaggtgctattcaagtgattctgaaggcaccccaaggtatatctgtaatttaaagattactgcaaatatctttactttactgtgggtttttagtacatctgttaatttagtgtttctttgtgtgttttgtagactagtgttcttccatccttcaactgagctcaaagtaggttttgttgtaacattgtgattaggatttaaactaattcagagaattgtatcttttactgtacatactgtattctttaagttttaatttgttgtcatactgtctgtgctgatggcttggcttaagattttgatgcataaatgaggtcactgttgatcagtgttgctagtagcttggcagctcttcataaaagcatattgggttggaaaggtgtttgcctatttttcaaattatttaatagatgtatggtaccatttaaaagtggttgtatctgaatttactgtggggataacatacactgtaatggggaaaaattacctaaaaccaatttcaaaatggctttctttgtatttcagtttaaaaacccagtgcatgtacgccctctgagatgcaataaacaccttgaacaaagaaatgcaaacataa

SEQ ID NO: 331118 - protein, 117 aa, Artificial Sequence
  derived and/or modified sequence
MSGQTLTDRIAAAQYSVTGSAVARAVCKATTHEVMGPKKKHLDYLIQATNETNVNIPQMADTLFERATNSSWVVVFKALVTTHHLMVHGNERFIQYLASRNTLFNLSNFLDKSGSHG

SEQ ID NO: 331119 - protein, 66 aa, Artificial Sequence
  derived and/or modified sequence
MSGQTLTDRIAAAQYSVTGSAVARAVCKATTHEVMGPKKKHLDYLIQATNETNVNIPQMADTLFER

SEQ ID NO: 331120 - protein, 210 aa, Artificial Sequence
  derived and/or modified sequence
METLEQHLNTLEGKKPGNKYASGAPSPLSKSSPATTVTSPNSTPAKTIDTSPPVDLFATASAAVPVSTSKPSSDLLDLQPDFSSGGAAAAAAPAPPPPAGGATAWGDLLGEDSLAALSSVPSEAQISDPFAPEPTPPTTTAEIATASASASTTTTVTAVTAEVDLFGGSAEAAPELDLFAMKPPETSVPVVTPTASTAPPVPATAPSPAP

SEQ ID NO: 331121 - DNA, 633 bp, Artificial Sequence
  derived and/or modified sequence
atggagaccctggagcagcacctgaacaccctggagggcaagaagcccggcaacaagtacgccagcggcgcccccagccccctgagcaagagcagccccgccaccaccgtgaccagccccaacagcacccccgccaagaccatcgacaccagcccccccgtggacctgttcgccaccgccagcgccgccgtgcccgtgagcaccagcaagcccagcagcgacctgctggacctgcagcccgacttcagcagcggcggcgccgccgccgccgccgcccccgccccccccccccccgccggcggcgccaccgcctggggcgacctgctgggcgaggacagcctggccgccctgagcagcgtgcccagcgaggcccagatcagcgaccccttcgcccccgagcccaccccccccaccaccaccgccgagatcgccaccgccagcgccagcgccagcaccaccaccaccgtgaccgccgtgaccgccgaggtggacctgttcggcggcagcgccgaggccgcccccgagctggacctgttcgccatgaagccccccgagaccagcgtgcccgtggtgacccccaccgccagcaccgccccccccgtgcccgccaccgcccccagccccgccccctag

SEQ ID NO: 331122 - DNA, 633 bp, Artificial Sequence
  derived and/or modified sequence
atggagactctggaacagcacctaaatacgctggagggcaagaagccaggaaacaaatatgcaagtggcgccccatcgccattgtcaaagagcagccccgccactaccgtcacctctcccaattctacgccagccaaaacaattgacacctctcctcccgtcgaccttttcgccactgcgagcgcggccgttcccgtgtctacttccaaacctagttctgacctgttggatctgcagccagacttcagtagtggaggggccgccgccgcagctgctccggctcccccgccgcccgccggtggcgccacggcctggggagacttgctcggtgaggactctttagccgccctgtcttccgttccatccgaggcccagatttcagatccttttgctcccgagcccactcctcctaccacaaccgccgagatcgctaccgcttcagcaagcgccagcacaactaccactgtaacagctgtgaccgccgaagtggacctgttcggtgggagtgcagaggcggctccagaactcgacctgtttgcaatgaagccacccgaaacgtcggtccccgtagtcacgcccaccgcttctactgcccctccagtgccagccaccgcaccctcccccgcaccgtag

SEQ ID NO: 331123 - DNA, 633 bp, Artificial Sequence
  derived and/or modified sequence
atggagaccctggagcagcacctgaacaccctggagggcaagaagccaggcaacaagtatgccagcggggcccccagccccctgagcaagagcagccctgccaccaccgtgaccagccccaacagcaccccagccaagaccatcgacaccagcccccctgtggacctgtttgccacagccagcgctgctgtgcctgtgtccaccagcaagcccagcagtgacctgctggacctgcagcctgacttcagcagcggcggcgctgctgctgctgctgccccagcccctcctcctcctgctggaggagccacagcctggggagacctgctgggggaggacagcctggccgccctgagctctgtgcccagcgaggcccagatcagtgacccctttgcccctgagcccaccccacccaccaccacagctgagatcgccacagccagcgccagcgccagcaccaccaccaccgtgacagctgtgacagctgaggtggacctgtttggaggcagcgctgaggccgcccctgagctggacctgtttgccatgaagcccccagagacctctgtgcctgtggtgacccccacagccagcacagcccctcctgtgcctgccacagcccccagccctgccccctag

SEQ ID NO: 331124 - DNA, 633 bp, Artificial Sequence
  derived and/or modified sequence
atggagaccctggagcagcacctgaacaccctggagggcaagaagcctggaaataaatatgcttctggggctccatctcctctctctaagagcagcccggccaccacggtcacttctccaaattcaacccccgccaagacaatcgacacgagtccaccggttgaccttttcgctacagcttccgcagccgttccagtttcaacttccaagccaagttctgacctgctggacctccagcccgatttctcaagcgggggtgcggcggcagcagcggcaccagcaccgccccctcctgctggcggcgccaccgcttggggcgacctcttaggggaggacagcctggctgccctgtccagtgtgccttccgaggcacagatttctgatcctttcgcgcccgagcctacccctccaaccaccacagctgaaattgctaccgcctcagcctcagcatccaccactactacagttaccgccgtgacagcagaagtcgacctgtttggaggcagcgcagaggctgccccggagttggacttgttcgcaatgaaacctcctgaaactagcgttcctgtggtgacccctaccgcctcaacagcgccacccgttccagccaccgctccatcaccagccccttag

SEQ ID NO: 331125 - DNA, 633 bp, Artificial Sequence
  derived and/or modified sequence
atggagacacttgagcagcatttgaataccctggaagggaagaagccaggtaataagtacgcatctggcgctccttcaccactatccaaatctagccccgctacaactgtcacgtctcccaatagtaccccagccaagaccatcgacactagccctcctgtggatctgtttgcaacggcaagcgccgctgtgcctgtctcaaccagcaaaccaagctcagaccttttggacctgcagccagacttctcttccggaggagctgccgctgctgccgcaccagcgcctcccccaccggctggcggtgccactgcctggggagacttgttaggcgaagattccctagctgcactgtcttctgtcccttctgaggcccagatctcagacccctttgctccggaacccaccccaccgacaactacggccgaaatcgccacggcctccgctagcgcttctacaacaactaccgtcactgcagtgacagcagaggttgacctcttcggagggtccgcagaggccgctccagaactagacctgtttgcaatgaaaccgccagagacaagtgtcccagtggtgacccccaccgccagtacggctccgccagtaccagcgaccgctcctagcccagcgccttag

SEQ ID NO: 331126 - DNA, 1460 bp, Artificial Sequence
  derived and/or modified sequence
agaggataatcccagggtgcggagaagggcagcggccgagtgacagctccgcggagcgctccagggcgggcgggggactgggcttcgctgtcagcccggctcctctccaaagccaggaaggaagaggaggcggtagacgcgaccacagaagatgtcgggccaaacgctcacggatcggatcgccgccgctcagtacagcgttacaggctctgctgtagcaagagcggtctgcaaagccactactcatgaagtaatgggccccaagaaaaagcacctggactagatttattcaatatttggcttctagaaatacactattcaatctcagcaattttttggacaaaagtggatcccatggttatgatatgtctaccttcataaggcgctatagtagatatttgaatgaaaaggctttttcttacagacagatggcctttgattttgccagggtgaagaaaggggccgatggtgtaatgaggacaatggctcccgaaaagctgctaaagagtatgccaatactacagggacaaattgatgcactgcttgaatttgatgtgcatccaaatgaactaacaaatggtgtcataaatgcagcatttatgcttcttttcaaagatcttatcaaactttttgcttgctacaatgatggtgttattaacttactcgaaaagttttttgaaatgaagaaaggacaatgtaaagatgctctagaaatttacaaacgatttctaactagaatgacacgagtgtctgaatttctcaaggttgcagagcaagttggtattgataaaggtgacattcctgacctcacacaggctcccagcagtcttatggagacgcttgaacagcatctaaatacattagaaggaaagaaacctggaaacaagtacgcatctggtgctccctctccattaagtaagtcttctccagccacaactgttacgtctcctaattctacaccagctaaaactattgacacatccccaccggttgatttatttgcaactgcatctgcggctgtcccagtcagcacttctaaaccatctagtgatctcctggacctccagccagacttttcctctggaggggcagcagcagccgcagcaccagcaccaccaccacctgctggaggagccactgcatggggagaccttttgggagaggattctttggctgcactttcctctgttccctctgaagcacagatttcagatccatttgcaccagaacctacccctcctactacaactgctgaaattgcaactgcctcagcttctgcctccactactacaactgttactgctgtcactgctgaagtggatctctttggaggtagtgcagaggctgcacctgagctggacctctttgcaatgaagccacctgagaccagtgttcctgtagttacccctacagctagcacagcccctccagttcccgcaactgctccttctcctgctcct

SEQ ID NO: 331127 - protein, 151 aa, Artificial Sequence
  derived and/or modified sequence
MSGQTLTDRIAAAQYSVTGSAVARAVCKATTHEVMGPKKKHLDYLIQATNETNVNIPQMADTLFERATNSSWVVVFKALVTTHHLMVHGNERFIQYLASRNTLFNLSNFLDKSGSHGYDMSTFIRRYSRYLNEKAFSYRQMAFDFARVKKG

SEQ ID NO: 331128 - protein, 152 aa, Artificial Sequence
  derived and/or modified sequence
MSGQTLTDRIAAAQYSVTGSAVARAVCKATTHEVMGPKKKHLDYLIQATNETNVNIPQMADTLFERATNSSWVVVFKALVTTHHLMVHGNERFIQYLASRNTLFNLSNFLDKSGSHGYDMSTFIRRYSRYLNEKAFSYRQMAFDFARVKKGA

SEQ ID NO: 331129 - protein, 237 aa, Artificial Sequence
  derived and/or modified sequence
MRYFLVGSNNAETKYRVLKIDRTEPKDLVIIDDRHVYTQQEVRELLGRLDLGNRTKMGQKGSSGLFRAVSAFGVVGFVRFLEGYYIVLITKRRKMADIGGHAIYKVEDTNMIYIPNDSVRVTHPDEARYLRIFQNVDLSSNFYFSYSYDLSHSLQYNLTVLRMPLEMLKSEMTQNRQESFDIFEDEGLITQGGSGVFGICSEPYMKYVWNGELLDIIKSTVHRDWLLYIIHGFCGQS

SEQ ID NO: 331130 - DNA, 791 bp, Artificial Sequence
  derived and/or modified sequence
caaagatgggacagaaaggatcctcgggcttatttcgagcggtttcagcttttggtgttgtgggttttgtcaggttcttagaaggctattatattgtgttaataactaaaaggaggaagatggcggatattggaggtcatgcaatctataaggtcgaagatacaaatatgatctatatacccaatgattctgtacgggttactcatcctgatgaagctaggtatctacgaatatttcaaaatgtggacctatctagcaatttttactttagttacagctatgatttgtcccactcacttcaatataatctcactgtcttgcgaatgcccctggagatgttaaagtcagaaatgacccagaatcgccaagagagctttgacatctttgaagatgaaggattaattacacaaggtggaagcgggtgatgttgcaaatgaagtggagactgaacaaatactctgcgatgcttctgtgatgtctttcactgcaggaagttattcttcatatgtacaagttagaggatctgtgcccttatactggtctcaggacatttcaactatgatgcctaaaccacctattacatgtgtgtggagccatgtttttaataataactcctgtcctcacatttagagataatgaactgttgtcacagaaatctcataaatgcttaggttttcaggaggttttagtcctggaaggtagataatttagaagaggaatttccgttattcttatgtaataaatttatgtttaattttgactgttaaataaattatttttattttgcttca

SEQ ID NO: 331131 - DNA, 439 bp, Artificial Sequence
  derived and/or modified sequence
gttatttgaggaactctatgaagatcatggtgataccctatcccttcagtatggtggttctcaacttgttcatcgtgtgaaaacctacagaaagatagcaccatggacccagcactccaaagacatcatgcaaaccctgtctagatattacagcaatgctttttcagatgccgatagacaagattccattaatctcttcctgggagttttccatcccactgaagggaaacctcatctctgggagctcccaacagatttttatttgcatcacaaaaataccatgagacttttgccaacaagaagaagttatacttactggtggacaccagaggtgataaagcatttaccattgccctatgatgaagggttcctagcaagatctcctgcgaatctggaatgctccaattgaggactccatctagtcatgcttcagcatccc

SEQ ID NO: 331132 - DNA, 724 bp, Artificial Sequence
  derived and/or modified sequence
gagcaaaaaggaatttaaagaacctcctctaaataactgcctgctcccattggacttcctgaggccctcctggctccttagagcttgttgaactcagctttgcattgtattttctatgcatctatctcatctcctttctaactgtgtaagtgttggaggcaggagcttaccctcggtcagggctgtatcccccacagagcttatcacagtgctgtctgtgaacacagttaatattatggaaatgtttgcttgctataatctcagacttttagagtaacatgcagtatctctcttagttatctgtgctgtgaacttaaagaagttgatagtgaagaaattccacaaatatgaagaagagattgatatccacaatgagttctttcggccatatgagttgagcagctttgatgataccttttgcttggctatgacaagctcagcacgtgactttatgcctaagaccgttggaattgatccaagtccatttactgtgcgtaaaccagatgaaactggaaaatcagtattgggaaacaaaagcaatagagaagaagctgtattacagcggaaaacggcagccagcgccccgccgccccccagcgaggaggctgtgtccagcagctctgaggatgactctgggactgatcgggaagaagagggctctgtgtctcagcgctccactcccgtgaagatgactgatgcaggagacagtgccaaagtgaccgag

SEQ ID NO: 331133 - DNA, 2262 bp, Artificial Sequence
  derived and/or modified sequence
gatcatctataggtttagtgcctaatgggtgttgttcctggctggacttgatgtccagggcctgaggggttttctcgccgagtctcctggggcggtccggaggctcgtgccctgttgtggggcccccatttgccgccgccatgcccacggccgccgcccccatcatcagctcggtccagaagctggttctgtatgagactagagctagatactttctagttgggagcaataatgcagaaacgaaatatcgtgtcttgaagattgatagaacagaaccaaaagatttggtcataattgatgacagggtatctacgaatatttcaaaatgtggacctatctagcaatttttactttagttacagctatgatttgtcccactcacttcaatataatctcactgtcttgcgaatgcccctggagatgttaaagtcagaaatgacccagaatcgccaagagagctttgacatctttgaagatgaaggattaattacacaaggtggaagcgtggatcaggcagatccatttgcacatgtggctgcccttcactttgaccagatgttccagaggtttggctctcccatcatcatcttgaatttagtgaaggaacgagagaaaagaaagcatgaaagaattctgagtgaagaacttgttgctgctgtgacctatctcaaccaatttttgcctcctgagcacactattgtttatattccctgggacatggccaagtataccaaaagcaagctgtgtaatgttcttgatcgactaaatgtgattgcagaaagtgtggtgaagaaaacaggtttctttgtaaaccgccctgattcttactgtagcattttgcggccagatgaaaagtggaatgaactaggaggatgtgtgattcccactggtcgcctgcagactggcatccttcgaaccaactgtgtggactgtttagatcgcaccaacacagcacagtttatggtgggaaaatgtgctctggcctatcagctgtattcactgggactgattgacaaacctaatctacagtttgatacagatgcagttaggttatttgaggaactctatgaagatcatggtgataccctatcccttcagtatggtggttctcaacttgttcatcgtgtgaaaacctacagaaagatagcaccatggacccagcactccaaagacatcatgcaaaccctgtctagatattacagcaatgctttttcagatgccgatagacaagattccattaatctcttcctgggagttttccatcccactgaagggaaacctcatctctgggagctcccaacagatttttatttgcatcacaaaaataccatgagacttttgccaacaagaagaagttatacttactggtggacaccagaggtgataaagcatttaccattgccctatgatgaagttatctgtgctgtgaacttaaagaagttgatagtgaagaaattccacaaatatgaagaagagattgatatccacaatgagttctttcggccatatgagttgagcagctttgatgataccttttgcttggctatgacaagctcagcacgtgactttatgcctaagaccgttggaattgatccaagtccatttactgtgcgtaaaccagatgaaactggaaaatcagtattgggaaacaaaagcaatagagaagaagctgtattacagcggaaaacggcagccagcgccccgccgccccccagcgaggaggctgtgtccagcagctctgaggatgactctgggactgatcgggaagaagagggctctgtgtctcagcgctccactcccgtgaagatgactgatgcaggagacagtgccaaagtgaccgagaatgtggtccaacccatgaaggagctatatggaattaacctctcagatggcctctcagaagaagatttctccatttattcaagaacacccatctcggctttctcgcaagataacatctatgaagttcagcccccaagagtagacagaaaatctacagagatcttccaagcccacatccaggccagccaaggtatcatgcagcccctaggaaaagaggactcctccatgtaccgagagtacatcaggaaccgctacctgtgaaaagagcgcaggtccacctggtggacacgtctgattagcttagaacctgtcttgtctcatcttcaaaaggtaacttattaaaagtcctttgcgtctgaagcctttctccttttctgtcacttgcaaattccaaattatagctaataaagatgactagat

SEQ ID NO: 331134 - DNA, 712 bp, Artificial Sequence
  derived and/or modified sequence
atgagatactttctagttgggagcaataatgcagaaacgaaatatcgtgtcttgaagattgatagaacagaaccaaaagatttggtcataattgatgacaggcatgtctatactcaacaagaagtaagggaacttcttggccgcttggatcttggaaatagaacaaagatgggacagaaaggatcctcgggcttatttcgagcggtttcagcttttggtgttgtgggttttgtcaggttcttagaaggctattatattgtgttaataactaaaaggaggaagatggcggatattggaggtcatgcaatctataaggtcgaagatacaaatatgatctatatacccaatgattctgtacgggttactcatcctgatgaagctaggtatctacgaatatttcaaaatgtggacctatctagcaatttttactttagttacagctatgatttgtcccactcacttcaatataatctcactgtcttgcgaatgcccctggagatgttaaagtcagaaatgacccagaatcgccaagagagctttgacatctttgaagatgaaggattaattacacaaggtggaagcggggtatttgggatctgtagtgagccttatatgaaatatgtatggaatggtgaacttctggatataattaaaagtactgtgcatcgtgactggcttttgtatattattcatgggttctgtgggcagtcaa

SEQ ID NO: 331135 - DNA, 420 bp, Artificial Sequence
  derived and/or modified sequence
atggggcaaaagggcagtagcgggctgttcagagctgtgtcagcctttggagtggttggcttcgtgaggttcctcgaagggtattacattgttttaatcacaaagaggcgtaaaatggctgatattggcggccacgcgatttataaggtggaggacactaacatgatctacatcccgaacgatagcgtgagggttacccaccccgatgaggcccgttacctccgtatttttcagaacgtagatctcagctcgaatttttattttagctattcatacgatctgagccattccctgcagtacaacctgactgttttacgaatgccacttgagatgctcaaaagcgagatgacacaaaacaggcaggaatccttcgatatttttgaggacgaaggtctgattacccaaggcggtagtggttag

SEQ ID NO: 331136 - DNA, 411 bp, Artificial Sequence
  derived and/or modified sequence
taattattcgaagagctctacgaggaccacggcgacacgctgagcctccagtacggcggcagtcagctggttcatcgagttaagacttacaggaaaatagctccatggacacagcactccaaagacatcatgcagaccctgtccagatactattccaacgccttttccgatgctgacaggcaggattcaattaacctgttccttggcgtctttcacccaactgagggtaagccacacctatgggagctccccactgatttttacctgcaccataagaacaccatgcgactgctcccaactcggaggtcatatacgtactggtggaccccagaagttattaagcacctgccactcccatacgacgaagggttcctcgctcggtctcctgctaatctcgagtgttccaactag

SEQ ID NO: 331137 - DNA, 300 bp, Artificial Sequence
  derived and/or modified sequence
atgactagttcagccagagacttcatgccaaagaccgtgggaatagatcctagtcctttcacagtgcggaaacctgatgagacagggaaatcagttttaggtaataaaagcaaccgggaagaggcggtgcttcagaggaaaacagccgcaagtgccccacctcctcctagcgaggaggcagtgtcctcatcttcagaagacgatagcggaactgaccgagaggaagagggttccgtttctcagagatcaactcctgtgaagatgaccgatgctggggactctgcaaaagtcaccgagtag

SEQ ID NO: 331138 - DNA, 1806 bp, Artificial Sequence
  derived and/or modified sequence
atgactggatacttgcgtatatttcagaacgttgatctttcctctaatttctacttttcttattcatacgacctgtcacactccttgcagtataacctgacagtcctgagaatgcccctggagatgctcaagagtgaaatgacccagaacaggcaggagagttttgatatatttgaagatgagggcctcataacccaaggagggtccgtggaccaggccgacccgtttgcccacgttgctgcattgcatttcgatcagatgttccagagatttgggtctcccataattattctgaacctagtgaaagagagagaaaagagaaagcacgagagaattttgtctgaggaactggttgcagccgtgacatacctgaatcaattcctccccccagagcacactatcgtatatattccctgggatatggcaaagtatactaaatcaaagctctgcaacgtcttagacaggttgaacgtcattgctgaatccgtggttaaaaaaactgggtttttcgtgaacagaccagactcatactgcagtatcttacgtcctgacgaaaagtggaacgaacttggcggctgcgtcattcctaccggccgactccagaccggtatcctcagaactaattgcgttgattgtctggacaggaccaataccgcccagtttatggttggaaaatgtgcactagcgtatcagctctattcgcttgggctgatcgataaacccaacctgcagttcgacacagatgccgttagactgttcgaggagctgtacgaggaccatggagatacactttcccttcagtacggtggctcacaactggtgcacagggtgaaaacctataggaaaatcgctccctggacccagcatagcaaggatataatgcagacactgtcgcgctactactctaacgcatttagcgatgcagacagacaggactccatcaacctgttcctgggcgtgttccatccaacagagggtaaacctcacttgtgggaactccccacagatttttatcttcatcataagaacaccatgcggctgctgcctacacgaagatcatacacctattggtggacacccgaggtgattaagcacctgcccctgccctatgacgaggtaatttgcgcggtaaacttaaagaaactgatcgtcaaaaagttccacaagtatgaggaggaaatcgatattcataatgaattttttcggccgtacgagctgtcgtcctttgacgacacgttttgcctcgcaatgacaagttctgctagagatttcatgcccaagacagtcggcatagatccaagtcccttcaccgtgcgcaaaccagatgaaacagggaagtctgttctggggaataagtcaaaccgggaggaggcagttctgcagcggaagaccgccgcctccgctcctccacctcccagcgaggaagcagtaagctcgtccagcgaagatgactctggcactgacagagaagaggagggcagcgtcagtcaacgaagcaccccggttaagatgacggatgccggtgatagcgccaaggtcaccgaaaacgtggttcagcccatgaaagagctttacgggatcaatctctcagacgggctcagcgaagaggacttttctatttacagtcgaacccccatatccgcttttagtcaggacaacatatacgaggtccagcctccacgcgtggaccgcaagagcacggaaatattccaagcacacatacaggcctcacagggcatcatgcagccgctggggaaggaagactcttctatgtacagagagtacattcggaacagatacctctag

SEQ ID NO: 331139 - DNA, 714 bp, Artificial Sequence
  derived and/or modified sequence
atgaggtactttctggtcggatccaacaacgcagagacaaagtatagggtactgaagatcgaccgcacagagccaaaagatctagtgataattgacgacaggcacgtttacacacagcaggaagttagagagctcttagggagactggacctgggtaatcggacgaagatgggacagaagggtagttcagggcttttccgagctgtgtccgcattcggcgtggtaggcttcgtgcggttcctcgagggttattatattgtgctgatcacaaagaggcgaaaaatggctgatattggcgggcatgcgatatataaagtcgaggatactaatatgatttacatccctaatgactccgtccgtgtgacccaccccgatgaggcgcggtatctgcgcatctttcagaacgtggacctgtccagtaacttctatttttcctactcttatgacctgtcccacagtcttcagtacaacttgactgtgctcagaatgcctctggaaatgcttaagtctgagatgacacagaatcgtcaagagtctttcgacatcttcgaggatgaaggactcatcacccagggtggatcaggggtgtttggaatttgttccgagccctacatgaagtacgtatggaacggtgagctcctcgacattatcaaatcaaccgtacaccgcgattggttgttgtatattatccatggattctgtggccaaagttag

SEQ ID NO: 331140 - DNA, 420 bp, Artificial Sequence
  derived and/or modified sequence
atgggccagaagggcagcagcggcctcttccgggctgtgtctgccttcggcgtggtgggctttgtgcgcttcctggagggctactacatcgtgctgatcaccaagaggaggaagatggctgacatcggcggccacgccatctacaaggtggaggacaccaacatgatctacatccccaatgacagcgtgcgggtgacccacccagatgaggcccgctacctgcgcatcttccagaatgtggacctgagcagcaacttctacttctcctacagctatgacctgagccacagcctgcagtacaacctgactgtgctgaggatgcccctggagatgctgaagtctgagatgacccagaaccggcaggagagctttgacatctttgaagatgagggcctcatcacccagggcggcagcggctag

SEQ ID NO: 331141 - DNA, 411 bp, Artificial Sequence
  derived and/or modified sequence
tgactgtttgaggagctgtatgaggaccacggggacaccctgagcctgcagtatggaggcagccagctggtgcaccgggtgaagacctacaggaagatcgccccctggacccagcacagcaaggacatcatgcagaccctgagccgctactacagcaatgccttcagtgatgctgaccggcaggacagcatcaacctcttcctgggcgtcttccaccccacagagggcaagccccacctgtgggagctgcccacagacttctacctgcaccacaagaacaccatgaggctgctgcccaccaggaggagctacacctactggtggaccccagaggtgatcaagcacctgcccctgccctatgatgagggcttcctggcccggagccctgccaacctggagtgcagcaactag

SEQ ID NO: 331142 - DNA, 300 bp, Artificial Sequence
  derived and/or modified sequence
atgaccagcagcgcccgggacttcatgcccaagacagtgggcatcgaccccagccccttcaccgtgaggaagccagatgagaccgggaagtctgtgctgggcaacaagagcaaccgggaggaggccgtgctgcagaggaagacagctgccagcgcccctcctcctccttctgaggaggccgtgagcagcagcagtgaagatgattctggaacagaccgggaggaggagggctctgtgtcccagaggagcacccctgtgaagatgacagatgctggggacagcgccaaggtgacagaatag

SEQ ID NO: 331143 - DNA, 1806 bp, Artificial Sequence
  derived and/or modified sequence
atgacaggctacctgcgcatcttccagaatgtggacctgagcagcaacttctacttctcctacagctatgacctgagccacagcctgcagtacaacctgactgtgctgaggatgcccctggagatgctgaagtctgagatgacccagaaccggcaggagagctttgacatctttgaagatgagggcctcatcacccagggcggctctgtggaccaggccgacccctttgcccacgtggccgccctgcactttgaccagatgttccagagatttggcagccccatcatcatcctgaacctggtgaaggagcgggagaagaggaagcatgagcgcatcctgtctgaggagctggtggccgctgtgacctacctgaaccagttcctgcccccagagcacaccatcgtgtacatcccctgggacatggccaagtacaccaagagcaagctgtgcaatgtgctggaccggctgaatgtgattgctgagagcgtggtgaagaagacaggcttctttgtgaacagaccagacagctactgcagcatcctgcggccagatgagaagtggaatgagctgggcggctgtgtgatccccaccggccgcctgcagacaggcatcctgcggaccaactgtgtggactgcctggacaggaccaacacagcccagttcatggtgggcaaatgtgccctggcctaccagctgtacagcctgggcctgattgacaagcccaacctgcagtttgacacagatgctgtgcggctgtttgaggagctgtatgaggaccacggggacaccctgagcctgcagtatggaggcagccagctggtgcaccgggtgaagacctacaggaagatcgccccctggacccagcacagcaaggacatcatgcagaccctgagccgctactacagcaatgccttcagtgatgctgaccggcaggacagcatcaacctcttcctgggcgtcttccaccccacagagggcaagccccacctgtgggagctgcccacagacttctacctgcaccacaagaacaccatgaggctgctgcccaccaggaggagctacacctactggtggaccccagaggtgatcaagcacctgcccctgccctatgatgaagtcatctgtgctgtgaacctgaagaagctgattgtgaagaagttccacaagtatgaggaggagattgacatccacaatgagttcttccggccctatgagctgagcagctttgatgacaccttctgcctggccatgaccagcagcgcccgggacttcatgcccaagacagtgggcatcgaccccagccccttcaccgtgaggaagccagatgagaccgggaagtctgtgctgggcaacaagagcaaccgggaggaggccgtgctgcagaggaagacagctgccagcgcccctcctcctccttctgaggaggccgtgagcagcagcagtgaagatgattctggaacagaccgggaggaggagggctctgtgtcccagaggagcacccctgtgaagatgacagatgctggggacagcgccaaggtgacagaaaatgtggtgcagcccatgaaggagctgtatggcatcaacctgagtgatggcctgtctgaggaggacttcagcatctacagcaggacccccatcagcgccttcagccaggacaacatctatgaggtgcagcccccccgggtggacaggaagagcacagagatcttccaggcccacatccaggccagccagggcatcatgcagcccctgggcaaggaggacagctccatgtaccgggagtacatccggaaccgctacctgtag

SEQ ID NO: 331144 - DNA, 714 bp, Artificial Sequence
  derived and/or modified sequence
atgagatacttcctggtgggcagcaacaatgctgagaccaagtacagagtgctgaagattgacagaacagagcccaaggacctggtgatcattgatgacagacatgtgtacacccagcaggaggtgcgggagctgctgggccgcctggacctgggcaacagaaccaagatgggccagaagggcagcagcggcctcttccgggctgtgtctgccttcggcgtggtgggctttgtgcgcttcctggagggctactacatcgtgctgatcaccaagaggaggaagatggctgacatcggcggccacgccatctacaaggtggaggacaccaacatgatctacatccccaatgacagcgtgcgggtgacccacccagatgaggcccgctacctgcgcatcttccagaatgtggacctgagcagcaacttctacttctcctacagctatgacctgagccacagcctgcagtacaacctgactgtgctgaggatgcccctggagatgctgaagtctgagatgacccagaaccggcaggagagctttgacatctttgaagatgagggcctcatcacccagggcggcagcggcgtgtttggcatctgcagcgagccctacatgaagtatgtgtggaatggagagctgctggacatcatcaagagcacagtgcaccgggactggctgctgtacatcatccacggcttctgtggccagagctag

SEQ ID NO: 331145 - DNA, 420 bp, Artificial Sequence
  derived and/or modified sequence
atgggccagaagggcagcagcggcctgttccgggccgtgagcgcctttggggtggtcggctttgtgcggttccttgagggctactacatcgtgttgatcacaaagcgcaggaaaatggctgatataggtggtcacgcaatctataaggtggaggacaccaatatgatctatatccctaacgatagtgtcagggttacacacccagatgaagcgagatacctgcgcatctttcagaacgtcgatctctcaagcaacttctacttcagttattcttacgatctctcccacagcttgcaatacaatctgaccgtgctccgaatgcctctcgagatgctaaaaagcgagatgacccaaaacaggcaggagagctttgacatctttgaggacgagggcttgattacccagggcggatccggatag

SEQ ID NO: 331146 - DNA, 411 bp, Artificial Sequence
  derived and/or modified sequence
tgactgttcgaggagctgtacgaggaccacggcgacaccctgagccttcaatacggcggcagtcagctggtacacagagtgaagacctatcggaagatcgccccctggactcaacactcgaaggacataatgcagaccctgtcacggtattatagcaacgcattttccgatgccgacaggcaggactctatcaatttgtttctgggcgtgttccacccgactgaagggaaacctcacctctgggagttgcctaccgacttttacctgcatcataagaacacaatgagactcttgcctactcggcggagctatacatactggtggaccccagaagtgattaagcacctacctctcccctatgatgaaggttttctagcacgctcccctgccaacttagagtgcagtaactag

SEQ ID NO: 331147 - DNA, 300 bp, Artificial Sequence
  derived and/or modified sequence
atgaccagcagcgcccgggacttcatgcccaagaccgtgggcatcgatccttccccgttcacggttagaaaaccagacgaaaccgggaagagtgtccttgggaacaagtccaatcgcgaggaagccgtgctgcaacgcaagaccgcagcttccgctcctccacctccctccgaggaagcagttagttcctcctcggaggatgactcaggtaccgaccgcgaagaggaaggtagtgtttctcagaggtcaacacctgtgaagatgaccgatgcaggggatagcgccaaggtgacagagtag

SEQ ID NO: 331148 - DNA, 1806 bp, Artificial Sequence
  derived and/or modified sequence
atgaccggctacctgcggatcttccagaacgtggacctgagcagcaacttctattttagttactcttacgacctgagccattctctgcagtataacctgacagtgcttcggatgccactcgagatgctgaagagtgaaatgacccagaatagacaggaaagtttcgacatctttgaggatgagggcctgatcactcagggaggctccgtggatcaggctgaccccttcgctcacgtggctgcgctgcatttcgaccaaatgtttcagcggttcggatctcctatcattattctgaacctggtgaaagagcgtgaaaaacgcaaacatgaacgaatcttgtccgaagaactcgtggctgccgtgacctatcttaaccaattcctgcctccagaacacaccatcgtttacattccttgggacatggcaaaatataccaaaagcaaactgtgcaatgttctggaccggctgaacgtaatagcagagtctgtggtgaagaagaccggcttctttgtgaatcggcccgacagctactgttctattctgcggcctgatgagaaatggaatgagctcggtggttgtgtaatacccacaggacggctacagactggtatactgcggactaactgtgtggactgccttgaccgcacaaatactgcacagtttatggtcggtaaatgcgccctggcctaccagttatatagcctggggctgatcgacaagcccaaccttcagttcgacactgatgccgtgcgtctttttgaggaattatacgaagatcatggggacactctgagtctgcagtacggaggcagccaacttgtacatcgcgtaaaaacctatcgcaagattgcaccatggacgcagcactcaaaggacatcatgcagacactctcaaggtactattccaacgctttttctgatgctgacagacaggacagtataaacctgtttctgggggtgttccatccaaccgagggtaaaccgcatctttgggagcttcccactgacttttacctgcaccacaagaacaccatgaggctgcttcctacgaggcgctcatatacgtactggtggacacctgaagtgatcaagcacctgcccttgccatacgacgaggtgatttgcgccgtcaacctgaagaagctgatcgtgaaaaaatttcacaagtatgaggaggagattgacattcataatgagttttttaggccgtacgagctgagttcctttgacgacaccttctgtctcgccatgacatcttcagcaagagatttcatgccaaaaactgtcgggattgatccaagtccatttacagttcgcaaacctgatgaaaccggtaagagcgtcttaggtaataagtcaaacagggaagaagccgtgttgcagcgtaaaacggccgccagcgcacctccccctcccagcgaggaagctgtgagctctagtagcgaagatgacagtggcactgatcgggaagaggagggtagtgtcagtcagagaagcacccccgtcaagatgacagacgcgggcgactccgccaaagtaactgagaatgtggtgcaaccaatgaaggagttatatgggataaacctgagcgatggactgtcagaagaggacttttccatctactctagaacgccgataagcgcgttctcgcaggacaacatctacgaggtgcagccccctcgggtggatcgcaaatcaacggagatatttcaggcccatattcaggctagtcaagggattatgcaacccctcggcaaagaggacagtagcatgtaccgcgagtatattcggaatcgctatctttag

SEQ ID NO: 331149 - DNA, 714 bp, Artificial Sequence
  derived and/or modified sequence
atgcggtacttcctggtgggcagcaacaacgccgagaccaagtacagagtgctgaagatcgatcgcaccgagccgaaggatctcgtgatcatagacgatcgtcacgtgtacactcaacaggaagtacgcgagctgttggggcgactggatctgggaaatcgcacaaagatgggccagaaaggcagctctggtctgtttcgcgccgtgtccgcattcggagtcgtgggattcgtgcgcttcttggaagggtactatattgtactgatcacaaagcggcgcaagatggcagatatcgggggacacgctatttataaagtggaagacaccaacatgatctacatccctaatgactctgttcgagtaactcaccctgacgaggctagatatctccggattttccagaatgtcgacctttcctcaaatttttatttctcatactcgtacgatctgtcacactcccttcaatacaacttaacagtcttgaggatgcctctcgaaatgctgaagtctgagatgacccagaatcgacaggagagcttcgatatcttcgaggatgagggcctgataactcagggtggatcaggggtgttcggcatatgtagcgagccctatatgaaatatgtctggaatggcgaattgcttgatataatcaagtccactgtacaccgggactggctgttatatattatccacggattctgtggccaatcatag

SEQ ID NO: 331150 - DNA, 420 bp, Artificial Sequence
  derived and/or modified sequence
atggggcaaaagggctccagcggcctgtttagagcagtgtcagctttcggagtggtgggcttcgtgagattcttagaagggtactatatcgtgctgatcacgaaacgtcgtaaaatggccgatattggaggtcacgccatctataaagtcgaagacactaatatgatctacatcccaaacgatagcgtgcgagtgacccaccctgacgaggctcgctatttgcgcatttttcaaaacgtggacttgtccagtaatttttatttcagttactcctatgatctgtcgcactcccttcagtataaccttactgttctgagaatgcccctggagatgctgaagagcgaaatgactcagaaccggcaagagtcatttgatatcttcgaagacgagggcctgatcactcaggggggatccgggtag

SEQ ID NO: 331151 - DNA, 411 bp, Artificial Sequence
  derived and/or modified sequence
tgactttttgaagaactgtatgaagaccatggtgatacgctgtctctgcagtatggcggatcacaactggtccatcgtgtaaagacttacaggaagatagctccatggacacaacattctaaagacataatgcaaactttgagccggtactatagcaatgccttttcggacgccgaccgccaggactcaataaatctgttccttggggtgtttcacccgactgaagggaagccacatttgtgggagcttcctacagatttttacctgcaccacaagaacactatgcgtctgctcccgactcgcaggagttacacctactggtggacccccgaggtcattaaacacctgcccctaccatacgatgaggggtttctggccagatcgcctgccaacttagagtgttcaaattag

SEQ ID NO: 331152 - DNA, 300 bp, Artificial Sequence
  derived and/or modified sequence
atgaccagcagcgccagagatttcatgcctaaaacggtggggatcgatccctctccgttcactgtcaggaaacccgacgagacgggcaagagtgtactgggcaacaagtcaaatcgcgaggaggccgtcttgcagcgcaagactgccgcaagcgctcccccacctccttctgaagaggccgtgagctcttccagcgaagacgattccggaaccgaccgtgaagaggaggggagtgtgagccagcgcagtacccctgtgaagatgacagacgccggagacagcgctaaagtgactgaatag

SEQ ID NO: 331153 - DNA, 1806 bp, Artificial Sequence
  derived and/or modified sequence
atgactggctatctgagaatttttcagaacgtggacctgtcgtccaacttctacttctcttattcatatgatctgtcacattccctccagtacaatctgacagtgttgcgtatgcctcttgaaatgctgaaatccgagatgacccagaacaggcaggagagcttcgacattttcgaggatgaaggcctgatcactcaaggtggctctgtcgaccaagcagaccccttcgcgcacgtcgcggcactgcacttcgatcaaatgttccagagattcgggtccccaatcattatcctcaacttggtgaaggaaagagaaaagagaaagcatgaaaggatcctgtcagaggaactcgtggccgcagtgacttatttgaatcaatttcttcctccggaacacacgattgtgtacatcccctgggacatggcaaaatacaccaaaagtaaactatgcaatgtgctggacagactgaacgtcatcgcagaatcggttgtcaaaaaaacgggtttttttgtcaatcggccagattcctactgcagcattctcagacctgacgagaaatggaatgagctgggtggttgtgtcatccctaccggaagactacagactgggatcctgagaacaaactgcgtggattgtctagatagaaccaacaccgcccagtttatggtcggcaaatgtgccctggcctatcagctgtacagcctgggcctcatcgacaagcctaacctgcagtttgatacagacgcagtgagactgtttgaagagctttacgaggaccatggcgacacactatcgctgcagtacgggggatctcaattggtgcacagagttaagacctaccgaaaaatagcaccttggactcaacattccaaggacatcatgcagaccctttccaggtattatagtaacgcctttagtgacgccgaccggcaggattcaattaacctgtttctgggggtgtttcatcctacagaagggaagccccacctttgggaactcccaacagatttttacctgcaccacaaaaacactatgcgactgttacccacaaggcgctcctacacgtactggtggacccctgaggtgattaagcatctgcctctgccctacgacgaagttatatgtgctgttaatcttaaaaagctgatcgttaagaagttccacaagtacgaggaagagatagacatccacaacgagttcttccgtccatatgagcttagtagcttcgatgacacattttgtcttgccatgacctcctcggccagagactttatgcccaagacggtcggcattgatccttccccttttaccgttcgcaaaccagatgaaactggcaaatctgttctgggtaataagtcaaatcgggaggaagccgtcctgcagaggaagaccgctgcctcagcgccaccacctccttccgaagaagccgtgtcctccagttctgaggatgattcaggtactgaccgggaagaggaaggctcagtctcccagcggagtacccctgttaagatgactgacgcaggcgatagtgcaaaagtgacagaaaacgtggtacaacctatgaaagagctgtacgggattaacctgtccgatgggttatctgaggaggacttctccatctattctcggacccccattagcgcatttagccaggataatatctatgaggtccaacctccccgagttgacagaaagtctacagagatattccaagcccacattcaggccagtcagggaatcatgcagccactaggtaaagaggattctagcatgtaccgggagtatattaggaaccgctatctatag

SEQ ID NO: 331154 - DNA, 714 bp, Artificial Sequence
  derived and/or modified sequence
atgcggtactttctggtggggagtaataatgccgaaactaagtacagggtgctgaagatcgacagaacggagcccaaagacctcgtcattatcgacgatcgtcacgtgtatacgcaacaggaggtaagggagctccttggtcgtctagatctgggcaatcgtacaaagatgggccaaaagggatcatctggactctttcgcgctgtgtccgcttttggggtggtggggtttgtccggttcttagaaggctactacatcgttctgatcaccaagcgaagaaagatggccgacatcggaggacacgcgatatacaaggtggaagacacgaatatgatctacatacccaacgacagtgtgagagtcacccacccggacgaggccagatacctacggattttccaaaatgtagatctctcatccaacttctattttagttatagttatgacctgagtcacagtttgcagtacaacctgaccgttctcagaatgcctctggagatgcttaagagcgaaatgacccagaaccgccaggaatccttcgatattttcgaagacgaagggctgatcactcagggcggttcgggagtgtttggcatctgcagcgaaccatacatgaagtatgtctggaacggagagcttttagacataatcaagtcaactgtgcacagggactggttgttgtacatcatacatggattctgtggacagtcatag

SEQ ID NO: 331155 - DNA, 420 bp, Artificial Sequence
  derived and/or modified sequence
atgggccagaagggcagcagcggcctgttcagagccgtgagcgccttcggcgtggtgggcttcgtgagattcctggagggctactacatcgtgctgatcaccaagagaagaaagatggccgacatcggcggccacgccatctacaaggtggaggacaccaacatgatctacatccccaacgacagcgtgagagtgacccaccccgacgaggccagatacctgagaatcttccagaacgtggacctgagcagcaacttctacttcagctacagctacgacctgagccacagcctgcagtacaacctgaccgtgctgagaatgcccctggagatgctgaagagcgagatgacccagaacagacaggagagcttcgacatcttcgaggacgagggcctgatcacccagggcggcagcggctag

SEQ ID NO: 331156 - DNA, 411 bp, Artificial Sequence
  derived and/or modified sequence
tgactgttcgaggagctgtacgaggaccacggcgacaccctgagcctgcagtacggcggcagccagctggtgcacagagtgaagacctacagaaagatcgccccctggacccagcacagcaaggacatcatgcagaccctgagcagatactacagcaacgccttcagcgacgccgacagacaggacagcatcaacctgttcctgggcgtgttccaccccaccgagggcaagccccacctgtgggagctgcccaccgacttctacctgcaccacaagaacaccatgagactgctgcccaccagaagaagctacacctactggtggacccccgaggtgatcaagcacctgcccctgccctacgacgagggcttcctggccagaagccccgccaacctggagtgcagcaactag

SEQ ID NO: 331157 - DNA, 300 bp, Artificial Sequence
  derived and/or modified sequence
atgaccagcagcgccagagacttcatgcccaagaccgtgggcatcgaccccagccccttcaccgtgagaaagcccgacgagaccggcaagagcgtgctgggcaacaagagcaacagagaggaggccgtgctgcagagaaagaccgccgccagcgccccccccccccccagcgaggaggccgtgagcagcagcagcgaggacgacagcggcaccgacagagaggaggagggcagcgtgagccagagaagcacccccgtgaagatgaccgacgccggcgacagcgccaaggtgaccgagtag

SEQ ID NO: 331158 - DNA, 1806 bp, Artificial Sequence
  derived and/or modified sequence
atgaccggctacctgagaatcttccagaacgtggacctgagcagcaacttctacttcagctacagctacgacctgagccacagcctgcagtacaacctgaccgtgctgagaatgcccctggagatgctgaagagcgagatgacccagaacagacaggagagcttcgacatcttcgaggacgagggcctgatcacccagggcggcagcgtggaccaggccgaccccttcgcccacgtggccgccctgcacttcgaccagatgttccagagattcggcagccccatcatcatcctgaacctggtgaaggagagagagaagagaaagcacgagagaatcctgagcgaggagctggtggccgccgtgacctacctgaaccagttcctgccccccgagcacaccatcgtgtacatcccctgggacatggccaagtacaccaagagcaagctgtgcaacgtgctggacagactgaacgtgatcgccgagagcgtggtgaagaagaccggcttcttcgtgaacagacccgacagctactgcagcatcctgagacccgacgagaagtggaacgagctgggcggctgcgtgatccccaccggcagactgcagaccggcatcctgagaaccaactgcgtggactgcctggacagaaccaacaccgcccagttcatggtgggcaagtgcgccctggcctaccagctgtacagcctgggcctgatcgacaagcccaacctgcagttcgacaccgacgccgtgagactgttcgaggagctgtacgaggaccacggcgacaccctgagcctgcagtacggcggcagccagctggtgcacagagtgaagacctacagaaagatcgccccctggacccagcacagcaaggacatcatgcagaccctgagcagatactacagcaacgccttcagcgacgccgacagacaggacagcatcaacctgttcctgggcgtgttccaccccaccgagggcaagccccacctgtgggagctgcccaccgacttctacctgcaccacaagaacaccatgagactgctgcccaccagaagaagctacacctactggtggacccccgaggtgatcaagcacctgcccctgccctacgacgaggtgatctgcgccgtgaacctgaagaagctgatcgtgaagaagttccacaagtacgaggaggagatcgacatccacaacgagttcttcagaccctacgagctgagcagcttcgacgacaccttctgcctggccatgaccagcagcgccagagacttcatgcccaagaccgtgggcatcgaccccagccccttcaccgtgagaaagcccgacgagaccggcaagagcgtgctgggcaacaagagcaacagagaggaggccgtgctgcagagaaagaccgccgccagcgccccccccccccccagcgaggaggccgtgagcagcagcagcgaggacgacagcggcaccgacagagaggaggagggcagcgtgagccagagaagcacccccgtgaagatgaccgacgccggcgacagcgccaaggtgaccgagaacgtggtgcagcccatgaaggagctgtacggcatcaacctgagcgacggcctgagcgaggaggacttcagcatctacagcagaacccccatcagcgccttcagccaggacaacatctacgaggtgcagccccccagagtggacagaaagagcaccgagatcttccaggcccacatccaggccagccagggcatcatgcagcccctgggcaaggaggacagcagcatgtacagagagtacatcagaaacagatacctgtag

SEQ ID NO: 331159 - DNA, 714 bp, Artificial Sequence
  derived and/or modified sequence
atgagatacttcctggtgggcagcaacaacgccgagaccaagtacagagtgctgaagatcgacagaaccgagcccaaggacctggtgatcatcgacgacagacacgtgtacacccagcaggaggtgagagagctgctgggcagactggacctgggcaacagaaccaagatgggccagaagggcagcagcggcctgttcagagccgtgagcgccttcggcgtggtgggcttcgtgagattcctggagggctactacatcgtgctgatcaccaagagaagaaagatggccgacatcggcggccacgccatctacaaggtggaggacaccaacatgatctacatccccaacgacagcgtgagagtgacccaccccgacgaggccagatacctgagaatcttccagaacgtggacctgagcagcaacttctacttcagctacagctacgacctgagccacagcctgcagtacaacctgaccgtgctgagaatgcccctggagatgctgaagagcgagatgacccagaacagacaggagagcttcgacatcttcgaggacgagggcctgatcacccagggcggcagcggcgtgttcggcatctgcagcgagccctacatgaagtacgtgtggaacggcgagctgctggacatcatcaagagcaccgtgcacagagactggctgctgtacatcatccacggcttctgcggccagagctag

SEQ ID NO: 331160 - DNA, 210 bp, Artificial Sequence
  derived and/or modified sequence
atgaagccccccagcagcatccagaccagcgagttcgacagcagcgacgaggagcccatcgaggacgagcagacccccatccacatcagctggctgagcctgagcagagtgaactgcagccagttcctgggcctgtgcgccctgcccggctgcaagttcaaggacgtgagaagaaacgtgcagaaggagaagaagaagaagaagaagtag

SEQ ID NO: 331161 - DNA, 238 bp, Artificial Sequence
  derived and/or modified sequence
cggcactggtctcgacgtggggcggccagcgatgaagccgcccagttcaatacaaacaagtgagtttgactcatcagatgaagagcctattgaagatgaacagactccaattcatatatcatggctatctttgtcacgagtgaattgttctcagtttctcggtttatgtgctcttccaggttgtaaatttaaagatgttagaagaaatgtccaaaaagaaaaaaaaaaaaaaaaaaag

SEQ ID NO: 331162 - DNA, 210 bp, Artificial Sequence
  derived and/or modified sequence
atgaagcctccctcttccatacagacctcagaatttgactcaagtgatgaagaacctattgaggatgagcagacccctatacacattagttggctctccctcagccgggtcaattgtagccaattccttgggctgtgcgctttgcccggctgcaagtttaaagacgtgcggaggaatgttcagaaagagaagaagaagaagaagaaatag

SEQ ID NO: 331163 - DNA, 210 bp, Artificial Sequence
  derived and/or modified sequence
atgaagccacccagcagcatccagaccagcgagtttgacagcagtgatgaggagcccattgaagatgagcagacccccatccacatctcctggctgagcctgagccgggtgaactgcagccagttcctgggcctgtgtgccctgcccggctgcaagttcaaggatgtgagaagaaatgtgcagaaggagaagaagaagaagaagaagtag

SEQ ID NO: 331164 - DNA, 210 bp, Artificial Sequence
  derived and/or modified sequence
atgaagccccccagcagcatccagaccagcgagttcgacagcagcgatgaggagcctattgaagacgaacagacccccatacatatcagttggctgtccctctcgcgagtaaactgtagccagttcctgggcctatgcgctctgccaggttgcaagttcaaagatgtccgaaggaacgtgcagaaagaaaagaaaaagaaaaagaaatag

SEQ ID NO: 331165 - DNA, 210 bp, Artificial Sequence
  derived and/or modified sequence
atgaaaccaccaagctctatccaaacgagtgagttcgactcctccgacgaagagcctatcgaggacgagcaaactcccatacatattagttggctgtcactgtcaagggtgaactgttcacagtttctgggactttgtgcactgccaggctgtaagttcaaagacgtgcgacgcaatgtacagaaggagaaaaagaaaaagaagaaatag

SEQ ID NO: 331166 - protein, 91 aa, Artificial Sequence
  derived and/or modified sequence
MPGIKRILTVTILALCLPSPGNAQAQCTNGFDLDRQSGQCLDIDECRTIPEACRGDMMCVNQNGGYLCIPRTNPVYRGPYSNPYSTPYSGP

SEQ ID NO: 331167 - protein, 1174 aa, Artificial Sequence [sequence omitted]

SEQ ID NO: 331168 - protein, 195 aa, Artificial Sequence
  derived and/or modified sequence
MPLPFGLKLKRTRRYTVSSKSCLVARIQLLNNEFVEFTLSVESTGQESLEAVAQRLELREVTYFSLWYYNKQNQRRWVDLEKPLKKQLDKYALEPTVYFGVVFYVPSVSQLQQEITRYQYYLQLKKDILEGSIPCTLEQAIQLAGLAVQADFGDFDQYESQDFLQKFALFPVGWLQDEKVLEEATQKVALLHQKY

SEQ ID NO: 331169 - DNA, 6089 bp, Artificial Sequence
  derived and/or modified sequence
cagcgctggcgtcaatgctcccttcctcgggccattggagactccgttgctttttaatggcggcagcggctgctgggtgagcagctggaggccggacagtgttcgtcccatccggagaggatcgctttctcctggcgtcaccagcgctgggttggtgggggtagcttttccctctttgctcctccattcttgaagaaagaagaagatgccactgccatttgggttgaaactgaaacgcacccggcgctacacggtgtccagcaagagttgcctggttgcccggatccaactgcttaataacgagtttgtggagttcaccctgtccgtggagagcactggccaggaaagcctcgaggccgtggcccagaggctggagctgcgggaggtcacttacttcagcctctggtactacaacaagcaaaatcagcgccggtgggtagatttggaaaaacctttgaagaagcagctggataaatatgcattggaacctaccgtctattttggagtggtgttttatgtgccttcagtttctcagctgcagcaggagattaccaggtatcagtattatctgcaactgaagaaagatatcttggaaggaagtattccttgtaccttagaacaagcaattcagctagcaggcttagctgttcaagcggattttggtgactttgatcagtatgaatcccaggactttcttcagaaatttgccttgtttcctgtgggatggttacaagatgaaaaagtattggaagaagcaacccaaaaagtggccttactacatcagaaatacagagggctcacagctcctgatgctgaaatgctgtacatgcaggaggtagagagaatggatggctatggagaagagagctaccctgctaaggatagccaaggaagtgacatatccattggagcgtgtcttgaaggtatctttgtgaaacacaagaatggaaggcatcctgtggtatttaggtggcatgacattgccaacatgtcccacaacaagtccttttttgcattagagctggcaaataaagaggagaccattcaatttcaaactgaagacatggaaacagcaaaatacatttggagactctgtgttgcgcgacacaagttttacagactaaaccagtgtaacctgcaaactcagactgtcacagtgaacccaatcaggaggaggtcttcttcaaggatgtctctgcctaaaccccagccctacgtgatgcctcccccaccgcagttgcactataatggacattatacagaaccatatgcttcttcccaagataacctctttgtgcccaaccagaacggatactactgtcactctcagacaagcttggatagagcccagattgacctcaacggtcggatccgtaatggcagtgtctacagtgcacacagcaccaactccttaaataatcctcagccctacttgcagccctcgccgatgtcgtccaaccctagcatcaccgggagtgacgtcatgaggcctgactacctcccgtcccatcggcacagcgccgtgatacccccgtcctaccgccccaccccagactatgagactgtgatgaagcagctcaacaggggcctggtgcatgcggaacggcagagccactcgctgcgaaacctcaacatcggcagctcgtacgcctacagcaggcccgcggcgctggtctacagccagcccgagatccgcgagcacgcacagctcccctcgccagcggccgcacactgcccgttcagcctgagctacagcttccacagcccgtctccctacccctaccctgccgagcggcggcccgtggtgggcgcggtcagcgtgccggagctgaccaatgcgcagctgcaggcgcaggactacccgtctcccaacatcatgcggacgcaggtgtaccggccacccccaccctacccgccccccaggcccgccaacagcacgccagacctgtcccgccacctttacatcagcagcagcaaccccgacctcatcacgcggcgcgtgcaccactcggtgcaaacgttccaggaggacagcctgcccgtggcgcactcgctgcaggaggtcagcgagcccctcaccgccgcgcgccacgcgcagctgcacaaacggaacagcatcgaggtggccgggctcagccacggcctggagggcctgcggctcaaggagcgcaccctatccgcgtcggcggcagaggtggcgccgcgagccgtctcggtgggctcccagcccagcgttttcaccgagaggacacagcgagaagggccggaggaggcggagggcttgaggtacggccataagaagtccctgtcggacgccaccatgctaatccacagcagcgaggaggaggaggacgaggacttcgaggaggagagcggggcccgggcgcctcctgcacgtgcgcgcgagcctcggcccggcctggcccaggacccacctggctgccctcgcgtcctgctcgccgggcccctgcacatcctggagcccaaggcccacgtcccagacgcggagaagaggatgatggacagcagccccgtccgcacgaccgcagaggcccagcggccctggagagacgggctgctgatgccctccatgtcggagtccgacctcaccacgtcaggccgctaccgagcccggagggactctctgaagaaaaggccggtgtcggaccttctctctgggaagaagaacatcgtggaagggctcccgcctctagggggaatgaaaaagactcgagtagatgcaaaaaaaattggtcctcttaaactggctgccctaaatggactctccctatctcgagtgcctctgcctgatgaaggaaaggaagtggctaccagagcaacgaatgatgaaaggtgtaaaattctggaacaacgattagaacaaggaatggtattcacagaatatgaaagaattcttaagaaacggctagttgatggggagtgctcaacagcacgactccctgaaaatgcagaaagaaatcgattccaagatgttcttccttatgatgatgtgagagtggagttggtcccaactaaagaaaacaacactggttacatcaacgcatcacatattaaggtctctgtcagtggaatcgaatgggattatattgccacacagggaccattacagaatacctgtcaagatttttggcagatggtatgggaacagggaattgcaattatagcaatggtgacagcagaagaggagggtggaagggagaagagctttaggtactggccacgacttggttccaggcacaacactgtcacctatggaaggtttaagatcacgacccggttccgcacagactctggctgctatgccaccacaggcctgaagatgaagcacctccttactgggcaagagaggaccgtctggcacctccaatacacagactggcctgaacatggctgtccagaagacctcaagggatttttatcatatcttgaagagatccagtctgttcgacgccatacaaatagcacaagtgatccccaaagccccaaccctccgttgttggtccactgcagtgctggggtaggaaggactggcgtggtgattttgtcggagatcatgatcgcctgcctggaacacaatgaggtgctggacatcccgagagtgctggacatgctgaggcaacagagaatgatgctggtgcagactctctgccagtacacatttgtgtacagagtcctcatccagttcctgaaaagctccaggctcatctaagctcccacaatttcttacggggccagtcatgtgaagcgtttacagcttaaaaaaaaagcgcttgcctaactcatactttcccgttgacacttgatccacgcagcgtggcactgggacgtaagtggcgcagtctgaatggcggcacgctgaaggaaacgtgcgaagcacaggctgaagaggggtttctaacctgggaaaggtgctcaaggaggacttggtttcaagggccttgccctgccccggtctgtccggtttgcagtacttgcacacattttggagattgtattttctagacaattctctattttactgaagctatgctgggcaattctggcaatcattaaagtgcatagatttctatcttaaactaatttttgataatggagtttttattttatgacaaatatttagggatttttctagtgagaaacaactttgtgtaaggatgatccacagatatgagttgctcctatataactttgtatttaaaaatcatgttattatcttttgttattttttaaaaaccttgggtacttaataatggtttagttgccaaactgaaaactatactgagaatctgtgttattttgaaacatcaaaaggatttttctatccagaacattttttatcctaaaaattctatatagttgtaccttctgtttttcaaatgagagctcaattcatttagatactgaaatgagtcagttaatgtaaagttgaggatgaaggcacattatttaaaatgtaagagaataagcattattttttcagtattattcatagatctaaatgaatttgattttattggttgaaaatgaagtgaaaaacaattgcctagggtggttttaagcacttttttgttaaaaacaaatctgagttttaatatatgtgttgctttgtagatgacacaataacaatgggcgctgagaagcgttttgggagagattaaggactaagagtatgtaagatgactaggacaagagtaggtggagtgtgatggtaaatgcaggatgccttcgtctttacaaaaatgcagtattatctatactcagactgaggtgctgggatggcgagcaggggaccccacagcactgtccccagggaattcaagtcctgtgaccgccagtgacttactccgtttccttggggcttttcccacctcaacctgtattgtttctttttcataaataaattcagcattatagtatcattaaaagaagccttaaagaggcgtatttttccttttggttgaaggaagggaatagttaataatagttttcacctcttctcccaaaaagtacagtccaaatttgtgcacagagattgctgtggtattcaagaggtacttgcattttagctccttaataattccctggccagtgttagctgtttagtgccccctcacccatcccatttaggcacatcccaatagacagagccaggctgagttacagggggagagtgtcatctctggccccgattaagatggccttgtcacagtgaccgctgagtaggcatggatgagtgggatatttagctgaggaaccctttcccttttccttctttttggggtctcttcttacagtgaacttccaaaatgtcaaatctagggctgtttcccaaattacactattctaggcatcattttgattcccatgtcactccttaactcacttccttgagcactacatgtatgttgtcagccacgagacaggacttcctaaatagtgtgtgcaccagcctaactctgccttacccagaaaccaaccacctaagaggaaaactcagaagatattaatgaaaactaattgaaagtacgcacacttctcatgtaggaacaaaattaaaattttacatttttattttacaaaattaaaaaattacattttgtaggaacaaaatgtaaattttgtaaatacaaaattctttttaaagtcctgtttaaagaacagtagaactaagtgaaaatattcagaacgagctccttagaagaaaggaataagaactttttactggaactattttccatctctagaaaaagtgcttcttcccctccccctccctctccatggtacgtttttgtgaaaatgcttttctgtcaggtttaaacaaacagtttgacatagctcgttgacaagaacatattgtaaaacaaatctaattaaagagtaatatgtggtctatttgtgttcctgttgtaataatttgataagtaaacttctgagggcaaaattactgtttaatattactcttaaaatgttgcatgtttggcgtcattcctaagagccatgtaattttaaacttttaattgcagttagtgaatatgaaaggatttctgaataaaaatctatccacatta

SEQ ID NO: 331170 - DNA, 3525 bp, Artificial Sequence
  derived and/or modified sequence
atgcccctgcccttcggcctgaagctgaagagaaccagaagatacaccgtgagcagcaagagctgcctggtggccagaatccagctgctgaacaacgagttcgtggagttcaccctgagcgtggagagcaccggccaggagagcctggaggccgtggcccagagactggagctgagagaggtgacctacttcagcctgtggtactacaacaagcagaaccagagaagatgggtggacctggagaagcccctgaagaagcagctggacaagtacgccctggagcccaccgtgtacttcggcgtggtgttctacgtgcccagcgtgagccagctgcagcaggagatcaccagataccagtactacctgcagctgaagaaggacatcctggagggcagcatcccctgcaccctggagcaggccatccagctggccggcctggccgtgcaggccgacttcggcgacttcgaccagtacgagagccaggacttcctgcagaagttcgccctgttccccgtgggctggctgcaggacgagaaggtgctggaggaggccacccagaaggtggccctgctgcaccagaagtacagaggcctgaccgcccccgacgccgagatgctgtacatgcaggaggtggagagaatggacggctacggcgaggagagctaccccgccaaggacagccagggcagcgacatcagcatcggcgcctgcctggagggcatcttcgtgaagcacaagaacggcagacaccccgtggtgttcagatggcacgacatcgccaacatgagccacaacaagagcttcttcgccctggagctggccaacaaggaggagaccatccagttccagaccgaggacatggagaccgccaagtacatctggagactgtgcgtggccagacacaagttctacagactgaaccagtgcaacctgcagacccagaccgtgaccgtgaaccccatcagaagaagaagcagcagcagaatgagcctgcccaagccccagccctacgtgatgcccccccccccccagctgcactacaacggccactacaccgagccctacgccagcagccaggacaacctgttcgtgcccaaccagaacggctactactgccacagccagaccagcctggacagagcccagatcgacctgaacggcagaatcagaaacggcagcgtgtacagcgcccacagcaccaacagcctgaacaacccccagccctacctgcagcccagccccatgagcagcaaccccagcatcaccggcagcgacgtgatgagacccgactacctgcccagccacagacacagcgccgtgatcccccccagctacagacccacccccgactacgagaccgtgatgaagcagctgaacagaggcctggtgcacgccgagagacagagccacagcctgagaaacctgaacatcggcagcagctacgcctacagcagacccgccgccctggtgtacagccagcccgagatcagagagcacgcccagctgcccagccccgccgccgcccactgccccttcagcctgagctacagcttccacagccccagcccctacccctaccccgccgagagaagacccgtggtgggcgccgtgagcgtgcccgagctgaccaacgcccagctgcaggcccaggactaccccagccccaacatcatgagaacccaggtgtacagacccccccccccctaccccccccccagacccgccaacagcacccccgacctgagcagacacctgtacatcagcagcagcaaccccgacctgatcaccagaagagtgcaccacagcgtgcagaccttccaggaggacagcctgcccgtggcccacagcctgcaggaggtgagcgagcccctgaccgccgccagacacgcccagctgcacaagagaaacagcatcgaggtggccggcctgagccacggcctggagggcctgagactgaaggagagaaccctgagcgccagcgccgccgaggtggcccccagagccgtgagcgtgggcagccagcccagcgtgttcaccgagagaacccagagagagggccccgaggaggccgagggcctgagatacggccacaagaagagcctgagcgacgccaccatgctgatccacagcagcgaggaggaggaggacgaggacttcgaggaggagagcggcgccagagccccccccgccagagccagagagcccagacccggcctggcccaggacccccccggctgccccagagtgctgctggccggccccctgcacatcctggagcccaaggcccacgtgcccgacgccgagaagagaatgatggacagcagccccgtgagaaccaccgccgaggcccagagaccctggagagacggcctgctgatgcccagcatgagcgagagcgacctgaccaccagcggcagatacagagccagaagagacagcctgaagaagagacccgtgagcgacctgctgagcggcaagaagaacatcgtggagggcctgccccccctgggcggcatgaagaagaccagagtggacgccaagaagatcggccccctgaagctggccgccctgaacggcctgagcctgagcagagtgcccctgcccgacgagggcaaggaggtggccaccagagccaccaacgacgagagatgcaagatcctggagcagagactggagcagggcatggtgttcaccgagtacgagagaatcctgaagaagagactggtggacggcgagtgcagcaccgccagactgcccgagaacgccgagagaaacagattccaggacgtgctgccctacgacgacgtgagagtggagctggtgcccaccaaggagaacaacaccggctacatcaacgccagccacatcaaggtgagcgtgagcggcatcgagtgggactacatcgccacccagggccccctgcagaacacctgccaggacttctggcagatggtgtgggagcagggcatcgccatcatcgccatggtgaccgccgaggaggagggcggcagagagaagagcttcagatactggcccagactgggcagcagacacaacaccgtgacctacggcagattcaagatcaccaccagattcagaaccgacagcggctgctacgccaccaccggcctgaagatgaagcacctgctgaccggccaggagagaaccgtgtggcacctgcagtacaccgactggcccgagcacggctgccccgaggacctgaagggcttcctgagctacctggaggagatccagagcgtgagaagacacaccaacagcaccagcgacccccagagccccaacccccccctgctggtgcactgcagcgccggcgtgggcagaaccggcgtggtgatcctgagcgagatcatgatcgcctgcctggagcacaacgaggtgctggacatccccagagtgctggacatgctgagacagcagagaatgatgctggtgcagaccctgtgccagtacaccttcgtgtacagagtgctgatccagttcctgaagagcagcagactgatctag

SEQ ID NO: 331171 - DNA, 588 bp, Artificial Sequence
  derived and/or modified sequence
atgcccctgcccttcggcctgaagctgaagagaaccagaagatacaccgtgagcagcaagagctgcctggtggccagaatccagctgctgaacaacgagttcgtggagttcaccctgagcgtggagagcaccggccaggagagcctggaggccgtggcccagagactggagctgagagaggtgacctacttcagcctgtggtactacaacaagcagaaccagagaagatgggtggacctggagaagcccctgaagaagcagctggacaagtacgccctggagcccaccgtgtacttcggcgtggtgttctacgtgcccagcgtgagccagctgcagcaggagatcaccagataccagtactacctgcagctgaagaaggacatcctggagggcagcatcccctgcaccctggagcaggccatccagctggccggcctggccgtgcaggccgacttcggcgacttcgaccagtacgagagccaggacttcctgcagaagttcgccctgttccccgtgggctggctgcaggacgagaaggtgctggaggaggccacccagaaggtggccctgctgcaccagaagtactag

SEQ ID NO: 331172 - DNA, 3525 bp, Artificial Sequence
  derived and/or modified sequence
atgccactcccgttcggcctgaagctcaaaaggacaaggagatataccgtgagctccaagagctgtctcgtggcacgcattcagctgctcaataacgaattcgtggagttcacactgtcagtggagagcactggccaggagtcactggaagctgtggcccagcggctggagctgcgcgaagtgacatacttctctctttggtactataacaaacagaatcagcgtcgctgggtggacttggagaagccacttaagaagcagttagataaatatgccctggagcccactgtttactttggcgtcgttttctacgttccaagcgtgagccagttacaacaggaaattacccgttaccagtattatctccagcttaagaaggatatcctggagggctctatcccatgtacactggagcaggccattcagttggccgggttagcagtgcaggctgactttggagacttcgaccaatatgagagccaggactttctgcagaagtttgcattattcccggtggggtggcttcaggacgagaaggtcttagaggaggctacgcagaaagtggccttactgcaccaaaagtatagagggttgactgcacccgatgcagaaatgctctacatgcaagaggttgagcggatggatggctatggagaggaatcatacccagctaaagacagccagggcagtgacatttccattggcgcctgcctggaaggcatatttgtgaaacataaaaatggcaggcatcctgttgtgttccgttggcatgacattgctaatatgtcacacaataagtcctttttcgccctggagcttgctaacaaggaggagactatccagttccagacagaggatatggaaaccgcaaaatatatctggagactgtgtgtcgcccgccataaattctaccgactgaaccagtgcaaccttcagacgcaaaccgtgactgtaaatccaattcggagaagaagctcctctcggatgagccttcccaagccgcagccgtatgtgatgccaccccccccccagctgcactacaatggtcattacacagaaccttatgcttctagtcaggataatttgtttgttcccaatcagaacgggtactattgtcactctcagacctcattagatagggcacagatcgacctgaatggccgcatccgtaacggttctgtttattcggcccactcaactaattccctcaataatccccagccttatcttcagcccagcccaatgagctcaaacccttccatcacaggaagtgatgttatgcggccggactacttgcccagtcaccggcattcagcagtgattcccccctcttaccggccaacccccgactacgaaaccgtgatgaagcagctcaaccgcggcttagtccatgcagaacgccagagtcattccttgagaaacctaaatattgggtcctcctacgcttactctaggcccgcagccctcgtttatagccagcctgagataagagaacacgcacaactcccatcccctgccgccgctcattgtccctttagtctatcatacagttttcactctccttccccctacccctatcccgctgagagacgtcccgtggtgggggccgtttcggtccccgagctcaccaacgcacagctccaggcccaggactatccgtctccaaacatcatgcgcacacaagtgtatcgcccccctccgccctaccctcctccacggcccgcgaacagcactcccgatctttctcgccatctgtatatttcatcttctaacccagatctgatcaccaggagagtgcaccatagcgtacagacctttcaagaggatagtcttccagtcgcacatagccttcaggaggtatcagagcccctcactgccgcaaggcatgcacagctgcataaacgaaactcaatcgaggtggctggtctgtctcacgggctcgaagggctgaggctcaaagaaagaacgctgtccgccagcgccgcagaggttgctccccgggcagtgagcgtcgggtcccagccatccgtatttacagaacgaacgcagcgcgagggccctgaagaagcggaaggattacggtacgggcataaaaaatcattgtccgacgccaccatgctcattcactcatccgaggaggaggaagacgaagatttcgaagaggagtccggggcccgggcacccccggcgagggctcgggaaccccgcccgggcctcgcacaggatccacccggctgtccgagagtcctactcgctggacccttgcacatcctggaacctaaggcacacgtccctgatgccgaaaaaagaatgatggacagttcacccgtcaggacgacagctgaggctcagagaccttggagggacggattgctcatgccttccatgagtgaaagcgatttgaccactagcggaagataccgggcacgaagagactccctcaagaaacgaccagtgagcgatctactgtcgggaaaaaagaatatcgtggaaggattaccaccactcggaggcatgaaaaaaacgcgggtcgacgctaagaaaatcgggccattgaagctggctgccctgaacggtctgagcctcagtcgagtgccccttcccgacgaggggaaggaggttgcaacccgggcaactaacgacgaacgatgtaagattctcgagcagagactcgagcagggcatggtattcacagagtacgaaagaatactgaaaaaacggctggtcgacggtgagtgctcaactgcccggcttcccgaaaacgcagagaggaacagatttcaggatgtgctcccttacgatgacgtgcgcgtagaactcgtacccacaaaggaaaacaacaccggctacatcaacgcttcgcatatcaaggtatccgtatccggtatcgagtgggactatatagcaactcaaggcccattacagaacacttgccaggacttctggcagatggtctgggagcaaggtatcgccatcatcgccatggtcacagcggaggaggaaggcggcagggaaaagtctttccgctattggcctcgcttagggagcaggcacaataccgtgacctacgggcgattcaaaattaccacccggtttcgcactgacagtggttgttatgccacaacgggccttaaaatgaaacacctgctgactggccaggaacgtaccgtgtggcacctccagtatactgattggccagaacatgggtgcccggaagatctgaaaggtttcctgtcatacttagaggagatccagtctgtgaggagacacacaaattcaacatcagatcctcagagtccaaacccacccttgctggtgcactgctccgctggggtagggaggactggcgtggtcatccttagtgaaattatgattgcctgcctggagcacaatgaagtgctggatattcctcgggtgctggatatgctccggcaacagagaatgatgctggtgcagacgctttgtcaatatactttcgtgtatagggtgctcatacagttccttaagagtagcaggctgatttag

SEQ ID NO: 331173 - DNA, 588 bp, Artificial Sequence
  derived and/or modified sequence
atgccgctgcccttcggattgaagctgaaaaggacacgccggtacacagtatcgagcaagtcctgtcttgtcgcacggatccagctcctgaacaacgaattcgtcgagtttaccctgtcggtagagtcgaccggacaggaaagtttagaggccgtggcccagcggctggaactgcgtgaagtcacatacttctcattatggtattacaacaagcagaaccagcgccgctgggtggacctcgagaaacccctgaaaaagcagttggataaatacgccctagagccaacagtgtacttcggcgtcgttttctacgtaccctcggttagtcaactccagcaggaaattacacgataccagtattacctgcagctcaaaaaagatattctcgagggcagcatcccatgcactttggaacaagcaatacagcttgccggcttggctgtccaagctgacttcggtgacttcgaccagtacgagagccaggactttttgcagaagtttgcactgtttcctgtcggctggctgcaggacgagaaagtgctcgaagaagcaacgcagaaagttgccttgttgcaccagaagtactag

SEQ ID NO: 331174 - DNA, 3525 bp, Artificial Sequence
  derived and/or modified sequence
atgccactcccattcggcctcaaactgaagcggactaggcgctataccgtgtcctccaagagctgcctagttgccagaatacagctcttgaacaatgaattcgttgaatttacactgtcagtggaaagcaccgggcaggagagcctggaggctgtggctcagagactggaactgagagaggtgacttacttttccttatggtactacaataaacaaaaccagaggcgctgggtcgacctcgagaagccactcaagaagcagctggacaagtacgcactggaacccaccgtgtattttggagtggtgttttatgtcccttctgtgagccagcttcagcaggaaattacccgctatcagtactacctgcagctgaaaaaggacatcctcgaagggagcattccatgtacgctcgagcaagcaatccagctggccggattagcagttcaggccgactttggtgattttgatcagtacgaatctcaagacttcctgcagaagtttgctttgttccccgtgggatggctacaggatgaaaaagtcctggaagaggcaacacagaaagtggccctgctccaccagaagtacaggggtctgacagctccagatgcagaaatgctgtacatgcaggaagtggagagaatggatggatacggcgaggaaagttaccccgccaaagacagccagggtagcgacatctccatcggcgcttgcttggagggcattttcgtaaagcacaagaacggaagacaccctgttgtcttcaggtggcacgatatcgccaatatgtcccacaataagagctttttcgcattggaactcgcaaataaagaagaaactatccagttccagaccgaggatatggaaactgccaaatacatctggagactgtgtgttgctaggcataaattctaccggctcaatcaatgtaaccttcagacgcagactgtgactgtcaatcctattaggcgacgctcctcttcccggatgtcacttcctaaacctcagccttatgtcatgccaccaccaccccagttgcattacaacgggcactatacagagccatatgcttctagccaggataaccttttcgtgccaaaccagaatgggtattactgtcactcccagacctccttggacagagcccagatagatctgaacgggcggatacggaatgggtcagtatattcagcccattcaaccaatagtttaaacaatcctcagccttatctgcaaccgagcccaatgtccagcaacccctccattacaggatccgacgttatgcgccccgactaccttccatctcataggcattcagccgtcatccccccaagctacagaccaactccagattatgagactgtgatgaagcagttgaatcgcggattggtccatgcggaacgacagagccatagtctccgcaatctgaacattggttccagctatgcttactctcgccccgctgcactggtgtacagtcagcctgaaattcgtgagcacgcccagctgccaagtcccgctgccgcacattgtcctttcagtctgagctattcctttcacagtccttcaccctacccttatcccgctgagaggcgccccgtggttggcgctgtttccgtacccgaattgaccaatgcccagcttcaggcccaggactaccctagccccaatattatgaggacacaagtttaccggcccccccctccatatcctccgccacgccccgccaattctacacctgatctgagccggcatctgtatatcagctcttccaaccccgatctgatcacaagacgtgtccaccatagtgttcagaccttccaggaggattcacttccggtggcccattcacttcaggaagtctcagaaccgctgactgccgctagacacgcccagctgcataagcgcaattccatagaggtggctggactgtcacacggattggagggcttgaggctaaaggaacgcaccctcagtgcctccgcggcggaggtggccccgcgcgcagtttctgtggggagtcaacccagtgtgttcactgaaaggacacagcgcgaagggcctgaggaagcagagggactgcgatatgggcataagaagtcactgtcagatgccaccatgttaatccactctagcgaagaagaagaggacgaagatttcgaggaggaatctggtgccagagccccaccagctcgagctcgcgagccaaggcctggactagcacaggacccacccggctgtcccagagtgctgctggcgggtccacttcatatccttgaacccaaggcccacgtgccagacgcggagaagcgcatgatggactcctcaccagtgcggactaccgcagaagcgcagcggccttggcgagacggcctgttgatgcctagcatgagcgaaagcgacctcaccacctctggacggtaccgcgcaagacgcgattccctcaagaaaagaccagtttcagacctgttaagcggtaaaaaaaacattgtagagggattacctccactgggtgggatgaagaagacccgggtggacgcaaagaaaattggccctctcaaactcgccgctttgaatggcctgtctttgtcacgagtgccgctccctgacgaggggaaggaggttgccacgcgggctaccaacgatgagaggtgtaagatcctggagcaacgactagaacagggaatggtgtttaccgaatatgagagaattttaaaaaagcggttagtggacggggagtgttcaactgcccgtttgccagagaatgccgaacggaatcggttccaagatgtgctcccatacgatgacgtgcgtgtggagctggtgccgacaaaggagaacaataccggttacataaacgctagccacataaaagtgtctgtcagcggtatagagtgggactatattgccacccagggaccgctccagaatacatgtcaggacttttggcagatggtttgggagcagggaattgccattattgcaatggtgactgcagaggaggagggggggagagaaaagagcttcaggtattggcctcgactgggtagcaggcacaataccgtcacatatgggagatttaagattaccactagattcagaaccgatagtggctgttatgccactacagggcttaagatgaagcacttgttaacgggacaggagagaaccgtttggcatctacagtataccgattggcccgagcacggatgccctgaggatcttaagggtttcttatcatatctagaagaaattcagtccgtccgtaggcacaccaatagtaccagcgacccacagtctcccaaccctcccctgcttgttcattgttccgccggagtgggtcggaccggcgttgtcatcctgtctgagattatgattgcgtgcctcgagcacaatgaggtgctcgatattcctagagtgctcgatatgctgaggcagcagcgcatgatgctagtgcagaccctctgccagtatacttttgtctaccgtgtgctaattcagtttctgaagtcttctcggctgatctag

SEQ ID NO: 331175 - DNA, 3525 bp, Artificial Sequence
  derived and/or modified sequence
atgcccctgcccttcggcctgaagctgaagaggacccggcgctacacagtgagcagcaagagctgcctggtggcccgcatccagctgctgaacaatgaatttgtggagttcaccctgtctgtggagagcacaggccaggagagcctggaggccgtggcccagaggctggagctgcgggaggtgacctacttcagcctgtggtactacaacaagcagaaccagaggcgctgggtggacctggagaagcccctgaagaagcagctggacaagtatgccctggagcccaccgtgtactttggagtggtgttctacgtgcccagcgtgtcccagctgcagcaggagatcacccgctaccagtactacctgcagctgaagaaggacatcctggagggcagcatcccctgcaccctggagcaggccatccagctggccggcctggccgtgcaggccgactttggagactttgaccagtatgagagccaggacttcctgcagaagtttgccctcttccctgtgggctggctgcaggatgagaaggtgctggaggaggccacccagaaggtggccctgctgcaccagaagtaccggggcctgacagccccagatgctgagatgctgtacatgcaggaggtggagaggatggatggctatggagaggagagctacccagccaaggacagccagggcagtgacatcagcatcggggcctgcctggagggcatctttgtgaagcacaagaatggccgccaccctgtggtgttccgctggcatgacatcgccaacatgagccacaacaagagcttctttgccctggagctggccaacaaggaggagaccatccagttccagacagaggacatggagacagccaagtacatctggaggctgtgtgtggcccggcacaagttctaccgcctgaaccagtgcaacctgcagacccagacagtgacagtgaaccccatcagaagaagaagcagcagcaggatgagcctgcccaagccccagccctacgtgatgcctcctccaccccagctgcactacaacggccactacacagagccctatgccagcagccaggacaacctgtttgtgcccaaccagaatggctactactgccacagccagaccagcctggaccgggcccagattgacctgaatggccgcatcagaaatggatctgtgtacagcgcccacagcaccaacagcctgaacaacccccagccctacctgcagcccagccccatgagcagcaaccccagcatcaccggcagtgatgtgatgaggccagactacctgcccagccaccgccacagcgctgtgatcccccccagctaccggcccaccccagactatgaaacagtgatgaagcagctgaacagaggcctggtgcatgctgagcggcagagccacagcctgaggaacctgaacatcggcagcagctatgcctacagcaggcctgctgccctggtgtacagccagcctgagatccgggagcacgcccagctgcccagccctgctgctgcccactgccccttcagcctgagctacagcttccacagccccagcccctacccctacccagctgagcggcggcctgtggtgggcgctgtgtctgtgcctgagctgaccaatgcccagctgcaggcccaggactaccccagccccaacatcatgaggacccaggtgtacagacctcctccaccctaccccccacccaggcctgccaacagcaccccagacctgagccgccacctgtacatcagcagcagcaacccagacctgatcaccaggagagtgcaccacagcgtgcagaccttccaggaggacagcctgcctgtggcccacagcctgcaggaggtgtctgagcccctgacagctgcccggcatgcccagctgcacaagagaaattccattgaggtggccggcctgagccacggcctggagggcctgcggctgaaggagaggaccctgagcgccagcgctgctgaggtggcccccagggctgtgtctgtgggcagccagcccagcgtcttcacagagaggacccagcgggagggccctgaggaggccgagggcctgcgctatggccacaagaagagcctgagtgatgccaccatgctgatccacagcagcgaggaggaggaggatgaagattttgaggaggagagcggggcccgggcccccccagcccgggcccgggagcccaggcctggcctggcccaggaccccccaggctgcccccgggtgctgctggccggccccctgcacatcctggagcccaaggcccacgtgcctgatgctgagaagaggatgatggacagcagccctgtgaggaccacagctgaggcccagaggccctggagagatggcctgctgatgcccagcatgtctgagagtgacctgaccaccagcggccgctaccgggcccggcgggacagcctgaagaagaggcctgtgtctgacctgctgagcggcaagaagaacatcgtggagggcctgccccccctgggcggcatgaagaagaccagggtggatgccaagaagattggccccctgaagctggccgccctgaatggcctgagcctgagccgggtgcccctgcctgatgagggcaaggaggtggccacccgggccaccaatgatgagcgctgcaagatcctggagcagaggctggagcagggcatggtgttcacagaatatgaaagaatcctgaagaagaggctggtggatggagagtgcagcacagcccggctgcctgaaaatgctgagaggaaccgcttccaggatgtgctgccctatgatgatgtgcgggtggagctggtgcccaccaaggagaacaacacaggctacatcaatgccagccacatcaaggtgtctgtgtctggaattgagtgggactacatcgccacccagggccccctgcagaacacctgccaggacttctggcagatggtgtgggagcagggcatcgccatcatcgccatggtgacagctgaggaggagggcggccgggagaagagcttccgctactggccccggctgggcagccgccacaacacagtgacctacggccgcttcaagatcaccacccgcttcagaacagacagcggctgctacgccaccaccggcctgaagatgaagcacctgctgaccggccaggagaggacagtgtggcacctgcagtacacagactggccagagcacggctgcccagaggacctgaagggcttcctgagctacctggaggagatccagagcgtgcggcggcacaccaacagcaccagtgacccccagagccccaacccccccctgctggtgcactgcagcgctggggtgggccgcactggagtggtgatcctgtctgagatcatgattgcctgcctggagcacaatgaggtgctggacatcccccgggtgctggacatgctgcggcagcagaggatgatgctggtgcagaccctgtgccagtacacctttgtgtacagagtgctgatccagttcctgaagagcagccgcctcatctag

SEQ ID NO: 331176 - DNA, 588 bp, Artificial Sequence
  derived and/or modified sequence
atgcccctgcccttcggcctgaagctgaagaggacccggcgctacacagtgagcagcaagagctgcctggtggcccgcatccagctgctgaacaatgaatttgtggagttcaccctgtctgtggagagcacaggccaggagagcctggaggccgtggcccagaggctggagctgcgggaggtgacctacttcagcctgtggtactacaacaagcagaaccagaggcgctgggtggacctggagaagcccctgaagaagcagctggacaagtatgccctggagcccaccgtgtactttggagtggtgttctacgtgcccagcgtgtcccagctgcagcaggagatcacccgctaccagtactacctgcagctgaagaaggacatcctggagggcagcatcccctgcaccctggagcaggccatccagctggccggcctggccgtgcaggccgactttggagactttgaccagtatgagagccaggacttcctgcagaagtttgccctcttccctgtgggctggctgcaggatgagaaggtgctggaggaggccacccagaaggtggccctgctgcaccagaagtactag

SEQ ID NO: 331177 - DNA, 3525 bp, Artificial Sequence
  derived and/or modified sequence
atgcccctgcccttcggcctgaagctgaagcggacccggcggtacacagttagctcgaagtcgtgtcttgtggctcggatccagctactcaataatgagttcgtcgagttcaccctcagcgttgagtctaccggacaggagagtttggaggcagtcgctcagcgtttagagctgagggaagtcacatacttctccctctggtattacaataagcagaatcagcggagatgggtggacctcgaaaaacccttgaaaaagcagttagataagtatgccttagagcctaccgtctactttggcgtcgttttttacgtgccttctgtgtcgcagctacagcaagaaataacacgttaccagtattacctccaactgaagaaagacatcctggagggtagtattccatgtaccttggaacaggcaatccagctggccgggctggccgtccaggctgactttggagactttgatcaatatgaatcacaggactttctgcaaaaatttgctttattccccgtggggtggctgcaggatgagaaggtgcttgaagaggctacccaaaaagtggcgctactgcatcagaaataccgaggactgaccgcacccgacgcggagatgctgtatatgcaggaagtagagagaatggacggctacggagaagagagttacccagctaaggactcacaggggagcgatattagtatcggtgcgtgtttggagggcatttttgttaagcataagaacggtcgacacccagtggttttccgatggcacgatatcgcaaatatgagtcataacaagagtttcttcgcgcttgaactcgccaacaaggaggagacaattcagtttcaaactgaagatatggagacagctaagtacatttggaggctatgtgtcgctaggcacaaattttaccgactgaaccagtgcaacctccagacacaaaccgtcaccgtgaaccccattcgacgcaggagctcttcgaggatgtctctgccaaagccacagccatacgttatgccccccccaccccagctgcactacaacggacactatacagaaccatatgccagtagccaggacaacctctttgtgccaaaccaaaatggctactactgtcactcccagacgagtctcgatagggcacagattgacctcaacggccgcatcagaaatggttccgtgtattctgcccattctaccaactcactgaataaccctcaaccttaccttcagccatcccccatgtcctctaaccccagtatcacaggttcagacgtgatgcggccggattacctgccttcccatcggcacagtgccgtaatccctccttcttacaggcctacccccgactacgaaaccgtcatgaagcagctaaatcggggcctcgtccatgccgagaggcagagtcatagcctacgcaatctcaatatcggttcttcatacgcttattcacggccagctgcgctggtctattctcaacctgagattagggaacacgcccagctcccatcccctgctgctgcgcactgccctttttcactgagctactcattccactcaccatccccatacccctaccccgccgaacgtcgcccagtcgtgggagccgtgtcggtcccagaactgaccaacgcacagctgcaggcccaggattaccctagccccaatatcatgcggactcaggtgtaccgtcctccaccaccctatccaccacccaggcccgccaattccacaccagatttgagtcgacacctttatatctcttctagtaaccccgacctgataacccggagagtgcaccactccgtccagacctttcaggaagactcactgcctgtggcgcactcccttcaggaggtatccgaaccactgacagctgcccggcacgcccagctccacaagcgcaactccatcgaagttgccggtctttcccatggattagagggactcagactgaaggagagaactctgtctgcatctgcagccgaggtggctccacgcgctgtttccgtcggaagccagccttctgtcttcacagagcggacccagcgggaaggccccgaagaggcagagggactcagatacggacacaagaagagtctctccgacgccactatgctcatccatagttcggaggaggaggaggacgaagactttgaagaagagagcggggcccgcgctccacccgctagggcacgtgagccccggcccggtttagcgcaagaccctcccgggtgcccccgggtgctgttggccgggcccctacacattcttgaaccgaaggcccatgtgcctgacgcagagaaaaggatgatggacagttccccagtacgtaccacagcagaggctcagaggccatggcgagatggattgcttatgccatccatgtccgagagcgacctgaccacctccggtcgctacagagcaagaagggattccctgaaaaaaagaccagtgtccgacttactcagcgggaagaagaatatagttgaaggcttgcccccactgggaggcatgaagaagacaagggtggatgccaaaaaaatcggccccctcaagctagcggctctgaatggcctgtccctcagtcgggttcctctgcccgacgaaggcaaggaggtggccactcgcgctactaacgatgagcggtgcaagatactcgaacaacggctggagcaaggaatggtgttcaccgagtatgagcgcattctgaaaaaaaggttggtcgatggtgagtgctcaaccgcccgccttcccgaaaacgcggaacgaaatcgatttcaggatgtgttgccgtatgatgatgtgcgggtcgagttggtgcccactaaggaaaacaatacgggctacatcaatgccagccacattaaggtgagtgtaagtggcatcgaatgggattatattgcaacacagggacccctacaaaatacgtgccaagatttttggcagatggtgtgggaacagggcatcgccatcattgccatggtcacagctgaggaggagggaggccgggagaaatctttcaggtactggccccggctcggctcccggcacaatacagtcacatacgggcgttttaaaattaccacaagattccgtacggactccgggtgctatgctacaacagggttaaagatgaagcatctcctgacaggacaggaacggaccgtctggcacctgcagtacaccgattggcctgaacacggctgtcccgaggacctgaaaggattcctgtcctatctcgaggaaatccagagtgtcagaagacatactaactcaacatccgatccacaatccccgaaccctcctctgctagtccattgctccgcaggggttggacgaacaggagtggtgattctcagtgaaattatgatcgcttgtttagagcacaatgaggtacttgacattccccgagttctggatatgctgcgtcagcagcgcatgatgctcgtgcaaacgctttgccagtatacctttgtgtatcgagtgctcattcagtttcttaaatctagcagactcatctag

SEQ ID NO: 331178 - DNA, 588 bp, Artificial Sequence
  derived and/or modified sequence
atgcccctgcccttcggcctgaagctgaagcggacccggcggtacacagtgagtagcaaaagctgtctggtggcacgcattcagcttctgaataatgagtttgtagaattcacacttagtgttgaatccaccggtcaggaatccctggaagccgtcgcccagcggcttgaactgcgcgaagtgacatacttctccttgtggtactataacaaacagaaccagcgccggtgggtcgacctggagaaacctcttaaaaaacagctcgacaagtacgctttggaacctactgtttatttcggggtcgtgttttacgtacctagcgtgtcgcagttacagcaggagattactcgctaccagtactatcttcagctaaagaaagacattcttgagggctccattccatgcaccctggagcaggccattcaactggctggtctggcagtgcaggcagattttggtgacttcgaccagtacgagtcccaggacttcttgcagaaattcgcattgtttcccgtggggtggctccaagatgagaaggttctcgaggaggctacgcaaaaagtcgcacttctgcaccagaagtattag

SEQ ID NO: 331179 - DNA, 3525 bp, Artificial Sequence
  derived and/or modified sequence
atgcccctgcccttcggcctgaagctgaagcggacccggcggtacaccgtgagcagcaaaagttgcctcgtggcccgcatccagcttctcaataacgaattcgtggagttcactctatcagtcgaatctactggacaagagtcactggaggccgttgctcaaagactcgaactccgcgaagtaacctatttctctctatggtattacaataaacagaaccagcgtagatgggtggaccttgagaaacctctgaagaagcaactggacaaatatgcattagagcccaccgtttatttcggagtcgtgttttacgtgccctccgtgtcacagctccagcaggagatcacccgctaccagtactatctgcagctgaagaaagatatcctggagggttcaatcccttgcaccctcgagcaggctatccaactggccggactcgcggtacaggctgatttcggagatttcgatcaatatgaatcacaagactttctgcagaagttcgctctcttccctgttgggtggttgcaggatgagaaagtgcttgaagaagcaacgcagaaggtggccttgctgcaccagaagtacagaggcctcacagctccagatgcggaaatgttgtatatgcaggaagtcgagcgcatggacgggtatggggaagaatcctaccccgcaaaagactcccaaggaagtgatatcagtataggtgcctgtttggagggcatttttgtcaagcacaaaaatggccgacaccccgtggtctttcgctggcatgacatcgcaaacatgtcccacaacaaatcttttttcgcactcgaactggccaacaaagaggagaccattcaatttcagacagaagatatggaaaccgctaaatacatatggaggctctgcgtggcacgacataagttctatcgcctgaaccagtgcaatctgcagacacagaccgtcacagtgaatcctattaggcggagatcttcctctcgaatgagtctgcctaaaccccagccctacgttatgcccccacctccccagctccattacaacggacattatactgaaccatacgcttcttctcaggacaatctattcgttccaaatcaaaacggctattactgtcactctcagacgtctctggacagagcccagatcgaccttaatggacggattagaaacgggtccgtgtatagcgctcatagcaccaactctctgaacaacccgcagccttatttgcagcccagcccgatgtcatccaacccctccattacaggatctgacgtgatgcgcccggactacctgccctcacaccggcatagcgccgtaatccctcctagctatcgccctacaccagactacgaaaccgtgatgaagcaattgaatcgcgggctcgtgcatgctgagcgacagtcccattccctcaggaatctcaacatcggaagctcgtatgcttactccagacccgcagccctggtctattctcagcccgagatccgagagcacgctcagctgccttcgcccgccgccgcccattgcccattcagcctgtcctactcctttcactccccatccccctacccatacccagctgagcgcagacctgtcgtgggggcagtctctgtgccagagctcacaaatgcccaacttcaggcccaggattacccatcgccaaatattatgagaacccaagtataccgtccccctcctccctatcccccacctcggccagccaactcaactccagacctcagtaggcacctgtatatttcaagtagcaatccagatctgattacccgtcgcgtacatcacagtgttcagaccttccaggaggacagcctccccgtggctcacagtctgcaggaggtctcagagcctctaactgctgcacgtcatgcacagctgcacaagcggaactccatcgaggttgcaggattaagccatggcctggaaggtctgcggctaaaggaaaggaccctgagtgcttctgcagctgaagtcgctcccagggccgtgtctgtgggatcccagcctagtgttttcactgagcgtacccaacgcgagggccccgaagaggccgaggggctgagatacggccacaagaagagtctatcagatgcgactatgctgatccactcatcagaagaggaggaggatgaagattttgaggaggagtcaggagcccgcgcccctccggcccgggctcgcgagccccggccgggcctcgcccaagatccaccgggatgccccagggtgctcctggctggtcctctgcatatcctggagcccaaagcacatgtgcccgacgctgagaagagaatgatggatagttcacccgtccgcacgaccgccgaagcccagcgaccatggcgcgatggactgctgatgccatcaatgagcgaaagtgatcttaccacctccggccggtacagagcccggcgggatagcctaaagaaaagacccgtctccgacctgctgagcgggaagaaaaacatcgttgaggggctgccaccactgggagggatgaagaaaacccgtgtggatgcaaaaaagatcgggccactgaagctcgccgccctgaatggactttccctctccagggtgccactgcctgacgaggggaaggaggtggctacacgtgcaaccaatgatgagcgctgtaagatcctggaacagcgcctggaacaaggtatggtgtttacagaatatgagaggatattgaagaaacgcctggtggacggagagtgcagtacagcccggcttccagaaaatgctgagcgtaatcggttccaggacgtgctcccttacgatgacgtgcgtgtggaacttgtcccaacgaaggaaaacaacaccgggtacatcaatgcaagtcacattaaagtttcagtttccggcattgaatgggactatatcgcaacccaaggcccactgcaaaacacctgccaggacttctggcagatggtctgggagcagggaatagcgatcattgcaatggtcaccgccgaggaggagggtggacgggaaaaatcctttcgatattggccccgcctcgggagccgccataacaccgttacctatgggcggttcaaaatcaccacgcgatttcgtacagacagtgggtgttatgcgaccacagggttaaagatgaaacatcttcttactgggcaagaaagaactgtgtggcacctgcagtacacagattggcccgagcatgggtgccccgaagacttaaaaggttttctgtcatacctagaggagatccagtccgtgcggcggcatacaaactctacttccgacccccagagccccaacccccctctcctagtgcactgtagcgccggggtcggacgcactggggtcgttattctctctgagattatgattgcttgtttggagcacaatgaggtgctagatatccctagagtgctcgatatgctgagacaacagcgaatgatgctggtacagacgctctgtcagtacaccttcgtgtatcgtgttcttattcagtttctgaagtctagccgtctaatttag

SEQ ID NO: 331180 - DNA, 3525 bp, Artificial Sequence
  derived and/or modified sequence
atgccactgcctttcggtctgaagctgaagaggacacggaggtacaccgtgagctccaagagttgcttggtcgctaggattcaactgttgaacaacgagttcgtggaattcacactcagcgtggagtccactgggcaagaaagcctggaggcggtcgcgcagaggctggaactgcgcgaagtgacttacttctctttatggtattacaataagcagaaccagcgcagatgggtcgacctggaaaagcctctcaagaaacagctggacaagtatgctctcgagccaactgtgtatttcggagtggtgttctacgtgccatctgttagtcaactgcagcaggagatcacccgctatcagtattacctccagctcaaaaaagacatcctggaagggtccatcccatgtacattagagcaagctattcaacttgcagggttagctgtgcaggccgatttcggagattttgaccagtatgaaagccaggattttctgcagaaatttgcgctgttccccgtcggttggctccaggatgaaaaagtcctggaagaggcaacgcagaaagtagccctgctgcaccagaaataccggggacttacagcgcctgacgcagagatgctttacatgcaggaagtcgaacgcatggacggatatggcgaagagtcctatcccgcaaaggacagccaggggtcagacataagcataggggcatgcctggaggggatcttcgtaaaacacaaaaatggcaggcatcccgtggtgttccgctggcatgatattgcaaatatgtcccacaacaagagctttttcgcactggagcttgccaacaaggaggaaacaattcagttccaaaccgaagacatggagacggccaaatacatttggagactgtgtgtagcccgtcacaagttttatcggcttaaccagtgtaatcttcagactcagacagttactgtgaacccaatcaggagacggagtagctcccgtatgagcctgcccaagccacagccctacgtcatgccccctccccctcaactgcattataatggacactataccgaaccgtacgcctcgtcacaggacaacctgttcgtgcccaatcagaatggctactactgccatagccagacttctctcgaccgagcgcagattgacttgaacgggaggattagaaacggcagcgtctactccgcgcactcaaccaatagcctcaacaatccccaaccttatttgcagccctctcctatgagctcaaatccgtcaattacagggtccgacgtcatgcggccagattacctgcccagccacaggcattctgccgtcatcccccctagctaccgcccaacaccagactacgaaacagtgatgaaacaactgaaccgtggtcttgttcacgctgaacgacagtcacactctcttcggaatctcaatatcgggtcatcctatgcgtactctaggcctgcagcactcgtgtacagccagcctgagatccgcgagcatgcgcagttgccttcgcccgctgccgctcattgcccttttagccttagctattcgttccactctccttccccgtacccttatcccgctgaacgcagacccgttgttggggctgtttcagtgccggagcttacgaacgctcagctgcaggcgcaggattatccctccccgaatatcatgcggactcaggtttatcgtcctccaccaccgtatcccccaccacggcctgctaattccacccctgacctttcacgccatctctacatcagttcgtcgaaccctgatcttataacccgcagagtccaccactccgtgcagacgtttcaggaggattctctcccggtcgcacacagcctccaggaagtgtctgagccgttgacggcggctcggcacgcccaacttcacaagcggaacagcattgaagtagctggtctgagccacggcctagaaggcctacgtcttaaggaaagaacccttagcgcatctgccgcagaggtggctcccagagccgtgagtgtcgggagccagccctcagtattcacggaaaggacccaacgtgaaggaccagaggaagccgagggactccgctatggccacaagaagtctttatccgacgctacaatgctgatccacagctctgaagaggaggaagatgaggactttgaggaggagagcggggcacgcgcacctcctgccagagcgagggaacctaggccaggtctggctcaagacccccctggctgcccacgggttttgctcgctggcccattacacatcctggaacccaaggctcacgttcccgacgcggaaaagcggatgatggacagttctccagtgaggacaacggctgaggcccaacgtccgtggcgtgacggcctccttatgccttccatgagcgaatccgacctcacaacatccggcaggtaccgagctaggcgcgatagcttaaagaagcgccctgttagcgatctgctgtcagggaagaaaaacatcgtggagggactaccgccactcgggggaatgaagaaaacccgggttgatgcaaaaaagattggcccacttaaactggccgctttgaatgggttatctctttctagggtgccattacccgatgaaggaaaggaggtggcaacccgcgctacaaatgatgagcgctgtaagattttagagcagcgtctggaacaaggcatggtgtttaccgagtacgagcgcatattaaaaaaacgactggttgacggcgaatgctctacagcgagactccccgaaaacgcagagcgcaaccgcttccaggatgttctgccatatgatgacgtgcgtgtcgagctggttccgactaaggagaataataccggttacatcaacgctagtcacatcaaggtgagcgtatcaggcatcgagtgggactacatcgccactcaagggccattgcagaacacatgtcaagatttttggcaaatggtttgggagcaaggcatcgccattattgccatggtgaccgctgaagaagagggtggtcgggagaagtccttccgatattggcctcgcctgggttctcggcataacactgtcacttatggaaggtttaagatcacaactcggttccggaccgacagtggctgttacgctaccacaggtcttaaaatgaaacatctgctgacggggcaagagcgcacagtctggcatctgcaatatacggattggccagaacacggatgtccagaggatctcaaggggttcctctcctacctggaggagatccagagtgtgagaagacataccaattccacatcagatcctcaatcacccaaccctccccttctcgtgcattgtagcgccggagtcggcaggaccggggtggttatcctgagcgagattatgatagcctgcctggagcacaacgaggtgttggatatcccacgcgttctcgatatgttacgacagcaacggatgatgttagttcagaccctgtgtcagtatactttcgtatatcgagtcctcattcagttccttaaatcgtctcggctcatttag

SEQ ID NO: 331181 - DNA, 588 bp, Artificial Sequence
  derived and/or modified sequence
atgccactcccgtttggccttaagttaaaaaggacaagacggtacaccgtatctagcaagagctgcctcgtggctaggattcaactcttgaataacgagttcgtagaattcactctgagcgtggagagcaccgggcaggagtcactcgaagctgtggcccaacgcctggagttacgagaagtaacttatttttccttgtggtattacaataaacagaatcagcggcgatgggtagacttggagaagccactgaagaagcaactggataagtacgccttggaacctacagtttacttcggcgtcgttttttacgtgccaagcgtgtcccagctgcaacaggaaatcactcggtaccagtattacctgcagttaaagaaagacattcttgagggctcgatcccttgtaccctggagcaggctatccagctggccggactggccgtgcaggcagactttggcgatttcgaccagtacgaaagccaggatttcttacagaaattcgccctcttcccagtgggatggcttcaggatgagaaggtcctcgaggaggccacccaaaaggttgccctattgcatcaaaagtattag

SEQ ID NO: 331182 - DNA, 3525 bp, Artificial Sequence
  derived and/or modified sequence
atgcctctgccctttggactgaagttgaaacgtaccaggcgatacacagtgagcagcaaaagctgtctggtggcacggatccagttactcaataacgaatttgttgagttcactctcagcgtggaatcaacagggcaggagtccttggaggcggtggcgcagaggttagaactgcgcgaagtgacttacttcagtttgtggtattacaacaagcagaatcaacggaggtgggtcgatctggagaagccattaaagaaacagctagacaagtatgcgctggaaccgactgtatactttggggttgtgttttatgtgccttcggtgagccagctccagcaggaaattaccagatatcagtattatttgcaactcaaaaaggatatccttgaaggaagtatcccctgcaccctggaacaagccatccaattggccggtctggctgtgcaggctgactttggggacttcgaccaatacgagagccaggacttcttacaaaaatttgcgctgtttccagtagggtggctccaagacgagaaagtcttagaagaagccacgcaaaaggttgcactacttcaccagaaatatcggggactcacggctcctgatgccgagatgctctacatgcaggaggtggagaggatggatggttacggggaagaaagttaccctgcaaaggatagccagggctccgatattagcatcggagcttgtctggaaggaatttttgtgaagcataaaaacggcagacatcccgtggtgtttcgctggcatgacatcgccaacatgtcccataataagtcctttttcgcactggagctagccaacaaggaggagacaatccagttccagacagaggacatggagacagccaaatacatctggcgattatgcgtcgctcggcacaaattttatcggctgaaccagtgtaatcttcagacgcaaaccgtcacggtgaaccctattcgaaggaggtctagtagtaggatgagcctgcccaagccccagccatacgtcatgccccctcccccacagctgcactacaatggacattacacggaaccctacgcaagcagccaggacaacctgtttgtaccaaatcagaacggatactattgtcactcccagacgtctttggatagagcccagattgacctgaacggtcggatccgcaacgggtctgtctatagcgctcacagtacgaacagtctgaacaatccacagccctatctgcagccttccccgatgtctagcaatcccagcatcacagggtcagacgtgatgaggcccgattatctcccatcccaccgccattctgccgtaataccaccatcttaccggccaactcctgactacgagacagtgatgaagcagctgaaccgcggactggtccatgccgaacgtcagagtcacagcctccgcaacctgaacatcggctcttcctacgcctatagtcgacccgcagctctcgtgtattctcagcctgagattagggagcatgcgcagttgccaagcccagccgcagctcactgtcctttcagcctctcctacagttttcattctccgtccccctatccgtaccctgccgagaggaggcccgtggtgggtgccgtgtcagtacccgagctgaccaacgctcagctacaggcgcaggactaccccagtccaaatatcatgcgtacccaggtataccgaccccctcctccttatcctcctccacggcctgccaactccacaccagacttgagccgtcacctgtacatcagcagttctaacccggatcttattacgcgcagggtgcaccatagtgtccaaacgtttcaggaagattccctccctgtagcccactccctacaggaggttagcgagcccctcacagccgcacgacacgctcagctacataaaaggaatagtatcgaggtggcgggtctgtctcatggactggaggggttgcgtctaaaagaacggacactctcagccagtgctgccgaagtggcccctcgtgccgtgtctgtgggtagccagccctcggtgtttaccgagcgtactcagagagagggcccagaagaggccgagggcctcagatatggtcataaaaaatcactaagcgacgctacaatgctaatccatagctcggaggaagaagaagacgaagactttgaagaggagagcggggctagagcacccccagccagggcaagagaaccacgccctggtctcgcccaagatcccccagggtgtcctagggtactgctggccggacctctgcacattttggaaccaaaagcgcacgtgccagatgcggaaaaacgcatgatggactcatcgcctgtgagaacaaccgccgaggcacagagaccctggcgcgatggattattgatgccttctatgagcgaatccgatctcacaacaagcgggcgataccgggcacgaagggattcattgaaaaaacggcctgtttctgatctactttccggcaagaagaacatcgtggaggggttaccccctctggggggtatgaaaaagacccgagttgatgcgaagaagatcggcccattaaagttggccgctctgaatggcctctccttgagccgcgtgccacttcccgatgaaggcaaagaagtggctaccagagctacaaatgacgaaaggtgtaagatattggaacagcgtcttgaacagggtatggtcttcacagagtacgagcggatcctgaagaaacggttagtcgacggcgaatgcagtacagctcggctgcctgaaaacgccgagcggaatagattccaggatgtactaccatacgacgatgtacgcgtggagctggtcccaactaaagagaacaatacgggctatataaatgcctcacatatcaaggtatctgtgtccggcatagagtgggactacatcgcaacgcagggcccactccagaacacttgccaggacttttggcaaatggtatgggaacagggaattgcaataattgcaatggtcactgccgaggaggaagggggacgagagaaatcctttcggtattggccccgactgggaagcagacataataccgtgacatacggcagatttaaaatcacaacacgatttagaaccgacagtgggtgctacgcaaccaccggccttaagatgaaacatctcttgactggccaggagcggacggtatggcaccttcagtacactgactggcctgagcacggatgcccagaggacttgaagggatttctgtcatatctggaggaaatccagagcgttaggcgccatactaactccaccagtgatcctcaatcccctaacccgccactgttggttcactgttcagcgggagtaggtaggactggcgtcgttatcctgtctgaaattatgattgcctgcctggaacacaacgaggtcttggatatcccgagagtgctggatatgctcagacagcaacgcatgatgttggtccagaccctgtgtcagtacacgttcgtgtatagagtgcttattcagttcctgaaatcttctcgcctgatttag

SEQ ID NO: 331183 - DNA, 1014 bp, Artificial Sequence
  derived and/or modified sequence
ttcccaaggggaggacgcgggagaagccggggcctgagtgctccaaggccccgtgggcttcttgggtttgttgcctccggccgctcattaactcaggatggcgtggaagacctcgcccgcctccccttctgggccgcggctccgcttaggtgaaggcctgtttgggcgtccccaccctggagaggggccggggtctggattttcagaactgccactcttctagtgcgctggcgtcaatgctcccttcctcgggccattggagactccgttgctttttaatggcggcagcggctgctgggtgagcagctggaggccggacagtgttcgtcccatccggagaggatcgctttctcctggcgtcaccagcgctgggttggtgggggtagcttttccctctttgctcctccattcttgaagaaagaagaagatgccactgccatttgggttgaaactgaaacgcacccggcgctacacggtgtccagcaagagttgcctggttgcccggatccaactgcttaataacgagtttgtggagttcaccctgtccgtggagagcactggccaggaaagcctcgaggccgtggcccagaggctggagctgcgggaggtcacttacttcagcctctggtactacaacaagcaaaatcagcgccggtgggtagatttggaaaaacctttgaagaagcagctggataaatatgcattggaacctaccgtctattttggagtggtgttttatgtgccttcagtttctcagctgcagcaggagattaccaggtatcagtattatctgcaactgaagaaagatatcttggaaggaagtattccttgtaccttagaacaagcaattcagctagcaggcttagctgttcaagcggattttggtgactttgatcagtatgaatcccaggactttcttcagaaatttgccttgtttcctgtgggatggttacaagatgaaaaagtattggaagaagcaacccaaaaagtggccttactacatcagaaatacag

SEQ ID NO: 331184 - DNA, 6166 bp, Artificial Sequence
  derived and/or modified sequence
gcggccgcgcggcggggccccgggaggcgggtcgctgagcggggcgcgcggccccgaggatgcgggagcgggagcgggagcagcgctggcgtcaatgctcccttcctcgggccattggagactccgttgctttttaatggcggcagcggctgctgggtgagcagctggaggccggacagtgttcgtcccatccggagaggatcgctttctcctggcgtcaccagcgctgggttggtgggggtagcttttccctctttgctcctccattcttgaagaaagaagaagatgccactgccatttgggttgaaactgaaacgcacccggcgctacacggtgtccagcaagagttgcctggttgcccggatccaactgcttaataacgagtttgtggagttcaccctgtccgtggagagcactggccaggaaagcctcgaggccgtggcccagaggctggagctgcgggaggtcacttacttcagcctctggtactacaacaagcaaaatcagcgccggtgggtagatttggaaaaacctttgaagaagcagctggataaatatgcattggaacctaccgtctattttggagtggtgttttatgtgccttcagtttctcagctgcagcaggagattaccaggtatcagtattatctgcaactgaagaaagatatcttggaaggaagtattccttgtaccttagaacaagcaattcagctagcaggcttagctgttcaagcggattttggtgactttgatcagtatgaatcccaggactttcttcagaaatttgccttgtttcctgtgggatggttacaagatgaaaaagtattggaagaagcaacccaaaaagtggccttactacatcagaaatacagagggctcacagctcctgatgctgaaatgctgtacatgcaggaggtagagagaatggatggctatggagaagagagctaccctgctaaggatagccaaggaagtgacatatccattggagcgtgtcttgaaggtatctttgtgaaacacaagaatggaaggcatcctgtggtatttaggtggcatgacattgccaacatgtcccacaacaagtccttttttgcattagagctggcaaataaagaggagaccattcaatttcaaactgaagacatggaaacagcaaaatacatttggagactctgtgttgcgcgacacaagttttacagactaaaccagtgtaacctgcaaactcagactgtcacagtgaacccaatcaggaggaggtcttcttcaaggatgtctctgcctaaaccccagccctacgtgatgcctcccccaccgcagttgcactataatggacattatacagaaccatatgcttcttcccaagataacctctttgtgcccaaccagaacggatactactgtcactctcagacaagcttggatagagcccagattgacctcaacggtcggatccgtaatggcagtgtctacagtgcacacagcaccaactccttaaataatcctcagccctacttgcagccctcgccgatgtcgtccaaccctagcatcaccgggagtgacgtcatgaggcctgactacctcccgtcccatcggcacagcgccgtgatacccccgtcctaccgccccaccccagactatgagactgtgatgaagcagctcaacaggggcctggtgcatgcggaacggcagagccactcgctgcgaaacctcaacatcggcagctcgtacgcctacagcaggcccgcggcgctggtctacagccagcccgagatccgcgagcacgcacagctcccctcgccagcggccgcacactgcccgttcagcctgagctacagcttccacagcccgtctccctacccctaccctgccgagcggcggcccgtggtgggcgcggtcagcgtgccggagctgaccaatgcgcagctgcaggcgcaggactacccgtctcccaacatcatgcggacgcaggtgtaccggccacccccaccctacccgccccccaggcccgccaacagcacgccagacctgtcccgccacctttacatcagcagcagcaaccccgacctcatcacgcggcgcgtgcaccactcggtgcaaacgttccaggaggacagcctgcccgtggcgcactcgctgcaggaggtcagcgagcccctcaccgccgcgcgccacgcgcagctgcacaaacggaacagcatcgaggtggccgggctcagccacggcctggagggcctgcggctcaaggagcgcaccctatccgcgtcggcggcagaggtggcgccgcgagccgtctcggtgggctcccagcccagcgttttcaccgagaggacacagcgagaagggccggaggaggcggagggcttgaggtacggccataagaagtccctgtcggacgccaccatgctaatccacagcagcgaggaggaggaggacgaggacttcgaggaggagagcggggcccgggcgcctcctgcacgtgcgcgcgagcctcggcccggcctggcccaggacccacctggctgccctcgcgtcctgctcgccgggcccctgcacatcctggagcccaaggcccacgtcccagacgcggagaagaggatgatggacagcagccccgtccgcacgaccgcagaggcccagcggccctggagagacgggctgctgatgccctccatgtcggagtccgacctcaccacgtcaggccgctaccgagcccggagggactctctgaagaaaaggccggtgtcggaccttctctctgggaagaagaacatcgtggaagggctcccgcctctagggggaatgaaaaagactcgagtagatgcaaaaaaaattggtcctcttaaactggctgccctaaatggactctccctatctcgagtgcctctgcctgatgaaggaaaggaagtggctaccagagcaacgaatgatgaaaggtgtaaaattctggaacaacgattagaacaaggaatggtattcacagaatatgaaagaattcttaagaaacggctagttgatggggagtgctcaacagcacgactccctgaaaatgcagaaagaaatcgattccaagatgttcttccttatgatgatgtgagagtggagttggtcccaactaaagaaaacaacactggttacatcaacgcatcacatattaaggtctctgtcagtggaatcgaatgggattatattgccacacagggaccattacagaatacctgtcaagatttttggcagatggtatgggaacagggaattgcaattatagcaatggtgacagcagaagaggagggtggaagggagaagagctttaggtactggccacgacttggttccaggcacaacactgtcacctatggaaggtttaagatcacgacccggttccgcacagactctggctgctatgccaccacaggcctgaagatgaagcacctccttactgggcaagagaggaccgtctggcacctccaatacacagactggcctgaacatggctgtccagaagacctcaagggatttttatcatatcttgaagagatccagtctgttcgacgccatacaaatagcacaagtgatccccaaagccccaaccctccgttgttggtccactgcagtgctggggtaggaaggactggcgtggtgattttgtcggagatcatgatcgcctgcctggaacacaatgaggtgctggacatcccgagagtgctggacatgctgaggcaacagagaatgatgctggtgcagactctctgccagtacacatttgtgtacagagtcctcatccagttcctgaaaagctccaggctcatctaagctcccacaatttcttacggggccagtcatgtgaagcgtttacagcttaaaaaaaaagcgcttgcctaactcatactttcccgttgacacttgatccacgcagcgtggcactgggacgtaagtggcgcagtctgaatggcggcacgctgaaggaaacgtgcgaagcacaggctgaagaggggtttctaacctgggaaaggtgctcaaggaggacttggtttcaagggccttgccctgccccggtctgtccggtttgcagtacttgcacacattttggagattgtattttctagacaattctctattttactgaagctatgctgggcaattctggcaatcattaaagtgcatagatttctatcttaaactaatttttgataatggagtttttattttatgacaaatatttagggatttttctagtgagaaacaactttgtgtaaggatgatccacagatatgagttgctcctatataactttgtatttaaaaatcatgttattatcttttgttattttttaaaaaccttgggtacttaataatggtttagttgccaaactgaaaactatactgagaatctgtgttattttgaaacatcaaaaggatttttctatccagaacattttttatcctaaaaattctatatagttgtaccttctgtttttcaaatgagagctcaattcatttagatactgaaatgagtcagttaatgtaaagttgaggatgaaggcacattatttaaaatgtaagagaataagcattattttttcagtattattcatagatctaaatgaatttgattttattggttgaaaatgaagtgaaaaacaattgcctagggtggttttaagcacttttttgttaaaaacaaatctgagttttaatatatgtgttgctttgtagatgacacaataacaatgggcgctgagaagcgttttgggagagattaaggactaagagtatgtaagatgactaggacaagagtaggtggagtgtgatggtaaatgcaggatgccttcgtctttacaaaaatgcagtattatctatactcagactgaggtgctgggatggcgagcaggggaccccacagcactgtccccagggaattcaagtcctgtgaccgccagtgacttactccgtttccttggggcttttcccacctcaacctgtattgtttctttttcataaataaattcagcattatagtatcattaaaagaagccttaaagaggcgtatttttccttttggttgaaggaagggaatagttaataatagttttcacctcttctcccaaaaagtacagtccaaatttgtgcacagagattgctgtggtattcaagaggtacttgcattttagctccttaataattccctggccagtgttagctgtttagtgccccctcacccatcccatttaggcacatcccaatagacagagccaggctgagttacagggggagagtgtcatctctggccccgattaagatggccttgtcacagtgaccgctgagtaggcatggatgagtgggatatttagctgaggaaccctttcccttttccttctttttggggtctcttcttacagtgaacttccaaaatgtcaaatctagggctgtttcccaaattacactattctaggcatcattttgattcccatgtcactccttaactcacttccttgagcactacatgtatgttgtcagccacgagacaggacttcctaaatagtgtgtgcaccagcctaactctgccttacccagaaaccaaccacctaagaggaaaactcagaagatattaatgaaaactaattgaaagtacgcacacttctcatgtaggaacaaaattaaaattttacatttttattttacaaaattaaaaaattacattttgtaggaacaaaatgtaaattttgtaaatacaaaattctttttaaagtcctgtttaaagaacagtagaactaagtgaaaatattcagaacgagctccttagaagaaaggaataagaactttttactggaactattttccatctctagaaaaagtgcttcttcccctccccctccctctccatggtacgtttttgtgaaaatgcttttctgtcaggtttaaacaaacagtttgacatagctcgttgacaagaacatattgtaaaacaaatctaattaaagagtaatatgtggtctatttgtgttcctgttgtaataatttgataagtaaacttctgagggcaaaattactgtttaatattactcttaaaatgttgcatgtttggcgtcattcctaagagccatgtaattttaaacttttaattgcagttagtgaatatgaaaggatttctgaataaaaatctatccaca

SEQ ID NO: 331185 - DNA, 401 bp, Artificial Sequence
  derived and/or modified sequence
actgggtcccgcgcaggcgtccccgggaccgcagagcaaactttctggactatctgaggacacttgtccagcgagccccactgctcggggaggaggagccacggccggggacagatttttaaagtcttcttctaggggtttccagcagagccaaatgttagaaaaatctttccgctcctctgaagagtgaagtgagcaaatacaacccagcagtaggttattgaagacagcagccccaggttttggaaggtgacaatgaaatgtgaagaagttacatttctcaaacttgaaagttagtgacggcttaccaaattttaatgaaaattaaatatgacttagaagcattgatttatgaaggcttatgatgtcatcggtttcgacagaaagcaaactccagcagg

SEQ ID NO: 331186 - protein, 802 aa, Artificial Sequence
  derived and/or modified sequence
MEEMEEELKCPVCGSFYREPIILPCSHNLCQACARNILVQTPESESPQSHRAAGSGVSDYDYLDLDKMSLYSEADSGYGSYGGFASAPTTPCQKSPNGVRVFPPAMPPPATHLSPALAPVPRNSCITCPQCHRSLILDDRGLRGFPKNRVLEGVIDRYQQSKAAALKCQLCEKAPKEATVMCEQCDVFYCDPCRLRCHPPRGPLAKHRLVPPAQGRVSRRLSPRKVSTCTDHELENHSMYCVQCKMPVCYQCLEEGKHSSHEVKALGAMWKLHKSQLSQALNGLSDRAKEAKEFLVQLRNMVQQIQENSVEFEACLVAQCDALIDALNRRKAQLLARVNKEHEHKLKVVRDQISHCTVKLRQTTGLMEYCLEVIKENDPSGFLQISDALIRRVHLTEDQWGKGTLTPRMTTDFDLSLDNSPLLQSIHQLDFVQVKVPATPILQLEECCTHNNSATLSWKQPPLSTVPADGYILELDDGNGGQFREVYVGKETMCTVDGLHFNSTYNARVKAFNKTGVSPYSKTLVLQTSEDTDSEEQTLPFPVPSERLPLRRMSPFSSTLNLQPSFPGRSYFDFRSSPHQLSLHSSLQSLNAPGCNFETQSAPYSQLVDIKKLLAVAWFAFDPGSAHSDIILSNDNLTVTCSSYDDRVVLGKTGFSKGIHYWELTVDRYDNHPDPAFGVARMDVMKDVMLGKDDKAWAMYVDNNRSWFMHNNSHTNRTEGGITKGATIGVLLDLNRKNLTFFINDEQQGPIAFDNVEGLFFPAVSLNRNVQVSTLPLRLNSCCWLPVQRLPRAVQSNRREGS

SEQ ID NO: 331187 - DNA, 2409 bp, Artificial Sequence
  derived and/or modified sequence
atggaggagatggaggaggagctgaagtgccccgtgtgcggcagcttctacagagagcccatcatcctgccctgcagccacaacctgtgccaggcctgcgccagaaacatcctggtgcagacccccgagagcgagagcccccagagccacagagccgccggcagcggcgtgagcgactacgactacctggacctggacaagatgagcctgtacagcgaggccgacagcggctacggcagctacggcggcttcgccagcgcccccaccaccccctgccagaagagccccaacggcgtgagagtgttcccccccgccatgcccccccccgccacccacctgagccccgccctggcccccgtgcccagaaacagctgcatcacctgcccccagtgccacagaagcctgatcctggacgacagaggcctgagaggcttccccaagaacagagtgctggagggcgtgatcgacagataccagcagagcaaggccgccgccctgaagtgccagctgtgcgagaaggcccccaaggaggccaccgtgatgtgcgagcagtgcgacgtgttctactgcgacccctgcagactgagatgccacccccccagaggccccctggccaagcacagactggtgccccccgcccagggcagagtgagcagaagactgagccccagaaaggtgagcacctgcaccgaccacgagctggagaaccacagcatgtactgcgtgcagtgcaagatgcccgtgtgctaccagtgcctggaggagggcaagcacagcagccacgaggtgaaggccctgggcgccatgtggaagctgcacaagagccagctgagccaggccctgaacggcctgagcgacagagccaaggaggccaaggagttcctggtgcagctgagaaacatggtgcagcagatccaggagaacagcgtggagttcgaggcctgcctggtggcccagtgcgacgccctgatcgacgccctgaacagaagaaaggcccagctgctggccagagtgaacaaggagcacgagcacaagctgaaggtggtgagagaccagatcagccactgcaccgtgaagctgagacagaccaccggcctgatggagtactgcctggaggtgatcaaggagaacgaccccagcggcttcctgcagatcagcgacgccctgatcagaagagtgcacctgaccgaggaccagtggggcaagggcaccctgacccccagaatgaccaccgacttcgacctgagcctggacaacagccccctgctgcagagcatccaccagctggacttcgtgcaggtgaaggtgcccgccacccccatcctgcagctggaggagtgctgcacccacaacaacagcgccaccctgagctggaagcagccccccctgagcaccgtgcccgccgacggctacatcctggagctggacgacggcaacggcggccagttcagagaggtgtacgtgggcaaggagaccatgtgcaccgtggacggcctgcacttcaacagcacctacaacgccagagtgaaggccttcaacaagaccggcgtgagcccctacagcaagaccctggtgctgcagaccagcgaggacaccgacagcgaggagcagaccctgcccttccccgtgcccagcgagagactgcccctgagaagaatgagccccttcagcagcaccctgaacctgcagcccagcttccccggcagaagctacttcgacttcagaagcagcccccaccagctgagcctgcacagcagcctgcagagcctgaacgcccccggctgcaacttcgagacccagagcgccccctacagccagctggtggacatcaagaagctgctggccgtggcctggttcgccttcgaccccggcagcgcccacagcgacatcatcctgagcaacgacaacctgaccgtgacctgcagcagctacgacgacagagtggtgctgggcaagaccggcttcagcaagggcatccactactgggagctgaccgtggacagatacgacaaccaccccgaccccgccttcggcgtggccagaatggacgtgatgaaggacgtgatgctgggcaaggacgacaaggcctgggccatgtacgtggacaacaacagaagctggttcatgcacaacaacagccacaccaacagaaccgagggcggcatcaccaagggcgccaccatcggcgtgctgctggacctgaacagaaagaacctgaccttcttcatcaacgacgagcagcagggccccatcgccttcgacaacgtggagggcctgttcttccccgccgtgagcctgaacagaaacgtgcaggtgagcaccctgcccctgagactgaacagctgctgctggctgcccgtgcagagactgcccagagccgtgcagagcaacagaagagagggcagctag

SEQ ID NO: 331188 - DNA, 2409 bp, Artificial Sequence
  derived and/or modified sequence
atggaggagatggaggaagaactcaagtgtcctgtgtgtggcagcttctatcgggagcccatcattctaccgtgctctcacaatctatgccaggcgtgcgcccggaatatcttggtgcagacccctgaaagcgagagcccccagagccatagagccgccgggtccggggtcagcgattatgactacttggatcttgacaagatgtcactgtacagtgaagcagactctggctatggatcgtacggcgggttcgcctctgcaccgaccacaccctgccaaaagtccccaaatggcgtgagggtgttcccacctgctatgccaccccctgccacccacctttcacccgccttggcccctgtcccaaggaattcctgcattacttgtccgcagtgtcatcgatctcttatcctggacgaccgtggtctaagaggcttcccgaagaaccgggttttggagggggtgatagaccgctaccaacagtccaaagcagccgccctgaagtgtcagctctgcgagaaagcacctaaggaggctacagtgatgtgcgagcagtgcgacgtgttctactgcgacccctgtaggttgagatgtcatcccccaagaggtcccttagcaaagcatcgactggtcccacccgcccagggtcgcgtcagccggcgtctgtcaccacgcaaggtgtctacgtgcacagatcacgaattagaaaaccattcgatgtattgcgtgcagtgtaaaatgccggtttgttatcaatgcttagaggaaggtaagcattcttcgcatgaggtcaaggcgctgggagcaatgtggaagttacataagtctcagctgagccaggcccttaacggcctctctgaccgcgctaaggaagccaaagaatttctcgtccagctgagaaatatggtgcagcagatccaggagaattcggtggaattcgaagcctgcctggttgcgcagtgcgacgccctaatcgatgcattaaatcgacgtaaagctcagcttctggcccgcgtaaacaaagaacatgagcacaagctgaaagtagtgagggaccaaatatctcactgtactgtaaaattaagacagactacaggactgatggagtactgcctggaagtgatcaaagaaaacgaccccagcggcttcctgcagatcagcgatgccttgatcaggcgcgtgcatctgaccgaagatcagtgggggaaggggaccttgactccacgaatgaccactgatttcgacctctcacttgacaactcccccctgttgcagtctatccaccagttggacttcgtgcaggtcaaggttcctgcaacccctatcttacagctggaggaatgctgtacacataacaattccgccacactgtcctggaaacagccacctctctccactgttcctgccgacggctatatcttagagttggatgatggaaatggaggccagtttcgcgaagtgtacgttgggaaggagacaatgtgcactgtggacggcctacactttaattctacgtataacgcacgggtcaaagcctttaataaaactggagttagcccttattctaagactctcgtccttcaaacctctgaagacacagatagcgaggagcagacactcccctttcctgtgccatccgaacgcttgccgcttcgaaggatgagcccatttagttccactctgaacttgcagccttctttccctgggcgctcctattttgattttaggagttccccacatcaactctctttgcactcatccttgcagagtctgaatgctcccggttgtaacttcgagacacagagcgccccctactcacagctggtcgacatcaagaaactgctcgccgttgcctggtttgcgttcgaccctggatctgcccactctgatatcattctgtccaacgacaacctgacagtgacctgtagctcgtacgacgatcgtgtggtcctgggaaagacaggattttccaagggcattcactactgggaactcacagttgatcgctacgataatcatccagatccagcttttggggttgcgcgtatggatgtgatgaaagacgtgatgttggggaaggatgacaaagcatgggcaatgtacgtggacaacaacagatcctggttcatgcacaataatagccatacaaaccgcactgagggcggaatcaccaagggcgccactatcggagtgttgcttgatcttaacaggaaaaatctaaccttcttcataaatgacgagcagcagggccctatcgcatttgacaacgtagagggccttttcttccctgccgtgagcctgaataggaacgtgcaggtctctactctgccgctgagactgaacagctgctgttggctgccagtgcagcgtctgccacgggccgtccaatcgaatcgacgggaaggctcttag

SEQ ID NO: 331189 - DNA, 2409 bp, Artificial Sequence
  derived and/or modified sequence
atggaggagatggaggaggagctgaagtgccctgtgtgtggcagcttctaccgggagcccatcatcctgccctgcagccacaacctgtgccaggcctgtgccaggaacatcctggtgcagaccccagagagcgagagcccccagagccacagagctgctggcagcggcgtgtctgactatgactacctggacctggacaagatgagcctgtacagcgaggccgacagcggctacggcagctatggaggctttgccagcgcccccaccaccccctgccagaagagccccaatggagtgcgggtcttccccccagccatgcctcctccagccacccacctgagccctgccctggcccctgtgcccaggaacagctgcatcacctgcccccagtgccacaggagcctcatcctggatgaccggggcctgcggggcttccccaagaacagagtgctggagggcgtgattgaccgctaccagcagagcaaggccgccgccctgaagtgccagctgtgtgagaaggcccccaaggaggccaccgtgatgtgtgagcagtgtgatgtgttctactgtgacccctgccgcctgcgctgccaccccccccggggccccctggccaagcaccggctggtgcccccagcccagggccgggtgtcccggcggctgagccccaggaaggtgtccacctgcacagaccacgagctggagaaccacagcatgtactgtgtgcagtgcaagatgcctgtgtgctaccagtgcctggaggagggcaagcacagcagccatgaggtgaaggccctgggcgccatgtggaagctgcacaagagccagctgagccaggccctgaatggcctgagtgaccgggccaaggaggccaaggagttcctggtgcagctgaggaacatggtgcagcagatccaggagaacagcgtggagtttgaggcctgcctggtggcccagtgtgatgccctgattgatgccctgaacagaaggaaggcccagctgctggcccgggtgaacaaggagcacgagcacaagctgaaggtggtgcgggaccagatcagccactgcaccgtgaagctgcggcagaccaccggcctgatggagtactgcctggaggtgatcaaggaaaatgaccccagcggcttcctgcagatcagtgatgccctgatcagaagagtgcacctgacagaggaccagtggggcaagggcaccctgacccccaggatgaccacagactttgacctgagcctggacaacagccccctgctgcagagcatccaccagctggactttgtgcaggtgaaggtgcctgccacccccatcctgcagctggaggagtgctgcacccacaacaacagcgccaccctgtcctggaagcagccccccctgagcacagtgcctgcagatggctacatcctggagctggatgatggaaatggaggccagttccgggaggtgtatgtgggcaaggagaccatgtgcaccgtggatggcctgcacttcaacagcacctacaatgcccgggtgaaggccttcaacaagacaggagtgagcccctacagcaagaccctggtgctgcagaccagcgaggacacagacagcgaggagcagaccctgcccttccctgtgcccagcgagcggctgcccctgcggaggatgagccccttcagcagcaccctgaacctgcagcccagcttccctggccgcagctactttgacttccgcagcagcccccaccagctgagcctgcacagcagcctgcagagcctgaatgcccctggctgcaactttgagacccagagcgccccctacagccagctggtggacatcaagaagctgctggccgtggcctggtttgcctttgatcctggcagcgcccacagcgacatcatcctgagcaatgacaacctgactgtgacctgcagcagctatgatgacagagtggtgctgggcaagacaggcttcagcaagggcatccactactgggagctgactgtggacagatatgacaaccacccagaccctgcctttggagtggccaggatggatgtgatgaaggatgtgatgctgggcaaggatgacaaggcctgggccatgtatgtggacaacaacagatcctggttcatgcacaacaacagccacaccaacagaacagagggcggcatcaccaagggggccaccatcggcgtgctgctggacctgaacaggaagaacctgaccttcttcatcaatgatgagcagcagggccccatcgcctttgacaacgtggagggcctcttcttccctgctgtgtccctgaacagaaatgtgcaggtgtccaccctgcccctgcggctgaacagctgctgctggctgcctgtgcagaggctgcccagggctgtgcagagcaacagaagagagggcagctag

SEQ ID NO: 331190 - DNA, 2409 bp, Artificial Sequence
  derived and/or modified sequence
atggaggagatggaggaggagctgaagtgccccgtgtgcggcagcttttacagggagcccatcattttgccatgcagtcacaatctgtgccaggcatgcgcgcggaatatactcgtgcaaactcctgaatccgaatctccacagtctcacagggcggcggggagtggtgtctccgattacgactatttggaccttgacaagatgagtctatactccgaggcagactcaggctacggaagctacggaggatttgcatcagcccccactaccccatgtcagaaaagtcccaacggcgtcagagttttccctcctgccatgcctcccccagccacacatttgtctccagctctcgcccctgtacccagaaacagttgcattacctgccctcagtgtcacagaagcttaatccttgacgataggggccttcggggctttcctaaaaaccgggtgctggaaggtgtgatcgatcgctaccagcagagtaaagccgctgcccttaaatgtcagttgtgtgaaaaggccccaaaggaggcaacagtgatgtgtgaacagtgcgatgtcttttattgcgacccttgccgcctaaggtgtcacccaccacgaggcccactcgctaaacacagactggtgcctcccgcccaaggaagggttagcagacggctctcaccaagaaaagtgtccacgtgcaccgaccatgagctcgagaatcattcaatgtattgcgtccagtgcaagatgcccgtgtgctaccagtgcttggaagaggggaaacattcttctcatgaggtcaaggcccttggcgccatgtggaagctacacaagtcccagttatcccaagcgctaaatggactgtcagacagagcaaaagaggccaaagaatttctcgtgcaactccgcaatatggtgcagcagatccaagaaaactcagtggagtttgaggcctgcctggttgctcagtgtgacgcacttatcgatgccctgaacagaagaaaagcccagctcctggcacgggtcaataaggagcacgagcataaactgaaagtggtcagggaccagatcagtcactgcaccgtaaaattacggcagaccacgggcttgatggaatactgcctcgaggtgataaaagagaacgacccctcagggttcttgcagatatctgatgcactcatccggcgggtgcacttgaccgaagatcaatggggcaaaggcacgttgacacctcgaatgactacagactttgacctttctctcgacaacagtccattgcttcagagtatacaccagctggacttcgtgcaggtgaaggtgcctgccactcccatcctgcaactggaagaatgttgtacccataataattccgccacactgtcctggaagcaaccacccttgtccaccgtccctgccgatggttatatcctggagctcgacgatggtaacggtggccagtttcgagaagtgtacgtcgggaaggagactatgtgtaccgtcgacggactccacttcaatagcacgtataacgcccgcgtaaaggccttcaacaagaccggggttagcccctactccaagacacttgtcctccagacttcagaggataccgatagcgaggaacagaccctccccttcccagtcccatcagaacggctgccgttaaggagaatgtctcccttctcctccacacttaacctacagccttcatttccaggaagaagttattttgactttcgtagttcccctcatcagctttctctgcactcaagtttgcagtctctgaacgcacccggatgtaactttgaaacccagagcgctccttactctcagctcgttgatatcaaaaaattgctggctgttgcttggttcgcttttgacccagggtcagctcactcagatattatcctgtcgaacgacaacctgactgtaacttgcagttcttacgacgatagggtcgtcctgggaaagacggggttctccaagggtatccactactgggaattaaccgttgaccggtatgacaaccatcccgaccctgcgttcggcgttgcacgtatggacgtcatgaaagatgtcatgctggggaaggacgataaagcctgggctatgtacgtggataacaatcgcagttggttcatgcacaacaacagtcatacaaatcgcacagaggggggcattaccaagggggcaactatcggtgtgctcctcgatctgaaccgaaaaaacctgacattctttattaacgacgaacagcaaggaccaatcgcctttgataacgtggaaggtctttttttccccgccgtgtccctgaatcgaaatgtgcaagtgtctacacttccattgcggctcaattcatgttgttggttaccggtgcaacgtctgccacgcgcagtgcagtctaacagaagggaaggatcttag

SEQ ID NO: 331191 - DNA, 2409 bp, Artificial Sequence
  derived and/or modified sequence
atggaagagatggaggaagaattaaagtgccccgtgtgtggaagtttttaccgtgaacctataatcctgccctgctcgcacaatctttgtcaggcctgtgcgaggaacatcctcgtgcagaccccggagagtgagagtccacaatctcacagggccgctggaagcggtgtgagtgattacgactacctggatcttgataagatgtccttatattccgaagccgattccggctacggctcctatgggggttttgcctctgctcctacgacaccatgtcagaagtcaccaaacggcgtgcgtgtgttccccccagcaatgccaccaccagctactcacctcagccctgccctggccccagtgcccaggaactcctgtataacttgtccccagtgtcaccggtctctgatcctggatgacaggggcctaagaggctttccgaaaaaccgggtgttagagggagtgatcgaccggtaccagcagagtaaggctgctgccctcaagtgccagttatgtgaaaaggctcccaaggaagcaactgtaatgtgtgagcaatgcgacgtgttctactgtgatccatgtcgcttgcggtgtcatccgccaaggggacccctggcgaaacataggcttgttccgcctgcccagggtcgcgtttcacgaagactctctcccagaaaggtctcaacctgcacggatcatgagttagagaaccatagcatgtactgcgtccagtgtaagatgccggtgtgttaccagtgcctggaggaaggtaagcacagctcccacgaggtcaaggcactgggggcaatgtggaaactccacaagtctcaactctctcaggccctaaatggtctttccgatagggccaaagaagccaaggagttcttagtgcagcttagaaacatggtgcaacagatccaagaaaacagtgtcgaattcgaggcctgcttggtggcccagtgtgacgctttaattgatgcccttaatcgccgaaaggcacagttacttgccagggtgaataaggagcacgaacacaagctcaaggtagtgagggatcagatcagccactgcaccgtgaagttacgtcaaactaccgggctaatggagtactgtctggaggtgataaaagagaatgacccttccggctttctgcagatctcagatgccctcattaggcgggtccatctgaccgaggatcaatggggtaagggtaccctgactccgagaatgacgaccgactttgatctctctttggataactctcctcttctccagagtatccatcaacttgactttgtccaggtgaaagtgcctgccaccccaattctgcagctggaggagtgttgtacccataacaacagtgccacgcttagctggaaacaacccccactgtccaccgtgcccgctgatggttatatccttgaattggatgacgggaacggtggtcaatttagagaagtttacgtcgggaaggaaacaatgtgtaccgttgacgggctacactttaactccacatacaacgctcgggtgaaggccttcaacaagacaggcgtatccccctactccaaaactttggtgctgcagactagcgaggacacggatagcgaagagcagactttaccctttcctgtcccgagtgaacgattacccctgcgacgcatgtctcctttctcatccactttgaacttacagccgtcattcccgggaaggtcctacttcgacttccgatcgtccccgcaccagctcagcttgcacagctccctccagtccctcaacgccccaggctgtaatttcgagactcaatcagcgccttactctcagcttgtggacatcaaaaaattactggctgtggcctggtttgcgtttgatccaggcagtgctcacagcgatattatcctgagcaacgataacttgaccgtgacctgcagctcgtacgatgatcgtgtcgtgctgggcaagacagggttctccaagggaatccactattgggagcttaccgttgaccggtacgacaaccatcctgaccccgcattcggagtggccagaatggatgttatgaaggacgttatgctaggtaaagatgacaaggcctgggcaatgtacgtggacaacaaccgatcctggttcatgcacaataatagccacaccaatagaacggaaggagggatcactaaaggggctaccataggcgtgctcctcgatcttaatcggaagaacttgacctttttcattaacgatgagcagcagggacctatagcttttgacaacgtggaggggctctttttcccagcagtatccctaaaccgcaacgttcaggtgtcgacactgcctctccgattaaacagctgttgctggcttcctgtccagcggttgccacgggctgtccaatcaaacagacgagagggcagttag

SEQ ID NO: 331192 - DNA, 3312 bp, Artificial Sequence
  derived and/or modified sequence
agagatcttgcagccgcgagcgaagactgccctatcctcagactctaccgaaccccctgtggcctgcggagacgaggagacggacgggtctggtggccaatgagagcttcgatctcttgccccccgcccaatgggccgctgctcatgggccggggcgggactaggagggcaggtaggggcggtccgggctggcgcgcggcgcggcggctacgcggctgcggctcacagagctagcgcctctctgggtgtccgtgccagtgctgcgcgggaaggcaccaccaccacagccgccgccgctggccagggtgctggacaagacgggcccgtcggccacctcgccagctcaggcacccgctgcagccgtcgctgtctcctcccagaccggtccccatggaggagatggaagaggagttgaaatgccccgtgtgcggctccttctatcgggagcccatcatcctgccctgctctcacaatttgtgtcaggcgtgcgcccgcaacatcctggtgcagaccccagagtctgaatccccccagagccatcgggccgcgggctccggggtctccgactatgactatctggacctggacaagatgagcctatacagcgaggcggacagcggctatggctcctacggggggttcgccagcgcccccactaccccgtgccagaagtcccccaacggcgtccgcgtgtttcccccggctatgccgccaccggccacccacttgtcaccggccctggccccggtgccccgcaactcctgtatcacctgcccccagtgtcaccgcagcctcatcctggatgaccgggggctccgcggcttccccaagaatcgcgtactggaaggggtaattgaccgctaccagcagagcaaagccgcggccctcaagtgccagctctgcgagaaggcgcccaaggaagccaccgtcatgtgcgaacagtgcgatgtcttctactgcgatccgtgccgcctgcgctgccacccgccccgggggcccctagccaagcaccgcctggtgcccccggcccagggtcgtgtgagccggaggctgagcccacgcaaggtctccacctgcacagaccacgagctggagaaccacagcatgtactgcgtgcaatgcaagatgcccgtgtgctaccagtgcttggaggagggcaaacactccagccacgaagtcaaggctctgggggccatgtggaaactacataagagccagctctcccaggcgctgaacggactgtcagacagggccaaagaagccaaggagtttctggtacagctgcgcaacatggtccagcagatccaggagaacagtgtggagtttgaagcctgtctggtggcccaatgtgatgccctcatcgatgccctcaacagaagaaaagcccagctgctggcccgcgtcaacaaggagcatgagcacaagctgaaggtggttcgagatcagatctctcactgcacagtgaaattgcgccagaccacaggtctcatggagtactgcttggaggtgattaaggaaaatgatcctagtggttttttgcagatttctgacgccctcataagaagagtgcacctgactgaggatcagtggggtaaaggcacactcactccaaggatgaccacggactttgacttgagtctggacaacagccctctgctgcaatccatccaccagctggatttcgtgcaagtgaaagtcccagcaacccctatcctacagctggaggaatgttgtacccacaacaacagcgctacgttgtcctggaaacagccacctctgtccacggtgcccgccgatggatacattctggagctggatgatggcaacggtggtcaattccgggaggtgtatgtggggaaggagacaatgtgcactgtggatggtcttcacttcaacagcacatacaacgctcgggtcaaggccttcaacaaaacaggagtcagcccgtacagcaagaccctggtcctccaaacgtctgaggacacagattcagaagaacagaccctcccttttccagtgccttcggaaagattgccgctccgtagaatgagtcctttctcctccacccttaatctacaacccagcttccccgggagatcctactttgatttccgatcctcaccccaccagctgagcttgcattcctctttacagtctctcaatgcaccgggatgcaattttgagacacaatctgcaccttactctcaattagttgacattaaaaagctgttggcagtggcctggtttgctttcgaccctggctcggcgcactcggacatcatcctctccaatgacaacctgacagtgacctgtagtagctatgatgaccgggtggtgctagggaagactggcttctccaagggcatccactactgggagctcacggtagatcgctatgacaaccaccctgatcctgcctttggtgtggctcgcatggacgtgatgaaggatgtgatgttaggaaaagacgacaaagcttgggcaatgtatgtggacaataaccggagctggttcatgcacaacaactcgcacaccaacagaactgagggagggatcacaaaaggggccacaattggggtcctcctcgacttaaatagaaaaaacttgacattttttatcaacgatgaacaacaaggtcccatagcatttgataacgtggagggcctcttcttccctgcggtcagcctgaacaggaacgtgcaggtaagcaccctgcccctgaggttaaacagctgttgctggctaccggttcaaaggctgcccagggccgttcaatccaaccgaagagagggaagctgacagcgtaaggcccagaccaagatatgaaggagaggaggagagaaagggatcagcactggcaacttattttattccacgccaagcataagcaccttctttatacttggacgcagactagttaatagcacataggaaactagaattctcttcatggttggctaatgatcatctctgtagctctagtttcacctctaaatagaaacgaaagcctttaaccaactggcatgaaaacaaatagaatgacttaacaaagctcaggagtgcctgagaagaggtgagggtgtaagactgaagcattagtatcattatcagaaaatctgagcatcttctctgcactcttgtttggctctgttaggtcctaaggggtagaaaacatagtccctacctacaacttagtcaattattatttattatagaataaaacaacagcttctcatttattcattcagcaaatatctatagaatgcctttaatgtgccaggcacagttataagtgtctgggatacatcagtg

SEQ ID NO: 331193 - DNA, 2757 bp, Artificial Sequence
  derived and/or modified sequence
tgaagaaccaacagcagattcgtgaaggtggtgctgatgagcgccaccatcagctgcaaggagttcgccgactacttcgccgtgcccgtgcagaacaagatgaaccccgcctacatcttcgaggtggagggcaagccccacagcgtggaggagtactacctgaacgacctggagcacatccaccacagcaagctgagcccccacctgctggaggagcccgtgatcaccaaggacatctacgaggtggccgtgagcctgatccagatgttcgacgacctggacatgaaggagagcggcaacaaggcctggagcggcgcccagttcgtgctggagagaagcagcgtgctggtgttcctgcccggcctgggcgagatcaactacatgcacgagctgctgaccagcctggtgcacaagagactgcaggtgtaccccctgcacagcagcgtggccctggaggagcagaacaacgtgttcctgagccccgtgcccggctacagaaagatcatcctgagcaccaacatcgccgagagcagcgtgaccgtgcccgacgtgaagtacgtgatcgacttctgcctgaccagaaccctggtgtgcgacgaggacaccaactaccagagcctgagactgagctgggccagcaagaccagctgcaaccagagaaagggcagagccggcagagtgagcagaggctactgctacagactggtgcacaaggacttctgggacaacagcatccccgaccacgtggtgcccgagatgctgagatgccccctgggcagcaccatcctgaaggtgaagctgctggacatgggcgagcccagagccctgctggccaccgccctgagcccccccggcctgagcgacatcgagagaaccatcctgctgctgaaggaggtgggcgccctggccgtgagcggccagagagaggacgagaacccccacgacggcgagctgaccttcctgggcagagtgctggcccagctgcccgtgaaccagcagctgggcaagctgatcgtgctgggccacgtgttcggctgcctggacgagtgcctgatcatcgccgccgccctgagcctgaagaacttcttcgccatgcccttcagacagcacctggacggctacagaaacaaggtgaacttcagcggcagcagcaagagcgactgcatcgccctggtggaggccttcaagacctggaaggcctgcagacagaccggcgagctgagataccccaaggacgagctgaactggggcagactgaactacatccagatcaagagaatcagagaggtggccgagctgtacgaggagctgaagaccagaatcagccagttcaacatgcacgtggacagcagaagacccgtgatggaccaggagtacatctacaagcagagattcatcctgcaggtggtgctggccggcgccttctaccccaactacttcaccttcggccagcccgacgaggagatggccgtgagagagctggccggcaaggaccccaagaccaccgtggtgctgaagcacatccccccctacggcttcctgtactacaagcagctgcagagcctgttcagacagtgcggccaggtgaagagcatcgtgttcgacggcgccaaggccttcgtggagttcagcagaaaccccaccgagagattcaagaccctgcccgccgtgtacatggccatcaagatgagccagctgaaggtgagcctggagctgagcgtgcacagcgccgaggagatcgagggcaaggtgcagggcatgaacgtgagcaagctgagaaacaccagagtgaacgtggacttccagaagcagaccgtggaccccatgcaggtgagcttcaacaccagcgacagaagccagaccgtgaccgacctgctgctgaccatcgacgtgaccgaggtggtggaggtgggccacttctggggctacagaatcgacgagaacaacagcgagatcctgaagaagctgaccgccgagatcaaccagctgaccctggtgcccctgcccacccacccccaccccgacctggtgtgcctggcccccttcgccgacttcgacaagcagagatacttcagagcccaggtgctgtacgtgagcggcaacagcgccgaggtgttcttcgtggactacggcaacaagagccacgtggacctgcacctgctgatggagatcccctgccagttcctggagctgcccttccaggccctggagttcaagatctgcaagatgagacccagcgccaagagcctggtgtgcggcaagcactggagcgacggcgccagccagtggttcgccagcctggtgagcggctgcaccctgctggtgaaggtgttcagcgtggtgcacagcgtgctgcacgtggacgtgtaccagtacagcggcgtgcaggacgccatcaacatcagagacgtgctgatccagcagggctacgccgagctgaccgaggagagctacgagagcaaggtgaacatcctgagagccgccatcaacaagctggtgtgcgacggccccaacggctgcaagtgcctgggccccgagagagtggcccagctgcaggacatcgccagacagaagctgctgggcctgttctgccagagcaagcccagagagaagatcgtgcccaagtggcacgagaagccctacgagtggaaccaggtggaccccaagctggtgatggagcaggccgacagagagagcagcagaggcaagaacaccttcctgtaccagctgcacaagctggtggtgctgggcacctag

SEQ ID NO: 331194 - DNA, 2757 bp, Artificial Sequence
  derived and/or modified sequence
tgacggactaattccagatttgtcaaggtggttctcatgagcgcaaccatcagttgcaaagagtttgcggattattttgctgttccagtccagaataagatgaacccagcctatatattcgaagtggagggaaaaccgcacagtgtggaggagtactatctgaacgacctggagcacattcaccactccaagctgagcccccatctgctggaggaacctgtaattaccaaggatatctatgaggtggccgtcagcttaatccagatgttcgacgatctggatatgaaggagtcaggaaacaaggcctggtcaggtgcacaattcgtactggagagaagttccgtgcttgtgtttctcccgggcctgggggagataaattatatgcacgagctcctgacctcacttgtgcacaagcgccttcaggtctaccccctccactctagcgtcgccctagaggaacagaataacgtgtttctgtcccccgtccctggttatagaaaaattatcctgagcacgaatattgcagaatcttccgttaccgttccagatgttaaatacgtgatagatttttgtctcacaaggacgcttgtatgcgacgaggacacaaactatcaaagcttacgactgagttgggcatctaagacgtcatgtaatcagaggaaaggcagggccggacgcgttagccgcggttactgttaccgattggtccacaaggatttctgggacaatagtatccctgaccatgttgtcccagaaatgctgaggtgcccgctcggtagcactatcttgaaggtgaaactcctggacatgggggaacctcgggcccttctcgccacagccctatctccacccggtttatctgatatagaaagaactatactactcctgaaggaagttggtgctctggctgtctccgggcagcgtgaggacgaaaacccacacgacggcgagcttacattcctcggaagagtgctggctcagctccccgtgaatcaacagttaggaaaactgatagttttgggccatgtttttggatgcttggatgaatgccttatcatcgctgcggccctctccctgaaaaacttctttgccatgcccttccgccagcacctcgatggataccgaaataaggtgaacttctctgggtctagcaaaagtgattgtatcgccctggtggaggcatttaagacatggaaggcgtgcaggcagaccggagagctgagataccccaaggacgaactgaattggggcagactcaactacatccagatcaaaaggattcgagaagtggcagagttatatgaggagctgaagactagaatttctcagtttaacatgcacgtggatagtcgacgcccagtgatggatcaggagtatatttacaagcaacgcttcatcttgcaggtggtgttagcaggcgccttctacccaaattactttacgtttggccaacccgacgaagaaatggccgtgcgcgaattagctggcaaggacccgaaaaccaccgtcgtactgaaacatatccccccatatggattcttatattataaacagctgcagagtctgttcagacagtgtggccaggttaagagcatcgtctttgacggggctaaagccttcgtggaatttagccgcaacccaactgagcgctttaagactctgccagcagtctacatggccatcaagatgtcacagctgaaagtctccctggagttgtctgtacactcagcggaggaaattgaggggaaggtgcagggcatgaacgtgtctaaactgcgaaatacccgagtgaatgtcgatttccagaaacaaactgttgatcccatgcaggtgtcatttaacacctccgaccgctcccagaccgtaacggaccttctgctcaccatagacgtgaccgaggtggtagaggtggggcacttttggggttacagaatcgatgagaacaacagcgagattctgaaaaaacttaccgcagaaatcaaccagctcacgctcgtgcctttacccacacaccctcaccctgacctcgtctgtctggccccctttgcagattttgacaaacagcggtacttccgagcgcaggtgctctatgtctcaggtaatagtgccgaagtgtttttcgtggactacggcaacaaatcccacgtggacttgcacctgttgatggagattccttgccaattcctggagctgccatttcaggcactggagttcaagatctgtaaaatgagaccttctgccaagtccctggtctgcggtaaacattggagtgacggtgcgtcccagtggttcgcttccctggtcagtggatgcacattgctggtcaaagtgtttagtgtggtacatagcgtcttacatgtcgatgtttaccagtatagtggtgtccaggacgcaattaatataagggacgttttgatccaacagggatacgcagagctcacagaagaatcttacgaaagcaaagtaaatatacttcgagcagcaataaacaagctggtgtgcgacgggccgaatgggtgtaaatgtctggggccagagcgagtggcgcagctgcaagacatcgcccgacagaagctactgggcctgttttgtcagagtaaacctcgggagaagatcgtccccaaatggcacgaaaaaccatacgaatggaaccaagtggatcctaaactcgttatggagcaggctgatagagaatcttcccgggggaagaacacctttctttaccaactgcacaaactggttgtattaggaacatag

SEQ ID NO: 331195 - DNA, 2757 bp, Artificial Sequence
  derived and/or modified sequence
tgaagaaccaacagcagatttgtgaaggtggtgctgatgtctgccaccatcagctgcaaggagtttgctgactactttgctgtgcctgtgcagaacaagatgaacccagcctacatctttgaggtggagggcaagccccacagcgtggaggagtactacctgaatgacctggagcacatccaccacagcaagctgagcccccacctgctggaggagcctgtgatcaccaaggacatctatgaggtggccgtgtccctcatccagatgtttgatgacctggacatgaaggagagcggcaacaaggcctggagcggggcccagtttgtgctggagaggagctctgtgctggtgttcctgcccggcctgggggagatcaactacatgcatgagctgctgaccagcctggtgcacaagaggctgcaggtgtaccccctgcacagctctgtggccctggaggagcagaacaacgtgttcctgagccctgtgcccggctacaggaagatcatcctgagcaccaacattgctgagagctctgtgacagtgcctgatgtgaagtatgtgattgacttctgcctgaccaggaccctggtgtgtgatgaggacaccaactaccagagcctgcggctgtcctgggccagcaagaccagctgcaaccagaggaagggccgggccggccgggtgtcccggggctactgctaccgcctggtgcacaaggacttctgggacaacagcatcccagaccacgtggtgcctgagatgctgcgctgccccctgggcagcaccatcctgaaggtgaagctgctggacatgggagagccccgggccctgctggccacagccctgagccccccaggcctgagtgacattgaaagaaccatcctgctgctgaaggaggtgggcgccctggccgtgtctggccagagagaagatgagaacccccatgatggagagctgaccttcctgggccgggtgctggcccagctgcctgtgaaccagcagctgggcaagctgattgtgctgggccacgtgtttggctgcctggatgaatgtctcatcatcgctgctgccctgagcctgaagaacttctttgccatgcccttccggcagcacctggatggctacagaaacaaggtgaacttcagcggcagcagcaagagtgactgcatcgccctggtggaggccttcaagacctggaaggcctgccggcagacaggagagctgcgctaccccaaggatgagctgaactggggccgcctgaactacatccagatcaagaggatccgggaggtggccgagctgtatgaggagctgaagacccgcatcagccagttcaacatgcacgtggacagcagaagacctgtgatggaccaggagtacatctacaagcagcgcttcatcctgcaggtggtgctggccggggccttctaccccaactacttcaccttcggccagccagatgaggagatggctgtgcgggagctggccggcaaggaccccaagaccaccgtggtgctgaagcacatccccccctacggcttcctgtactacaagcagctgcagagcctcttccggcagtgtggccaggtgaagagcatcgtgtttgatggagccaaggcctttgtggagttcagcaggaaccccacagagcgcttcaagaccctgcctgctgtgtacatggccatcaagatgagccagctgaaggtgtccctggagctgtctgtgcacagcgctgaggagattgagggcaaggtgcagggcatgaatgtgtccaagctgaggaacaccagggtgaatgtggacttccagaagcagacagtggaccccatgcaggtgtccttcaacaccagtgacaggagccagacagtgacagacctgctgctgaccattgatgtgacagaggtggtggaggtgggccacttctggggctacagaattgatgagaacaacagcgagatcctgaagaagctgacagctgagatcaaccagctgaccctggtgcccctgcccacccacccccacccagacctggtgtgcctggccccctttgctgactttgacaagcagcgctacttccgggcccaggtgctgtatgtgtctggcaacagcgctgaggtgttctttgtggactatggcaacaagagccacgtggacctgcacctgctgatggagatcccctgccagttcctggagctgcccttccaggccctggagttcaagatctgcaagatgaggcccagcgccaagagcctggtgtgtgggaagcactggagcgatggagccagccagtggtttgccagcctggtgtctggctgcaccctgctggtgaaggtgttttctgtggtgcacagcgtgctgcacgtggatgtgtaccagtacagcggcgtgcaggatgccatcaacatcagagatgtgctgatccagcagggctatgcagagctgacagaggagagctatgagagcaaggtgaacatcctgcgggccgccatcaacaagctggtgtgtgatggccccaacggctgcaagtgcctgggccctgagcgggtggcccagctgcaggacatcgcccggcagaagctgctgggcctcttctgccagagcaagccccgggagaagatcgtgcccaagtggcatgagaagccctatgagtggaaccaggtggaccccaagctggtgatggagcaggccgaccgggagagcagccggggcaagaacaccttcctgtaccagctgcacaagctggtggtgctgggcacctag

SEQ ID NO: 331196 - DNA, 2757 bp, Artificial Sequence
  derived and/or modified sequence
tgacggaccaacagccggttcgtgaaggtggtgctgatgagcgccactatttcatgtaaggagtttgcagactacttcgcggttcctgtccagaacaagatgaacccagcttacatttttgaggtggaggggaaacctcactcagttgaggagtactatttgaatgatctcgaacatatccaccattctaagctgtcaccgcacctgcttgaggaaccggtcataacaaaggatatctatgaggtggcagtgagcctgattcagatgtttgatgacttggacatgaaggagtcagggaacaaagcatggtccggggcccagtttgttctggaacggtcctctgtgcttgtcttcttgcctggcctcggagaaattaattacatgcatgaactgctgacttcactcgtgcacaaacggctacaggtgtatcccctccacagctccgtggccctggaggaacagaataatgtgtttctctctcccgtgcctgggtacaggaaaatcatcctgtctacaaacatcgcagaatcctctgtgacagtgccagatgtgaaatatgttatcgacttttgcttgactcgcacgctcgtctgtgatgaagatacaaattatcagtcactgaggctgtcatgggcgtccaagacttcttgcaatcaacggaagggtcgagccgggcgagtctcccggggatactgttacaggcttgttcacaaagatttctgggataactccatccctgatcacgtggtccccgaaatgttacgttgccctctcggcagcaccatcctcaaggtaaaactcctggatatgggggaaccgcgtgctctgctagctacagctctgagtccacctgggctctctgacatcgaacggactatattgcttcttaaagaagtgggtgcattggctgtttccggccagcgggaagacgagaatccacacgatggcgaactgacttttcttggacgcgtgcttgctcagctacctgtgaatcaacagctcggcaagctgatagtcttaggccacgtcttcggatgcttggacgaatgtctcattatcgcggccgcgctcagtttgaagaatttttttgcgatgccctttaggcagcacctggacggttatagaaacaaggtgaacttctccggctcatcaaaatccgattgcatcgccctggtagaggcctttaagacttggaaggcttgcaggcagaccggcgaactccgttatcccaaagatgaactcaattggggcagactgaactatatacaaataaagagaatacgggaagtcgccgagctatacgaggaactgaaaactaggatttcccagttcaacatgcacgtggacagtcggagacctgtgatggaccaagagtacatctacaagcagcgttttatcttacaggtcgttctggccggtgcattctatcctaactacttcacctttggccagcccgacgaagaaatggctgtccgggagctcgccggaaaggacccgaagaccactgtagtcttgaagcatatccctccatacggattcctgtactataagcagctgcagtctctcttccgtcagtgcggtcaggtgaaaagtatcgtctttgacggtgccaaggcctttgtggaattctctcgcaaccccaccgaaaggttcaagacgctgcccgcggtatatatggccataaaaatgtcccagctgaaagtttccctagaactcagtgttcactcagctgaggagatcgaagggaaggttcaaggcatgaatgtgagtaaacttcgcaacacacgcgtcaacgtggacttccaaaagcagaccgtcgaccctatgcaggttagcttcaacaccagtgaccgaagccagactgtgactgatctgcttctgaccattgacgtcaccgaggtggtcgaggtcggacatttctgggggtaccgaatagacgaaaacaactcagagattctcaaaaaactgacggctgaaatcaaccagttaacgctggtgcccctgcctacccatccgcatcctgatctggtgtgtctggcccccttcgctgactttgacaagcagagatatttcagagcccaggtcctttatgtgagcggaaacagcgccgaggtgttttttgtggattatgggaacaaatcccatgtggacctgcaccttctgatggaaattccatgtcaatttttggagctgcctttccaggccttggagtttaaaatatgtaagatgaggcccagcgccaagtccctggtatgcggaaagcactggagtgacggggcgtctcagtggttcgcttccctagtcagtggatgtacactgttagtgaaggtctttagtgtggtccactccgttctgcacgtggacgtgtaccagtacagcggcgtgcaggatgcaatcaacattagggatgtattgattcagcaaggctacgcggaattgaccgaggaaagctatgaaagcaaagtcaatattctaagagccgccataaataagctcgtctgtgacgggccaaacggatgtaaatgtctgggcccggaacgcgtggctcagttgcaagacatcgcacgccaaaagctgctggggctgttctgccagagcaaaccaagagaaaagatcgtccctaaatggcatgagaagccatacgagtggaatcaggttgatcctaagctagtcatggagcaggccgacagggagtcatcgcggggaaagaatacctttctataccagttacacaaattagtagtcttggggacgtag

SEQ ID NO: 331197 - DNA, 2757 bp, Artificial Sequence
  derived and/or modified sequence
tgacggactaactcacgctttgttaaggttgtccttatgtctgccactattagttgcaaggaattcgcggattactttgctgtgcccgtacagaataaaatgaacccagcttacattttcgaggttgaaggaaaaccacatagtgtggaagagtactacctcaacgacttggagcatatacatcattcaaaacttagcccccacttactggaggaaccggtcatcaccaaggacatttatgaagttgctgtgtctctgatccaaatgttcgacgacctagatatgaaggaatccgggaacaaagcctggagcggagcgcagttcgtgcttgagagatcatcagtcctggttttcctgccaggtctgggggaaatcaactatatgcatgaactcctcacaagtttagtacacaagagactgcaagtctatcccctgcactcgtctgtggcactagaagaacagaacaatgtgttcctgtctcctgtacccggataccgcaaaattatcctgagcacgaacatcgcagagagctcagtgacggttcctgacgtgaagtacgtgatcgatttctgcttaacaaggaccctagtctgcgacgaagatactaattatcagagcctcaggttgtcttgggcgtctaagacgtcctgtaaccagcggaagggcagggctggtcgagttagccggggttattgttacaggctggtgcacaaagatttctgggacaactcgatccctgatcacgttgttccagagatgctacgctgtcctctgggaagtacgattctgaaggtgaaacttctcgatatgggtgaacctcgcgcactccttgcgaccgccctttctccgccaggactgtcagacatcgaacggactatactgctccttaaagaagtgggtgctttggctgtcagtggccagagggaagatgagaaccctcatgacggagagctgacattcctgggtagagtcctcgctcagttaccggttaaccagcagctggggaaactgatcgttcttgggcatgtgttcggatgcctcgatgagtgcctgattattgctgctgcactgtccttgaagaacttcttcgccatgccttttaggcagcacttagatggctataggaataaagtaaacttcagtggttcatccaaaagcgactgcattgctctggtggaggcctttaagacttggaaggcatgtagacagaccggcgagcttcggtacccgaaagacgagctaaactggggtagacttaattatatccagatcaagagaataagggaggtggccgagctctacgaagagctgaaaactcggatttcccagtttaacatgcatgtggactcacggcgtcccgtcatggatcaggagtatatttataagcagcggttcatattacaagtcgtcctggctggggctttttaccccaattattttacatttggacaaccagacgaagaaatggccgtcagggagctcgccggaaaggaccctaaaaccaccgtggttctcaaacatattcctccatatggattcctgtactacaagcagctgcagagcctgtttcgacagtgcggtcaggtcaagtcgatagtgtttgacggcgcaaaggcctttgtcgaattctcccgcaatcctaccgagaggtttaagacattgccagccgtctatatggccataaaaatgtcgcagctgaaggtgagtctcgaactgtcggtgcacagcgctgaagagatcgaaggcaaggtgcaggggatgaatgtttccaaactcaggaacacccgcgtcaacgtggattttcagaaacagaccgttgatcccatgcaggtgtcctttaataccagtgatcgatcacaaaccgttacagatttactgttaaccattgacgtaacggaggttgtcgaggtgggacacttttggggctataggatcgacgagaacaactccgaaatcctaaagaaactcacggccgaaattaaccagctcactcttgttccactgcccacacatccccacccagatctagtctgcttagcgccttttgccgatttcgacaaacagcgctacttcagagctcaggtactgtacgtgagtggaaattccgctgaggttttcttcgttgactacggtaataagagtcacgtggatctgcaccttttgatggaaatcccctgccagtttctggagcttcccttccaagccttggaattcaaaatatgtaaaatgcgaccaagcgccaagagtctggtctgcggcaaacactggtcagatggtgcatcacaatggtttgcttcgttggtaagcggctgcacactgctggtgaaggtcttctctgtagtccactcagtgttgcacgttgacgtctaccagtacagcggcgttcaggatgcaattaatatcagggacgtcctgatccagcagggctacgccgaactgactgaggaatcttacgaaagcaaggtgaatatcctgagagcagctataaataagttagtgtgtgacggaccgaacggttgtaaatgtctagggcctgagcgcgtcgcacagctgcaagatatcgccagacagaaactccttggcctattttgtcagagtaaaccgagagagaaaattgtcccaaaatggcatgagaaaccctacgagtggaaccaggtggatccaaaactggtaatggagcaagccgacagagagagttctcggggtaagaacaccttcctgtatcagctacataagctggtcgtacttgggacttag

SEQ ID NO: 331198 - DNA, 3338 bp, Artificial Sequence
  derived and/or modified sequence
aagaacaaattcacgttttgtgaaggtggtcctgatgtcggctaccatcagctgtaaagagtttgcagactactttgctgttcctgttcaaaacaagatgaatcctgcatatatttttgaagtggaaggcaagccccattcagttgaagagtattatcttaatgatttggagcacattcatcatagcaagctctctcctcatctcctggaggaaccggtgataactaaggatatatatgaagttgctgtctctctcattcagatgtttgatgacttggatatgaaggagagtgggaacaaggcttggtcgggggcccagtttgtgttggagcgaagcagtgtgttggtgtttttgccaggtctgggtgaaataaattatatgcatgaacttctcacaagcctggttcataaaaggttgcaggtctatccactccattcaagtgtggctttagaagaacagaataatgtctttttaagtccagtccctgggtacagaaagattattctgtccaccaatattgcagagagttctgtcacagttccagatgtcaaatatgttatagatttttgtttgactagaactttggtctgtgatgaagatacaaattatcagagtctgcgattgagttgggcttctaaaaccagctgtaatcagagaaaaggccgtgctggacgagtgtctagagggtactgttaccggctggtacacaaggatttctgggacaactccatccctgatcatgttgttcctgagatgttgcgttgtccattaggaagcacgatcttgaaagtgaaattacttgacatgggtgagccgagagctctgctggccactgccctttccccgcctggtctgagtgacattgagcgcaccatccttctactaaaggaggttggagcacttgcagtgagtgggcagagagaagatgaaaacccccatgatggtgaattgaccttcttaggaagagttttagcccaacttcctgtaaatcagcaacttggtaaactcatagtccttggacatgtatttggatgtctagatgaatgtcttattatagcggcagctctttctttgaagaatttttttgcaatgcctttccggcagcatctcgatggatataggaacaaagtgaatttctctggcagtagcaagagtgactgtattgcacttgttgaggcatttaaaacatggaaggcttgcagacagacaggggagctgcggtacccgaaggatgaacttaattggggacggttaaattacattcaaatcaagagaattagagaggtggctgaattatatgaagaattgaagactagaatctcacagttcaacatgcatgttgattctcggcgacctgtcatggaccaagagtatatatataagcagcgattcatcctacaggttgtattggcaggtgctttctatccaaattactttacttttggacagccggatgaggagatggcggtgagggagctggctggcaaggaccccaagacaactgtcgtgttgaaacacattcctccctatggatttctttactataaacaactacagtctctctttagacagtgtggtcaagtcaaatccattgtatttgatggtgcaaaagcctttgtggaattctcacgaaatccaacagagagatttaaaacccttcctgcagtatatatggcaattaagatgtctcaactaaaagtttcacttgaactcagcgttcattctgcagaggaaattgaagggaaggtgcaaggcatgaacgtctcaaagctcaggaacacaagggtgaatgtggacttccagaagcagacggtagatcctatgcaagtctcctttaacacatcagacaggtcccagacagttacagatctccttctaactattgatgtcacagaggtggttgaagtgggacacttttggggatacaggattgatgaaaacaactcagagattctgaaaaagcttactgctgaaatcaaccaactgacgctggtgcccttgcccactcacccacatccagacttggtctgtctggcaccttttgctgattttgataaacaacgctactttagagctcaagtcctttatgtttctggaaattctgctgaggtattctttgtagattatggcaataagtctcatgtagatctacatcttttgatggagattccctgtcaatttcttgaacttcctttccaggctttggaatttaagatttgcaaaatgagaccatcagcaaagtctcttgtttgtggcaagcactggagtgacggggccagccagtggttcgcctctctggtgagcggctgcaccctccttgtgaaggtcttctctgtggtgcacagcgtcctgcacgtggatgtgtaccagtactcaggggtccaggatgccatcaacataagagacgtcctcatccagcagggctatgccgagctcacggaggagtcctacgagtccaaggttaatattctcagggctgctattaacaagctagtctgtgatggaccaaatggatgcaagtgtcttgggccagagagagttgcgcagcttcaagacattgcccgtcagaagcttttaggtttgttctgtcagtcaaaaccaagggagaagattgttcccaagtggcatgaaaagccctacgagtggaatcaggttgatccaaagctggtcatggagcaggccgaccgtgagagcagcagagggaagaacacctttctctaccagctccacaaactggttgtgctcggcacctgagcatgtccacaggtggcctccagcacacccctcaggaagctgtggaggctggattccaggctccctccgcagactgactttcctctgtgtctgggtgttacagtctgtgcccactgcatcctaaaggccttttctttcttcttttctctttgggtgatagtcagagagtggtgtttttgttcaggtgggaaggattggaaactctagtcttttctagaaacagaaaatcactgtattaaatattttggaaagattgttctgaaagaagtctgtttggataaagagctgtattttgctttaaatttattaaggtaaatataagtagttaatcttagatgtaaggttccagaatgtgcttacatattctgttctgttacagtgatttaaaccagtagtataggaaaaaacttaaaaaaacaaaaaaaccatgtagtattttctgatttttttttccatgagggaaaatatctaatttttataagactaagttgagttatacttcttggttcacattttggaaatcagagattacagattacatggccatagcttatctgtgttaaaacaataaaagcattaaatg

SEQ ID NO: 331199 - DNA, 240 bp, Artificial Sequence
  derived and/or modified sequence
atgatcttcacccccttcctgccccccgccgacctgagcgtgttccaaaatgtcaagggactacaaaatgatcctgaggagtgggttgcagtgtctgacgccaccgaggacccttccggtggaactggactgcccagggagcccgccctgctgagaggatcatggcgctctcgtttccagcgtgccctagcatgtttcacaaaatgcttcagaggcggctatagagctctggggatatag

SEQ ID NO: 331200 - DNA, 2139 bp, Artificial Sequence
  derived and/or modified sequence
gacgccgccagctcttcactccacgcccacctctctcctggagcgctgggccttcgctggccgcaccggcagccatgagctcggagatggagccgctgctcctggcctggagctattttaggcgcaggaagttccagctctgcgccgatctatgcacgcagatgctggagaagtccccttatgaccaggcagcttggatcttaaaagcaagagcgctaacagaaatggtatacatagatgaaattgatgtagatcaggaaggaattgcagaaatgatgctggatgaaaatgctatagctcaagttccacgccctggaacgtctttgaaactccctggaactaatcagacaggagggcctagccaggccgttaggccaatcacacaagctggaagacccattacaggtttcctcaggcccagcacgcagagtggaaggccaggcactatggaacaggctatcagaacacccagaaccgcctacacagcccgccctatcaccagctcctccggaagatttgtcaggctgggaacggctttgtttgagtatatctttcatcatgaaaatgatgttaagactcaaaatccttttcttcaagtgaaatcttatcgagaccctaatacgtaaaacagacaaaaggctttggatctggctgccctctccacagaacattctcagtacaaggactggtggtggaaagtacagattggaaaatgttactacaggttgggaatgtatcgtgaagcagaaaaacagtttaaatcagccctgaagcagcaggaaatggtagatacatttctgtacttggcaaaagtttatgtctcattggatcaacctgtgactgctttaaatcttttcaaacaaggcttagataagtttccaggagaagtaaccctgctctgtggaattgcaagaatctatgaggaaatgaacaatatgtcatcagcagcagaatattacaaagaagttttgaaacaagacaatactcatgtggaagccatcgcatgcattggaagcaaccacttctattctgatcagccagaaatagctctccggttttacaggcggctgctgcagatgggcatttataacggccagctttttaacaatctggggctgtgttgcttctatgcccagcagtatgatatgactctgacctcatttgaacgtgccctttctttggctgaaaatgaagaagaggcagctgatgtctggtacaacttgggacatgtagctgtgggaataggagatacaaatttggcccatcagtgcttcaggctggctctggtcaacaacaacaaccacgccgaggcctacaacaacctggctgtgctggagatgcggaagggccacgttgaacaggcaagggcactattacaaactgcatcatcattagcaccccatatgtatgaaccgcattttaattttgcaacaatctctgataagattggagatctgcagagaagctatgttgctgcgcagaagtctgaagcagcatttccagaccatgtggacacacaacatttaattaaacaattaaggcagcattttgctatgctctgattgttccttagaccacatatgttcttatgaagcagcattatgcaaggggaaaaaagcactatgtctgtgtatgtatgtatatagtgtaatacgtatattttaacaaacctgtccttgatattagttaaggtgacacataagggtgacacagaatgtgtaatgcaaatttcatagtaatagtaactttataaaataatattataaaatacaggatttaaacctttctaaatagatcctgaaactgtctctcacattatatagtagatgtttgtttataatgtttacaaaacattttggtgaatttcctcaatgttttataaatgtacattttttaagtccttaagctgactcttagccatcatgtagcttaaggagtctgaaatctgccattaaaactgcacctttaagccaggtgtggtagcatgtgcctatagtcccagctacttgggaggtggaggtgggaggattataaatagagactttccttaagactttaaaaatgtatttaaaactattttttattaaatactttgtgatttcctattaagctttaaaataaatcattgtgtaaaacacc

SEQ ID NO: 331201 - protein, 558 aa, Artificial Sequence
  derived and/or modified sequence
MAPVNGTQTAKNCTDPAIHEFPTDLFSNKERQHGAVLLHILGALYMFYALAIVCDDFFVPSLEKICERLHLSEDVAGATFMAAGSSTPELFASVIGVFITHGDVGVGTIVGSAVFNILCIIGVCGLFAGQVVRLTWWAVCRDSVYYTISVIVLIVFIYDEQIVWWEGLVLIILYVFYILIMKYNVKMQAFFTVKQKSIANGNPVNSELEAGNDFYDGSYDDPSVPLLGQVKEKPQYGKNPVVMVDEIMSSSPPKFTFPEAGLRIMITNKFGPRTRLRMASRIIINERQRLINSANGVSSKPLQNGRHENIENGNVPVENPEDPQQNQEQQPPPQPPPPEPEPVEADFLSPFSVPEARGDKVKWVFTWPLIFLLCVTIPNCSKPRWEKFFMVTFITATLWIAVFSYIMVWLVTIIGYTLGIPDVIMGITFLAAGTSVPDCMASLIVARQGLGDMAVSNTIGSNVFDILVGLGVPWGLQTMVVNYGSTVKINSRGLVYSVVLLLGSVALTVLGIHLNKWRLDRKLGVYVLVLYAIFLCFSIMIEFNVFTFVNLPMCREDD

SEQ ID NO: 331202 - DNA, 4417 bp, Artificial Sequence
  derived and/or modified sequence
gggcccgcagatctctctggttcccctctctgccccgtctccagcttttttgcagggcacaaaacagcttctgctagcaaacgtgtcctgccagacacgtggagaaatagaaagttgatggccccagtgaatgggacacagacagccaagaactgcacagatcctgcgattcacgagttccccacagatctgttctccaataaggagcgacagcacggagccgtcctgctgcacatccttggtgctctgtatatgttctatgccttggccatagtgtgcgatgacttctttgttccgtctctagagaagatctgtgagagactccatctgagcgaagatgtggctggagccaccttcatggctgcaggaagctcaacgccagagctgtttgcgtctgttattggggtgttcatcacccatggggacgtcggggtgggcaccatcgtgggctctgctgtgttcaacatcctgtgcataattggagtgtgcggactgtttgctggccaggtggtccgtctgacgtggtgggccgtgtgccgagactccgtgtactacaccatctctgtcatcgtgctcatcgtgttcatatatgatgaacaaattgtgtggtgggaaggcctggtgctcatcatcttgtatgtgttttatattctgatcatgaagtacaatgtgaagatgcaagcctttttcacagtcaaacaaaagagcattgcaaacggtaacccggtcaacagtgagctggaggctggtaatgatttctatgacggtagctatgatgacccttccgtgccattgctggggcaagtgaaggagaagccacagtatggcaagaaccccgtggtgatggtggacgagattatgagctccagccctcccaagttcaccttccctgaagcaggcttacgaatcatgatcaccaataagtttggacccaggacccgactacggatggccagcaggatcatcattaatgagcggcagagactgatcaactcggccaatggtgtgagcagtaagccgcttcaaaacgggaggcacgagaacattgagaacgggaatgttcctgtggaaaaccccgaagaccctcagcagaatcaggagcagcagccgccgccacagccaccaccgccagagccagagccggtggaggctgacttcctgtcccccttctccgtgccggaggccagaggggacaaggtcaagtgggtgttcacctggcccctcatcttcctcctgtgcgtcaccattcccaactgcagcaagccccgctgggagaagttcttcatggtcaccttcatcaccgccacgctgtggatcgctgtgttctcctacatcatggtgtggctggtgactattatcggatacacacttgggatcccggatgtcatcatgggcattactttcctggcagcagggacaagtgttccagactgcatggccagcctaattgtggcgagacaaggccttggggacatggcagtctccaacaccataggaagcaacgtgtttgacatcctggtaggacttggtgtaccgtggggcctgcagaccatggttgttaattatggatcaacagtgaagatcaacagccgggggctggtctattccgtggtcctgttgctgggctctgtcgctctcaccgtcctcggcatccacctaaacaagtggcgactggaccggaagctgggtgtctacgtgctggttctctacgccatcttcttgtgcttctccataatgatagagtttaacgtctttaccttcgtcaacttgccgatgtgccgggaagacgattagcgctgagtcgcggcccctgggagctgatctggacaccctgtgacactggcgttctcctctcccctccttcccccaccacaggtctctcctgcataggcagccactgtccgttctttcacacactggaaggaagagccatcgtggtctttgtctggccacaggccaggctgctgggcatcctcctcctccttggagttccgcccctgcaaggctggatttgggggccattatctgagcagcttcaaagacccctgagctgccaaccacggagatgtgccaagcatctcatctctcctgcacactttagtcagaaggacttctgcatgcagtttgtctttctgttctgcaggcagcttcagaattgaggtcatttgtgagcacaagatctcatagggcaggtgcaaaataggaatgttgttctcaagtgtcacctccagcccagaggtggttccttaggcagcatgtgctcctgggagcctctgacttttgctggaagcagccacagtttggaaggggcaagacctcaacctgttggggtttagggcccatgatggcagacattctaccccttttcctggaaaaactggaagaatgaaaataatttttttctgtggaagagagaaaatgagtgaatattcttctcacttttattgatgcattcagagaataagcaatgaaatattaaaaaatgaaacatcatataggtcatcatacttgaaaattatcattccatatgaaaggatcatgatacacaccaaaaaagtaatgatcgtaaagacacaaatcctctgtatgccatcttgcattggcactgaggtgtttggtttggaatagggaaaaaggtaagagactaacgtggaaaggtgctaactcagagactggagattatagtttacagctgtactttccagatcttctatgtgacacaatgcactgtccttgtgggtttgtcatttattggttaatgctctagtttcaaaaccaccctgttgaaagttccagttatttatatgcccaacaaatttcatagcctgctgaactgaactgagtgtgtcagaagtgctggttaatgacgagaagagattgcctgaaaaacaacaaactgctttctggttagctgaaggcaagtgtgaaaatcagaatttagaatatttagagctaagcttctggaaccacgtagtttctacacgtggcaggccaagaatgggaggctgactcaaaactagatagaaaaatataaaataatcttcgaccacttgatagctctcaaatatatatttaaaagatttatgaatacaaaccatttatggtttatgatttctaaaaagaaagcacaattaattttatagagaggttttttatttttttaatatttctattgcaaaagtctatccgatttgatgcactttgaatattgagatattttgcacggatgaatgtatgggaactacccatgatgatgtaagaggaaagaacatttttttgtgattcaccagacatcactttaaacttggtgatgagtttaaatccagtagctaatcccttcctgagactcaaagatcgtgacgctggttggaatttctgactgtgccctttagggcctcctgagtttcaaaaggaggaagtgttcgtgcttgtgtccctgaagttccctgttgcatgagcctgcgacaggacctcacccccaccaccaggcttctatttgggattcacatcagtattagtatcgtagctacaccaagttcaggcttctctttttgtttttttacctagaaattgggctcagtggtcttcaacttgaggacgagggtgattttcctaagaaatcagcaaagagggaaggcagggcccctgtagattcaccagtataaacttcagctgcagggattccagagccctcgggaccactctgtcaccttaatagccaagttctcctggttcctccgatcttacaggctcatccaggttccaaagtgcttctgtctctgttttgattctccaaactgctctgtgatgtatgtagggattattctccccacttaacagaaagtagtgtcttggagaggtcaagggtctctagttcaatggccagtcatagcagaagggaggccaagcaccagtccatcacccctcccaggccagcctctgtaagttggccacacttggggagtgagtgtgggtatgactttaccctcctggttggttcttactgtttgagtcaaaacctcatcaatatatcattgactcctgggttcctcaggtcatttcctaatatctgtccctatccaatgcctctattttatcttgaaaaaaggaccaaaaattatttttagctatggcaaggcacaggccacatggcccctgatggcgtccctgctggttttcaattctctgaagccttgtgtagctttcagagcacacgtatcctaattaccctcctcttcctcagcagaacccatttgagattctaaatgaatactcttagtctctaaagttgcagttagaaactaaaataatgttttttaatatgtaatatgctcctcttggctaattttcttttgactttaatgtgccaatgtaacttcctttaaaggatctatgcatttattaaatctggaaaact

SEQ ID NO: 331203 - protein, 104 aa, Artificial Sequence
  derived and/or modified sequence
MENWSKDITHSYLEQETTGINKSTQPDEQLTMNSEKSMHRKSTELVNEITCENTEWPGQRSTNFQIISSYPDDESVYCTTEKYNVMEHRHNDMHYECMTPCQVT

SEQ ID NO: 331204 - protein, 128 aa, Artificial Sequence
  derived and/or modified sequence
MENWSKDITHSYLEQETTGINKSTQPDEQLTMNSEKSMHRKSTELVNEITCENTEWPGQRSTNFQIISSYPDDESVYCTTEKYNVMEHRHNDMHYECMTPCQVTSDSDKEKTIAFLLKELDILRTSNK

SEQ ID NO: 331205 - DNA, 1275 bp, Artificial Sequence
  derived and/or modified sequence
atgaacagtgaaaaatcaatgcaccgcaaatcaacagaactagtgaacgaaataacctgtgagaacactgaatggcctggacaacgcagcaccaattttcaaatcatttcttcttatcctgacgacgaatcagtgtactgcaccaccgaaaagtacaatgtgatggagcaccgacataacgatatgcactatgaatgtatgactccatgtcaggtcacttccgactcggacaaggaaaagacgattgcattccttctgaaggaactcgacatactgcggacctctaacaagaagctgcagcagaaactggccaaggaggataaggagcagaggaaactcaaatttaagttggagcttcaagagaaggaaactgaggccaagatcgccgagaagacggcagctctagttgaagaggtatacttcgctcagaaggagcgggacgaggcagttatgtcccgcctccagcttgctattgaagagagggatgaggctatcgctagggcaaaacacatggaaatgtctctgaaagttctagaaaatatcaatccagaggaaaacgatatgaccctgcaggaactcctgaatcggatcaacaatgcagacacaggtattgccattcagaagaatggtgctattatcgtcgataggatctacaagacgaaggaatgcaaaatgcgtattacagccgaggaaatgagtgccctcatagaggagcgagatgccgctctgtctaagtgtaagaggcttgaacaggagctgcatcatgtgaaagaacaaaaccagactagcgctaacaacatgcgtcatctaacagccgaaaacaaccaggaacgtgccctgaaggccaaactgcttagcatgcaacaggcgcgcgagacagccgtgcaacagtacaaaaagctggaagaggagattcagacactccgagtgtactactcactacacaagtctctgtcccaggaggagaatctgaaggatcagttcaattacactctcagtacatacgaggaagcccttaagaaccgcgagaacatcgtgtctataacacagcagcaaaacgaagaactcgccactcagctccagcaggcactcaccgagagagccaatatggagctgcagctacagcacgcacgggaagcgtcacaggtggccaacgagaaagtgcagaagagccagatccaaatctattttatccctaacaagaaggatgaaagagaaaaatttctcatggacaagaggagaaaaattgtggcacactcaaagcagaattcatag

SEQ ID NO: 331206 - DNA, 1275 bp, Artificial Sequence
  derived and/or modified sequence
atgaacagcgagaagtccatgcacaggaagagcacagagctggtgaatgagatcacctgtgaaaatacagagtggccaggccagaggagcaccaacttccagatcatcagcagctacccagatgatgagagcgtgtactgcaccacagagaagtacaacgtgatggagcaccgccacaatgacatgcactatgagtgcatgaccccctgccaggtgaccagtgacagcgacaaggagaagaccatcgccttcctgctgaaggagctggacatcctgcggaccagcaacaagaagctgcagcagaagctggccaaggaggacaaggagcagaggaagctgaagttcaagctggagctgcaggagaaggagacagaggccaagattgctgagaagacagctgccctggtggaggaggtgtactttgcccagaaggagagagatgaagctgtgatgagccggctgcagctggccatcgaggagagagatgaggccatcgcccgggccaagcacatggagatgagcctgaaggtgctggagaacatcaacccagaagaaaatgacatgaccctgcaggagctgctgaaccgcatcaacaatgctgacaccggcatcgccatccagaagaatggagccatcatcgtggaccgcatctacaagaccaaggagtgcaagatgaggatcacagctgaggagatgtctgccctgattgaggagagagatgctgccctgagcaagtgcaagaggctggagcaggagctgcaccacgtgaaggagcagaaccagaccagcgccaacaacatgaggcacctgacagctgagaacaaccaggagcgggccctgaaggccaagctgctgtccatgcagcaggcccgggagacagctgtgcagcagtacaagaagctggaggaggagatccagaccctgcgggtgtactacagcctgcacaagagcctgagccaggaggagaacctgaaggaccagttcaactacaccctgagcacctatgaggaggccctgaagaacagagaaaatattgtgtccatcacccagcagcagaatgaggagctggccacccagctgcagcaggccctgacagagcgggccaacatggagctgcagctgcagcacgcccgggaggccagccaggtggccaatgagaaggtgcagaagagccagatccagatctacttcatccccaacaagaaggatgagcgggagaagttcctgatggacaagaggaggaagatcgtggcccacagcaagcagaacagctag

SEQ ID NO: 331207 - DNA, 2073 bp, Artificial Sequence
  derived and/or modified sequence
ggaacgaggtctcactatattgcccagactggtctcgaactcctgggctcaaacagtccccctgcgttggcctcccaaagtgatggaattacaggtgtgaatcactgcatctgactatggcaaggatctctgtcactgagctaatccaaaagtaaatgagaaacttagaaaaagattgccaattccaaatcaacatatttagagaaaattggaaaaggagaagcttactacagctttatttgaggactttttaaagaacgctgggttctatctgtgagctgcaaatcttggagcaaaaaccagagacattgccagagcaaacaagaacagaaatacaaatggagaactggtcaaaagttatcttgaacaagaaactacggggataaataaaagtacgcagccagatgagcaactgactatgaattctgagaaaagtatgcatcggaaatccactgaattagttaatgaaataacatgtgagaacacagaatggccagggcagagatcaacgaattttcagatcatcagttcttatccagatgatgagtctgtttactgcactactgaaaaatacaacgttatggaacatagacataatgatatgcattatgaatgtatgactccttgtcaagttacttcagactcagataaagagaagacaatagcatttcttctaaaagaattggatattctcagaacaagcaataaaaagcttcagcagaaattggctaaagaagataaagaacagagaaaactaaagtttaagctggaactccaagagaaagaaacagaagctaaaattgctgaaaagacagcagctctggttgaagaagtgtattttgcgcagaaggaacgtgatgaagctgttatgtctagactgcaattagccattgaggagagagatgaagcaattgcacgagccaagcatatggaaatgtctctaaaagtgctagaaaatattaaccctgaagaaaatgacatgacattacaggaattactgaacagaataaacaatgcagacacagggatagctattcagaagaatggagctataattgtggatagaatctacaagaccaaggaatgtaaaatgagaataactgcagaagaaatgagtgcactaatagaagaacgggatgctgccttgtctaagtgcaaacggttagagcaggagcttcatcatgtgaaagagcagaaccagacttcagcaaacaacatgagacatctgactgctgaaaacaatcaagaacgtgctctgaaggcaaagttgttatctatgcaacaagccagagaaactgcagttcaacagtacaaaaaactggaagaggaaatccagacccttcgagtttactacagtttacacaaatctttatctcaagaagaaaatctgaaggatcagtttaactatacccttagtacatatgaagaagctttaaaaaacagagagaacattgtttccatcactcaacaacaaaatgaggaactggctactcaactgcaacaagctctgacagagcgagcaaatatggaattacaacttcaacatgccagagaggcctcccaagtggccaatgaaaaagttcaaaaatctcaaatacaaatctatttcattccaaataaaaaagatgaaagagaaaaattcctaatggataaaagaagaaagattgttgcacattcaaaacagaattcttgatagatacaaaatcatccaataaacttcagctagttttcagcattatatgcagttgatttgtccattcctcagtggaacttccaaatcatctaaaccagctttgtatgacactaagaataccctcattccttcagtgtctagctctgtgctgtgtttatttgcagaggaccctcatgcatggatccatataaatgaggcaaactgtgaagcagactagactgtgccgcttaccgtaaagtctttgagagaggaagattgtgtatatgaaaactgctaggcatgatatttacttataaggaagatttctatgtgtataacatcaagcaagatttttggttgaggttttatgctttcagtaaagaaaataaaagaagaaaacc

SEQ ID NO: 331208 - DNA, 1275 bp, Artificial Sequence
  derived and/or modified sequence
atgaacagcgagaagagcatgcaccggaagagcaccgagctggtgaacgaaataacttgcgaaaataccgagtggcctggacagagatccacgaattttcagatcatctcgagctatccggacgacgaatcagtttactgcacaaccgagaaatataatgtaatggagcataggcataacgacatgcattatgagtgcatgaccccttgtcaggtcacatcagactcagacaaagagaaaacgattgcatttctgctgaaggagttggacattctcaggacctctaataaaaagttgcagcaaaagctggccaaagaggacaaggagcagaggaagctcaagtttaagttggagcttcaggagaaggagactgaagccaagatcgccgaaaaaactgcagcactcgtggaagaggtatacttcgctcagaaggaacgcgacgaggccgtcatgtccaggcttcagctggccattgaggagcgcgacgaagccatcgcgcgggccaagcatatggagatgagtctcaaagttctggagaatattaatcccgaagagaatgatatgacgctccaagaattgctaaatcgcattaacaatgccgataccgggatagccatccaaaagaacggggccattatcgtcgatcggatctacaaaacgaaagaatgtaaaatgcgcatcaccgcagaggagatgtctgctctgatagaggaacgggatgcggcactgtctaaatgcaaaagactcgagcaggaactacaccacgtaaaagaacaaaatcagacctccgctaacaacatgaggcacctgaccgcagagaacaaccaagagcgggccctgaaggcgaagctgctgagtatgcagcaagccagagaaacggccgtccagcagtacaaaaaactagaggaggaaattcagactctacgcgtgtactacagcctgcataaaagcctgagtcaggaagagaatttgaaggaccagttcaactacacccttagcacgtacgaagaggccctcaaaaatcgagaaaatattgtgtcgataacgcaacagcagaatgaagagttggcgactcagctccagcaggctttgacagaacgggccaacatggaattgcagttacagcacgcgcgggaggcgtcacaggttgccaatgagaaggtacagaaaagccagatccagatttatttcatccccaacaagaaagatgagcgtgaaaagttcctcatggacaaaagaaggaagatcgtagctcactctaaacagaacagttag

SEQ ID NO: 331209 - DNA, 1275 bp, Artificial Sequence
  derived and/or modified sequence
atgaacagtgagaaatctatgcacagaaaatccacagagttggtgaatgagattacgtgcgagaacaccgaatggccagggcagaggtctaccaacttccagatcatctcctcatatcccgatgacgaatccgtttactgcaccacagagaagtataatgtcatggagcatagacacaacgacatgcattatgaatgtatgaccccatgccaggtaaccagtgacagtgacaaggagaagaccattgctttcctcctgaaggagctcgatatcctgcgaacctccaataaaaaactccaacagaagctggccaaggaagacaaagagcagaggaaactgaaattcaagttggaattgcaggaaaaagaaaccgaagccaaaatcgccgagaagacggccgcactggtggaagaagtctacttcgctcagaaggaacgggatgaagctgtgatgtcacggctccagcttgctatagaggagcgggatgaggccatcgccagagcgaaacatatggaaatgtcactgaaagtgttagagaacatcaatcccgaggagaacgatatgaccctacaggaattgcttaatcggattaataatgcagataccggcattgccatacaaaaaaacggggctattatcgttgataggatctacaaaaccaaggagtgcaagatgcgtatcaccgcggaagaaatgtctgcgcttatcgaggaacgggatgctgccctctcgaagtgtaagagattggagcaagagctccaccacgtcaaggaacagaatcagacctcggcaaacaacatgcgccacctcacagccgagaataaccaggagagagccttgaaagctaagttgcttagcatgcagcaagccagggagacagccgtccagcaatataagaaacttgaagaggagatacagacattgagagtgtactattcgctgcacaaatccctgtctcaggaagagaacttaaaggatcagtttaattatactttaagcacatacgaagaagcgctgaagaaccgggaaaacattgtgtctataactcagcaacagaacgaagagctggccacacagctgcagcaggccctgaccgagagggcaaatatggagctgcaacttcagcatgcacgcgaagcttctcaggtggccaatgaaaaagtgcaaaaatctcagattcagatttattttatccccaataaaaaggatgagcgagagaagtttctgatggacaaaaggcgcaaaattgtggctcactcaaagcagaacagttag

SEQ ID NO: 331210 - DNA, 1275 bp, Artificial Sequence
  derived and/or modified sequence
atgaacagcgagaagagcatgcacagaaagagcaccgagctggtgaacgagatcacctgcgagaacaccgagtggcccggccagagaagcaccaacttccagatcatcagcagctaccccgacgacgagagcgtgtactgcaccaccgagaagtacaacgtgatggagcacagacacaacgacatgcactacgagtgcatgaccccctgccaggtgaccagcgacagcgacaaggagaagaccatcgccttcctgctgaaggagctggacatcctgagaaccagcaacaagaagctgcagcagaagctggccaaggaggacaaggagcagagaaagctgaagttcaagctggagctgcaggagaaggagaccgaggccaagatcgccgagaagaccgccgccctggtggaggaggtgtacttcgcccagaaggagagagacgaggccgtgatgagcagactgcagctggccatcgaggagagagacgaggccatcgccagagccaagcacatggagatgagcctgaaggtgctggagaacatcaaccccgaggagaacgacatgaccctgcaggagctgctgaacagaatcaacaacgccgacaccggcatcgccatccagaagaacggcgccatcatcgtggacagaatctacaagaccaaggagtgcaagatgagaatcaccgccgaggagatgagcgccctgatcgaggagagagacgccgccctgagcaagtgcaagagactggagcaggagctgcaccacgtgaaggagcagaaccagaccagcgccaacaacatgagacacctgaccgccgagaacaaccaggagagagccctgaaggccaagctgctgagcatgcagcaggccagagagaccgccgtgcagcagtacaagaagctggaggaggagatccagaccctgagagtgtactacagcctgcacaagagcctgagccaggaggagaacctgaaggaccagttcaactacaccctgagcacctacgaggaggccctgaagaacagagagaacatcgtgagcatcacccagcagcagaacgaggagctggccacccagctgcagcaggccctgaccgagagagccaacatggagctgcagctgcagcacgccagagaggccagccaggtggccaacgagaaggtgcagaagagccagatccagatctacttcatccccaacaagaaggacgagagagagaagttcctgatggacaagagaagaaagatcgtggcccacagcaagcagaacagctag

SEQ ID NO: 331211 - DNA, 315 bp, Artificial Sequence
  derived and/or modified sequence
atggagaattggtccaaggatataacccactcttatctcgaacaggaaaccaccgggatcaacaaatctacccagcctgacgagcagctgactatgaattccgaaaagagcatgcatcgaaagtcaacagagcttgtcaacgagatcacatgcgagaatacggaatggccggggcagcggtccactaatttccagatcatcagtagctatcctgatgacgagagtgtgtactgtaccaccgaaaaatataacgtcatggaacaccggcacaacgacatgcactacgagtgtatgacaccttgccaggtaacctag

SEQ ID NO: 331212 - DNA, 387 bp, Artificial Sequence
  derived and/or modified sequence
atggagaactggtcgaaagacatcacccactcctacttggaacaggaaacaaccggaattaataagtccacgcagcccgacgagcagctgaccatgaattcggaaaagtccatgcaccgtaaatctacagagctggtaaacgagatcacatgtgagaacactgaatggcccggacagaggagcacaaatttccaaattatcagtagttatcccgatgatgaatcagtatattgcacaacagagaagtataacgtgatggaacaccgccataatgacatgcactacgagtgcatgactccctgccaggtcacaagcgattccgacaaggaaaagaccatcgcatttctcctgaaagaactggacatcttgcggacatcaaacaagtag

SEQ ID NO: 331213 - DNA, 315 bp, Artificial Sequence
  derived and/or modified sequence
atggagaactggagcaaggacatcacccacagctacctggagcaggagaccaccggcatcaacaagagcacccagccagatgagcagctgaccatgaacagcgagaagtccatgcacaggaagagcacagagctggtgaatgagatcacctgtgagaacacagagtggccaggccagaggagcaccaacttccagatcatcagcagctacccagatgatgaatctgtgtactgcaccacagagaagtacaacgtgatggagcaccgccacaatgacatgcactatgagtgcatgaccccctgccaggtgacctag

SEQ ID NO: 331214 - DNA, 387 bp, Artificial Sequence
  derived and/or modified sequence
atggagaactggagcaaggacatcacccacagctacctggagcaggagaccaccggcatcaacaagagcacccagccagatgagcagctgaccatgaacagcgagaagtccatgcacaggaagagcacagagctggtgaatgagatcacctgtgagaacacagagtggccaggccagaggagcaccaacttccagatcatcagcagctacccagatgatgaatctgtgtactgcaccacagagaagtacaacgtgatggagcaccgccacaatgacatgcactatgagtgcatgaccccctgccaggtgaccagtgacagcgacaaggagaagaccatcgccttcctgctgaaggagctggacatcctgcggaccagcaacaagtag

SEQ ID NO: 331215 - DNA, 732 bp, Artificial Sequence
  derived and/or modified sequence
ccctgcggcgcgccgccgccccgtaggccccacgcgccgccccgctcctccgccggatcgtctgtgggtgagtctcgagccaggaggctctgagccagtggcgattggctgacgcggtggctgcgcactcggcctgagaaactcggcaagcgcgcagtgtcgactccccggtctatgccaggcgcatctcagctaatccaaaagtaaatgagaaacttagaaaaagattgccaattccaaatcaacatatttagagaaaattggaaaaggagaagcttactacagctttatttgaggactttttaaagaacgctgggttctatctgtgagtttatttatctagagttggctttattttagctgcaaatcttggagcaaaaaccagagacattgccagagcaaacaagaacagaaatacaaatggagaactggtcaaaagacataacccacagttatcttgaacaagaaactacggggataaataaaagtacgcagccagatgagcaactgactatgaattctgagaaaagtatgcatcggaaatccactgaattagttaatgaaataacatgtgagaacacagaatggccagggcagagatcaacgaattttcagatcatcagttcttatccagatgatgagtctgtttactgcactactgaaaaatacaacgttatggaacatagacataatgatatgcattatgaatgtatgactccttgtcaagttact

SEQ ID NO: 331216 - DNA, 775 bp, Artificial Sequence
  derived and/or modified sequence
atgccaggcgcatctcaggtaaacggttgggcagggaggtttgggcgacggagaatgatagtggtgggcacagatcagccctggagttttcggccgcagacttttccttggagaaggagaaggggccccgcggaatctgtacttagtgaatgctgaccccgcgtggccgggagtgatggggctctctcgaagctaatccaaaagtaaatgagaaacttagaaaaagattgccaattccaaatcaacatatttagagaaaattggaaaaggagaagcttactacagctttatttgaggactttttaaagaacgctgggttctatctgtgagctgcaaatcttggagcaaaaaccagagacattgccagagcaaacaagaacagaaatacaaatggagaactggtcaaaagacataacccacagttatcttgaacaagaaactacggggataaataaaagtacgcagccagatgagcaactgactatgaattctgagaaaagtatgcatcggaaatccactgaattagttaatgaaataacatgtgagaacacagaatggccagggcagagatcaacgaattttcagatcatcagttcttatccagatgatgagtctgtttactgcactactgaaaaatacaacgttatggaacatagacataatgatatgcattatgaatgtatgactccttgtcaagttacttcagactcagataaagagaagacaatagcatttcttctaaaagaattggatattctcagaacaagcaataaaa

SEQ ID NO: 331217 - DNA, 315 bp, Artificial Sequence
  derived and/or modified sequence
atggagaactggagcaaggacatcacccacagctacctggagcaggagacaacagggattaacaagtcaactcaacccgatgaacagctgaccatgaattcggaaaaatccatgcaccggaaatccactgagttagtgaacgaaataacctgtgagaatactgagtggcccggtcagaggagcaccaactttcaaattattagctcttaccccgacgatgagagcgtctactgtaccacggagaaatacaatgtgatggaacaccggcataatgacatgcactacgaatgtatgaccccttgccaagtgacctag

SEQ ID NO: 331218 - DNA, 387 bp, Artificial Sequence
  derived and/or modified sequence
atggagaactggagcaaggacatcacccacagctacctggagcaggaaacaacgggcattaacaagagcactcagccagacgagcagctcaccatgaatagcgaaaagtcaatgcaccggaaaagtaccgaactagtcaatgagattacatgcgaaaatactgagtggcccggacagaggagcacaaacttccagataatcagctcataccctgatgatgagtccgtctattgtaccacagaaaaatacaatgttatggaacatcgacacaatgacatgcattatgagtgcatgaccccatgtcaggtaacaagtgatagtgataaagaaaagacaattgctttccttctaaaggaactggatattctgaggacatcaaacaagtag

SEQ ID NO: 331219 - DNA, 315 bp, Artificial Sequence
  derived and/or modified sequence
atggagaattggtcaaaagatattacccacagttatctggaacaagagactactggaataaataaatcaactcagcctgacgaacagttgaccatgaattcagaaaaatctatgcatcgaaagtccactgagctggtgaacgagataacgtgcgaaaatactgagtggcccggacagcgatcaaccaatttccaaatcatatccagctaccccgatgacgagagcgtctattgcaccaccgagaaatataatgtgatggagcaccgccacaatgacatgcattacgagtgcatgacaccatgccaagtcacatag

SEQ ID NO: 331220 - DNA, 387 bp, Artificial Sequence
  derived and/or modified sequence
atggaaaactggtccaaagatatcacacactcttatctagagcaggagactactgggataaacaagagcacacaaccagatgagcagctgacaatgaactccgaaaagtcaatgcataggaaatccaccgaactggtgaatgaaattacatgcgagaacactgaatggccaggacaaagaagtaccaatttccagattatttccagctaccccgacgacgaaagcgtttattgcactactgagaaatacaatgtgatggaacatcgacacaatgacatgcattacgagtgcatgacgccctgtcaggtgacttctgactctgacaaggaaaaaactatcgccttcttactgaaagagctggacatactcagaacatccaataaatag

SEQ ID NO: 331221 - DNA, 315 bp, Artificial Sequence
  derived and/or modified sequence
atggagaactggagcaaggacatcacccacagctacctggagcaggagaccaccggcatcaacaagagcacccagcccgacgagcagctgaccatgaacagcgagaagagcatgcacagaaagagcaccgagctggtgaacgagatcacctgcgagaacaccgagtggcccggccagagaagcaccaacttccagatcatcagcagctaccccgacgacgagagcgtgtactgcaccaccgagaagtacaacgtgatggagcacagacacaacgacatgcactacgagtgcatgaccccctgccaggtgacctag

SEQ ID NO: 331222 - DNA, 387 bp, Artificial Sequence
  derived and/or modified sequence
atggagaactggagcaaggacatcacccacagctacctggagcaggagaccaccggcatcaacaagagcacccagcccgacgagcagctgaccatgaacagcgagaagagcatgcacagaaagagcaccgagctggtgaacgagatcacctgcgagaacaccgagtggcccggccagagaagcaccaacttccagatcatcagcagctaccccgacgacgagagcgtgtactgcaccaccgagaagtacaacgtgatggagcacagacacaacgacatgcactacgagtgcatgaccccctgccaggtgaccagcgacagcgacaaggagaagaccatcgccttcctgctgaaggagctggacatcctgagaaccagcaacaagtag

SEQ ID NO: 331223 - protein, 255 aa, Artificial Sequence
  derived and/or modified sequence
MLGIWHTVPSCRGEDAKGKDCCWYEAALRDGNPIIVYLHGSAEHRAASHRLKLVKVLSDGGFHVLSVDYRGFGDSTGKPTEEGLTTDAICVYEWTKARSGITPVCLWGHSLGTGVATNAAKVLEEKGCPVDAIVLEAPFTNMWVASINYPLLKIYRNIPGFLRTLMDALRKDKIIFPNDENVKFLSSPLLILHGEDDRTVPLEYGKKLYEIARNAYRNKERVKMVIFPPGFQHNLLCKSPTLLITVRDFLSKQWS

SEQ ID NO: 331224 - DNA, 1580 bp, Artificial Sequence
  derived and/or modified sequence
gggacacggcgcgggatggacgcgcaggactgccaggcggccgcatcgcccgagccgcccgggcccccagcccgtagctgcgtggccgcctggtgggacatggtcgaccgcaacctgcgtcaaagccccatttcttgtggatttaaagaaaccagagttaaagattcctcacacagtgaacttctacctgagagttgaacctggggtgatgctagggatctggcacacagtccccagctgccggggggaagatgccaaggggaaggactgttgctggtatgaagcagcccttcgtgatgggaacccaattattgtttatcttcatggcagtgcagaacacagggcagcttcgcacagactgaagctggtaaaggtgctgagtgatggtggctttcatgtcttgtctgttgactacagaggatttggggactctacaggtaagcccacagaggagggactgactacggatgccatttgtgtctatgagtggaccaaggcaagaagtggcatcactcccgtgtgtctctggggccactctctgggtacaggagttgcaacaaatgctgcaaaagtgctagaagaaaaaggatgcccagttgatgctattgtcttggaagctccatttaccaacatgtgggttgcaagtatcaattatcccttgttaaagatttaccggaacattccaggatttttacgtacacttatggatgccctgagaaaagacaaaataatctttcctaatgatgaaaatgttaaattcctttcttctcctcttctcatcttacatggagaggatgacaggacagtgcctttggagtatgggaaaaagctctatgaaattgcacgcaatgcatacaggaacaaagagagggtcaagatggttatctttcctcctggcttccaacacaacctgctttgtaaaagccccacactgttaataaccgtgagagatttcctgagcaagcagtggtcatgagtctgggaggagtggaaatcttcaatgaagacttggcccaaacaccacctgtgatgtatattgttctaatgtaaaattgtactgggctggtcggatgagctgaggccattgacttctctacaaatcacttgccattttaacaacagaaagtacgaatgttaggcagtatggaatgttcttatttagcttatcataatctactttgtaaaacatgctgaaacctcactgtggagaaccagaatttggtaaaatctagatcctatctaaaaatatgtagttattaaacattctgtggatatttgtgaataaggtagttgctatggtccgaatatctgggcctgcccccccaaattatgctgaaacctaatcaccagtgtgatggtaataggaggtgggactgagctctgatgaatgagattagtgcccttataaattatgaccaaaagagctcttcactcctcctaccatttgaggatacagtgagaagccttcatctatgaaccacaaagtagccctcatcagacactgaatcagccagtgccttgctcttggacttcccagcccccagaactgtgagaaataaatttctgttgtttataagcta

SEQ ID NO: 331225 - protein, 186 aa, Artificial Sequence [sequence omitted]

SEQ ID NO: 331226 - DNA, 1122 bp, Artificial Sequence
  derived and/or modified sequence
aggcgggtggggatcctttcaacagggctcccagcaatagagcagtcccactctcccagatgagctggagaagtagctacctctcccagacagagttggggtcaaattcatgcacatccaattcccatcaaagcctactcttcccagggcttgctgggagggaaggataactgcaggctcccctgggatgcccccaggtgagggaagttcacagagtttgagacagaggtgaatggacaggtgtgcttcttagggaagcagtcgagaggtggcaagaagttggcagctgccctcaagagggtcctggcaccatggacaatgacaagcctcttcagcctgagacagaagatgagattgaaattgagccagtacgacagagcagcgataaaatgctctactgtgaggccgaatccccgccgactgttgaaaaagtgaaaccagcccgggagaattcggaaacagacctggagattgaagatgatgagaaatttttcaccactggacaaaaggagctgtacctggaggcctgcaagctgatgggtgtagtgcctgtctcctacttcattcggaacatggaggagtcctacgtgaacctcaaccaccacggcctgggccccaggggtaccaaggctattgctatagccctggtgtccaacatggctgttaccaaactggagctggaagacaattgcatcatggaggagggcgtcttgagcctggtggagatgctacaagagaactactacctccaggagatgaatatttccaacaatcaccttggtttggagggggccagaatcatctcagatttctttgagagaaacagttcttctatctggagccttgagctttcagaccaattaccaaattaaaaagctggatctcagtcacaaccaattctctgatgtaggaggggagcacctgggccagatgctggccatcaacgtggggctcacgtcactggatctgagctggaataacttccacacaaggggagctgtggccttgtgcaatggtctccggggtaatgtgaccctgacaaagctggatctctccatgaatggctttgggaatgaggtggctctggccctaggggaagtcctccgactcaaccgctgcctg

SEQ ID NO: 331227 - DNA, 561 bp, Artificial Sequence
  derived and/or modified sequence
atggacaacgacaagcccctgcagcccgagaccgaggacgagatcgagatcgagcccgtgagacagagcagcgacaagatgctgtactgcgaggccgagagcccccccaccgtggagaaggtgaagcccgccagagagaacagcgagaccgacctggagatcgaggacgacgagaagttcttcaccaccggccagaaggagctgtacctggaggcctgcaagctgatgggcgtggtgcccgtgagctacttcatcagaaacatggaggagagctacgtgaacctgaaccaccacggcctgggccccagaggcaccaaggccatcgccatcgccctggtgagcaacatggccgtgaccaagctggagctggaggacaactgcatcatggaggagggcgtgctgagcctggtggagatgctgcaggagaactactacctgcaggagatgaacatcagcaacaaccacctgggcctggagggcgccagaatcatcagcgacttcttcgagagaaacagcagcagcatctggagcctggagctgagcgaccagctgcccaactag

SEQ ID NO: 331228 - DNA, 561 bp, Artificial Sequence
  derived and/or modified sequence
atggataatgacaagccccttcagcccgaaacagaggatgagattgagatcgaacccgtaagacagtctagcgataagatgctctattgtgaggccgagagccccccaaccgtcgagaaagtcaaaccggcccgagagaactcagaaacagatctggagattgaagatgacgagaaatttttcactactggtcagaaggaactctacctggaagcctgcaaactgatgggcgtcgttcccgtgtcctactttattagaaatatggaggagtcttacgttaatctgaatcaccatggccttggccctcgaggcacaaaggccattgctatcgcattagtgagtaacatggccgtcacaaaattagagcttgaagacaactgtatcatggaagaaggggtactaagtctagtggagatgctgcaggagaattattatcttcaagagatgaatatttccaacaaccatttaggcctggagggcgccaggatcatttctgatttcttcgagagaaactcctcttcgatctggagccttgagctgagcgaccagctgcccaactag

SEQ ID NO: 331229 - DNA, 561 bp, Artificial Sequence
  derived and/or modified sequence
atggacaatgacaagcccctgcagcctgagacagaagatgaaattgaaattgagcctgtgcggcagagcagtgacaagatgctgtactgtgaggccgagagccccccaacagtggagaaggtgaagccagcccgggagaacagcgagacagacctggagattgaagatgatgagaagttcttcaccaccggccagaaggagctgtacctggaggcctgcaagctgatgggcgtggtgcctgtgtcctacttcatccggaacatggaggagagctatgtgaacctgaaccaccacggcctgggcccccggggcaccaaggccatcgccatcgccctggtgagcaacatggctgtgaccaagctggagctggaggacaactgcatcatggaggagggcgtgctgagcctggtggagatgctgcaggagaactactacctgcaggagatgaacatcagcaacaaccacctgggcctggagggcgcccgcatcatcagtgacttctttgagaggaacagcagcagcatctggagcctggagctgagtgaccagctgcccaactag

SEQ ID NO: 331230 - DNA, 561 bp, Artificial Sequence
  derived and/or modified sequence
atggacaacgacaagcccctgcagcccgagaccgaggacgagatcgagatagaacctgtgagacagtcctccgacaagatgctctattgcgaggccgaatcaccgccaactgtcgagaaagttaaacctgctcgagagaacagcgagactgatctggaaattgaagatgacgagaagttctttacgacagggcagaaagagctttatcttgaagcatgtaagctgatgggagtcgtgccggtgagctactttattcgtaatatggaagagtcgtatgtgaacctgaaccatcatggtctagggccccggggaacgaaggcgattgcaattgctctggtttccaatatggctgtcaccaagctggaactcgaggataactgcatcatggaggagggggtgcttagtctggtggaaatgctgcaagaaaattattacttgcaagaaatgaacataagtaataaccatctaggacttgagggagccaggattatctcggactttttcgagagaaacagctcatctatatggtccttggaactgtcagatcagttgcctaactag

SEQ ID NO: 331231 - DNA, 561 bp, Artificial Sequence
  derived and/or modified sequence
atggataacgataaaccacttcaacctgaaaccgaggatgagattgaaatcgagcccgtgaggcagtcttcggataaaatgctttattgtgaagcagagtccccccctactgtggagaaggtgaaacccgctagggaaaacagcgagaccgatctagagattgaggatgatgaaaagttcttcacgaccggccagaaagagctctatttagaggcatgcaagctaatgggggtggtccccgtcagctatttcatccgcaatatggaagagtcatacgtaaacctgaaccaccatgggctgggccctcgcggtacaaaagccattgccattgccctggtctctaacatggctgtgaccaaattggagcttgaggacaattgcataatggaggagggcgtcttatctctggtcgaaatgcttcaagaaaattattatcttcaggagatgaatattagcaacaaccacttgggcctggagggggctagaattatttctgattttttcgaaaggaattcaagtagcatctggagtctggaactgtccgatcagttgcccaattag

SEQ ID NO: 331232 - DNA, 465 bp, Artificial Sequence
  derived and/or modified sequence
atgctctactgtgaggccgaatccccgccgactgttgaaaaagtgaaaccagcccgggagaattcggaaacagacctggagattgaaggcgagcatgggcatttgggggcagtcagggcagcttctcctcagaaactggagaaatctggtttccaggagctgtcatctcactcctttccagagtctgccctgcggatggcctgtggaggaaatgtggcagaaaggcctgctcgattttgcctggagtcctcctccgggctggcaggggagagcagctgcagcttcccacgcttgtcacctgcctcaggagcagtgccctcacgtcgtcttgttaaaagcggaatcaatacacaaacaaggttttctaatcttctaaatgtttccacgtggggcatcctatgcaatctttgcaatagtcctaggagtttccccaagaagggaagcaccgaaagagaacacttgtga

SEQ ID NO: 331233 - protein, 483 aa, Artificial Sequence
  derived and/or modified sequence
MTPGNATPPRTPEVTPLRLELQKLPGLANTTLSTPNPDTQASASPDPRPLREEEEARLLPRTHLQAELHQHGCWTVTEPAALTPGNATPPRTQEVTPLLLELQKLPELVHATLSTPNPDNQVTIKVVEDPQAEVSIDLLAEPSNPPPQDTLSWLPALWSFLWGDYKGEEKDRAPGEKGEEKEEDEDYPSEDIEGEDQEDKEEDEEEQALWFNGTTDNWDQGWLAPGDWVFKDSVSYDYEPQKEWSPWSPCSGNCSTGKQQRTRPCGYGCTATETRTCDLPSCPGTEDKDTLGLPSEEWKLLARNATDMHDQDVDSCEKWLNCKSDFLIKYLSQMLRDLPSCPCAYPLEAMDSPVSLQDEHQGRSFRWRDASGPRERLDIYQPTARFCLRSMLSGESSTLAAQHCCYDEDSRLLTRGKGAGMPNLISTDFSPKLHFKFDTTPWILCKGDWSRLHAVLPPNNGRACTDNPLEEEYLAQLQEAKEY

SEQ ID NO: 331234 - DNA, 1452 bp, Artificial Sequence
  derived and/or modified sequence
atgacgcctgggaacgccacacctcccaggactcccgaagtcacacctcttcgactggaactccagaaactgccaggtctggccaatacaactctttccacacctaacccggatacacaggcaagcgcatcaccggatccccgaccactgagggaggaagaggaggcccggctgctcccgaggactcatctccaggccgagctccaccagcacggctgctggaccgtgacagaacccgccgcgctgacacccggcaatgccacccctccacgcacacaagaggtgaccccattacttttagaactccaaaaactcccggaactggtgcacgcaaccctttctacacccaatcccgacaaccaagtgacaatcaaggtggtggaggacccgcaggctgaggtctcaatagatcttctggcagaaccctctaacccacccccccaggatactctgtcttggctacccgccctgtggtcctttctgtggggcgactataaaggcgaagaaaaggatcgcgcacccggcgaaaagggcgaggaaaaagaggaagacgaggactatcctagcgaggacatcgagggggaggatcaggaggataaagaagaggacgaggaggagcaggcactctggttcaacggaactacagataactgggaccagggctggcttgccccaggagattgggtgttcaaagattctgtgtcatacgattatgagcctcagaaggagtggtccccatggtccccatgttccggcaactgctctactggaaaacaacagaggaccagaccttgtggctacgggtgtactgccaccgaaacgcgaacgtgcgacctccctagttgccccggcaccgaggataaggatactttaggtctgccttctgaagagtggaaactgctcgcccgaaatgccaccgatatgcacgaccaggatgttgacagttgtgaaaagtggctgaactgcaagtcagacttcttgataaagtatctcagtcaaatgctaagagatctccccagctgcccttgtgcatatcctctcgaggccatggactctcccgtgagtttgcaagacgagcaccaaggcaggtctttcagatggagggatgcttctgggccccgcgagaggctagatatttaccagcccactgcacgcttctgtctcagaagcatgcttagcggtgaatcatccacgctggctgctcagcattgttgttacgatgaggactcacgtcttttgacgagggggaagggcgctggaatgcccaatttaatctccacagatttctccccaaagctccacttcaagtttgacacaactccttggatattgtgcaagggggactggagccgcctccatgccgtactgcctcctaataacggccgtgcatgtactgacaatccgctagaggaggagtaccttgcccagctgcaggaagccaaggagtattag

SEQ ID NO: 331235 - DNA, 1473 bp, Artificial Sequence
  derived and/or modified sequence
atgcgcgccctgcgcgatcgagctggactgttgttgtgcgtgctgttgttggctgctctgcttgaggccgcccttggattacctgtgaagaaaccccgcctcagaggaccaagacccggctcactgactaggcttgcagaagtcagcgccagtccggatccccgtccattgaaggaagaagaagaagcccccctgttacctcggacgcatctgcaggccgagccacaccagcatggatgctggacggtaaccgagccggcagctatgacgcctggcaatgcgacccctcctagaactcctgaggtcacccccctcaggctggagctccaaaagctgccagggctggccaatactacactgagtaccccgaatccggatacgcaggtcactataaaggtggtagaggacccgcaggctgaggtatctatcgatctgctggcagagccctctaacccaccaccccaagataccctgtcctggctgcccgctctatggagctttttatggggtgactataaaggggaggagaaggatagagcccccggggagaaaggcgaggagaaagaggaggatgaggactacccatctgaagatatcgagggcgaagatcaagaagacaaagaagaggacgaggaagaacaggccctgtggtttaatggcaccacagacaattgggatcagggatggttggcccctggggattgggttttcaaggattctgtgtcttacgactatgagcctcaaaaggagtggtccccttggtctccatgcagcggtaactgtagtacaggcaagcagcagagaactagaccctgcggttacggctgcaccgccactgagactcgaacctgtgatctaccatcatgtcccggcaccgaagacaaagatacactgggtctacccagtgaggaatggaagctactggcccgaaatgctactgacatgcatgaccaggatgttgacagctgcgaaaagtggttgaattgtaaatctgacttccttatcaagtatctatctcagatgctgcgagatctgccttcatgcccatgcgcttaccccttggaggccatggactcccccgtcagtctccaagacgaacaccagggccggagcttcaggtggagggacgcctcaggccccagagagcggctagacatctaccagccaacagcccgcttttgcctccgaagcatgctgagtggcgagtcctcaactctggctgctcagcattgctgctatgacgaagattccagactccttacgcggggcaagggcgccgggatgccaaatcttatttcgactgacttctccccaaagcttcatttcaaatttgacactactccatggatcctttgcaagggcgattggagccgactgcacgcggttctccctcctaacaatggcagagcctgcacagataatccactggaggaggagtacctagctcagttgcaggaggcaaaggagtactag

SEQ ID NO: 331236 - DNA, 1473 bp, Artificial Sequence
  derived and/or modified sequence
atgcgagcgctcagagaccgcgccggactcctcctgtgcgtcctgctgctggccgcgctgcttgaagcagctcttggcctacccgtgaagaaacctagattaagaggtcctcgaccaggaagcctcaccaggcttgctgaggcatctgcttccccagatcccagaccattgcgcgaggaggaggaggccagactgcttccacggacgcaccttcaggctgaattacaccagcacgggtgttggacggttaccgaacccgccgccctgactcccggcaacgctacgccaccgcggacgcaggaagtgactcccctgctacttgagctccagaaacttccagagttggttcacgcgacgctgtccactcccaacccagacaatcaggtcacaattaaagttgtcgaggaccctcaggccgaagtatcaattgatctcctggccgaaccctctaacccaccaccgcaggacactttgagctggcttccagctctgtggtcattcctctggggcgactataagggtgaggaaaaagatagggcaccaggcgaaaaaggcgaggagaaggaagaggatgaggactaccctagcgaggatattgaaggcgaggatcaggaggataaagaggaggacgaggaggagcaagcactgtggttcaacggaacgactgacaattgggatcaaggctggcttgctcccggagactgggtgttcaaggattcagtatcatacgactatgagccccagaaggaatggtcaccctggtcaccatgtagcggaaattgcagtacaggcaagcagcagagaacacggccttgcggttacggatgcacagccacagagactaggacgtgcgatctgccttcatgtcctggtaccgaggataaggatactctcggcctgccttccgaggaatggaaactcctggccagaaacgcgactgacatgcatgatcaggatgtcgatagctgtgagaagtggctcaactgtaaaagcgacttcctcatcaagtatctctcccaaatgctccgggatctgcccagttgcccatgtgcatatcccctcgaagctatggacagccccgtttctttgcaggacgagcatcaggggcgcagttttcgctggcgggatgccagcgggccacgggagcgtctagacatctatcagccaaccgctcgattctgccttcgctctatgttgtcgggggaatccagcacactggctgcacagcattgctgttacgacgaggactcccgactgcttacaagaggcaagggagccggcatgccaaacttgatttcaacagatttcagccctaaattgcatttcaagttcgacacaacgccatggatattgtgcaagggagactggagtcggctgcacgcagtgctgccacctaacaacggtagagcatgcactgataatccactggaagaagagtatctagcgcagctccaggaagccaaggagtactag

SEQ ID NO: 331237 - DNA, 2745 bp, Artificial Sequence
  derived and/or modified sequence
gaggcgaggcggggcgcgactgggttcgcggccgcgtgcagaggtgcaggcagagcagcctcggaaccgagacgatgcgtgcgctccgcgaccgagccgggctcctcctctgcgtgctgctgctggcggcgctgctggaggcggcgctagggctccccgtgaagaagccgcggctccgcggaccacggcctgggagcctcacgaggctcgcagaggtctcagcctccccagatcctaggcctctgaaggaagaggaggaggcaccactgctccccagaacccacctgcaggcagagccacaccaacatggatgctggactgtcactgagccagcagccatgaccccaggcaacgccacccctcccaggaccccagaggttactccgttgcggctggagctgcagaagctgccgggattggccaacacaaccttgagtacccctaaccctgatacccaggtgaccatcaaggtggtggaggacccccaggccgaggtgtcgatagacctgttggctgagcccagcaatcccccgccccaggatacccttagctggctgcccgccctctggtccttcctctggggagactacaaaggagaggaaaaagacagggccccaggggagaagggggaggaaaaggaggaagacgaggactatccttcagaggatatcgagggtgaggatcaagaggacaaagaggaagatgaggaagagcaggcgctctggttcaatggaactacagacaactgggaccagggctggctggcccccggggattgggtcttcaaggattctgtcagctacgactatgagcctcagaaggagtggagtccctggtctccctgcagtgggaactgcagcactggcaagcagcagaggactcggccctgtggctatggctgcactgccaccgagacccgtacctgtgacctgccctcctgtcctggcactgaggacaaggacaccttgggcctccccagtgaggagtggaagctcctggcccgcaatgctacggacatgcatgatcaagatgtggacagctgtgagaagtggctgaactgcaagagcgacttcctaatcaagtatctgagccagatgctgcgggacctgcccagctgcccgtgtgcctacccactggaggccatggacagccctgtgagcctacaggacgagcaccagggccgcagcttccggtggagggatgccagtggccctcgcgagcgcctggacatctaccagcccacggcgcgcttctgcctgcgttccatgctgtctggggagagcagcacactggccgcccagcactgctgctatgacgaggacagccggctgctgacccgtggcaagggcgccggcatgcccaacctcatcagcaccgacttctcacctaagctgcacttcaagttcgacacgacgccctggatcctgtgcaagggggactggagccgcctccacgctgtgctccctcccaacaacggccgagcctgcaccgacaaccccctggaggaggagtacctagcacagttgcaggaggccaaggagtactagtgacggggttgctgaacagacactgcagggagagggcaggcggctgctgctgttgcacgggagaactttcctcacccgcccctgcccagacagggtgaggaaagggctcccccagtgaggttggtccgaggctgtgtgccctctgccagcgaccccgaagcagatatctcagtggggttagtgagaaggttgaagggtatgtagggcccagggtgggtgtccctgggagccctggaaatgtgcatatgtgcatgtgtctgccggggcctccctctgctgcctgctgggaccctggccactcatttttctcctccttgggagctgggctcttctgccctggctctgcacataagtgttagccagcagctccagaaaaatcccgattcccgggatctgccacgagtcactcctactccaccctgatggccagcagaggaagggccactcttctcatgggcacagccatcctttgccggggggggcatccagcctgggtggccacccctccttatctctgggtggtgcacatgcccttctttccccactccctgccacgagccactgcacaggaggctatctgtagccccaagctgcctttctgttggacaccaactttagtcttgggctgcaagccagcccagctgaggcgaagtggactccaggcagggaatgggttgcccaattctggtccctttcctttgctcagccccctctgttctgctgattgtagggatgtgcagggctgggagttggcactccccccgagtggggaggtgacagcttgtcacagtagccaggcttgggtgggttcagcactagctcgggacggtgtgtcacacgtctatagtaaaccagttctctgggaggggaaaaaagccctgatttattgcatttgggcagcttctgtggtgtaaattctcccagcagtgtcccatgtcatgctgccagcatcactgaatgcactgaactcagagttgggaagagatgcacataatcgctctcccggcacacctcatgcctcttccctgcctccccattcccctggctgcacttccttgccttctatggggttgaaatattgaagtctcaactgtctctgttcacaagagccaccaaaagttaggggacttcagtcctagcccccagatggccgccctgaagctctctgggctcctcagcaataaagcactttattttc

SEQ ID NO: 331238 - DNA, 2745 bp, Artificial Sequence
  derived and/or modified sequence
gaggcgaggcggggcgcgactgggttcgcggccgcgtgcagaggtgcaggcagagcagcctcggaaccgagacgatgcgtgcgctccgcgaccgagccgggctcctcctctgcgtgctgctgctggcggcgctgctggaggcggcgctagggctccccgtgaagaagccgcggctccgcggaccacggcctgggagcctcacgaggctcgcagaggcttcagcctccccagatcctaggcctctgagggaagaggaggaggcacgactgctccccagaacccacctgcaggcagagctacaccaacatggatgttggactgtcactgagccagcagccctgaccccagggaatgccacgcctcccaggacccaggaggttactcccttgctgctggagctgcagaagctgccagaattggtccacgcaaccttgagtacccctaaccctgataaccaggtgaccatcaaggtggtggaggacccccaggccgaggtgtcgatagacctgttggctgagcccagcaatcccccgccccaggatacccttagctggctgcccgccctctggtccttcctctggggagactacaaaggagaggaaaaagacagggccccaggggagaagggggaggaaaaggaggaagacgaggactatccttcagaggatatcgagggtgaggatcaagaggacaaagaggaagatgaggaagagcaggcgctctggttcaatggaactacagacaactgggaccagggctggctggcccccggggattgggtcttcaaggattctgtcagctacgactatgagcctcagaaggagtggagtccctggtctccctgcagtgggaactgcagcactggcaagcagcagaggactcggccctgtggctatggctgcactgccaccgagacccgtacctgtgacctgccctcctgtcctggcactgaggacaaggacaccttgggcctccccagtgaggagtggaagctcctggcccgcaatgctacggacatgcatgatcaagatgtggacagctgtgagaagtggctgaactgcaagagcgacttcctaatcaagtatctgagccagatgctgcgggacctgcccagctgcccgtgtgcctacccactggaggccatggacagccctgtgagcctacaggacgagcaccagggccgcagcttccggtggagggatgccagtggccctcgcgagcgcctggacatctaccagcccacggcgcgcttctgcctgcgttccatgctgtctggggagagcagcacactggccgcccagcactgctgctatgacgaggacagccggctgctgacccgtggcaagggcgccggcatgcccaacctcatcagcaccgacttctcacctaagctgcacttcaagttcgacacgacgccctggatcctgtgcaagggggactggagccgcctccacgctgtgctccctcccaacaacggccgagcctgcaccgacaaccccctggaggaggagtacctagcacagttgcaggaggccaaggagtactagtgacggggttgctgaacagacactgcagggagagggcaggcggctgctgctgttgcacgggagaactttcctcacccgcccctgcccagacagggtgaggaaagggctcccccagtgaggttggtccgaggctgtgtgccctctgccagcgaccccgaagcagatatctcagtggggttagtgagaaggttgaagggtatgtagggcccagggtgggtgtccctgggagccctggaaatgtgcatatgtgcatgtgtctgccggggcctccctctgctgcctgctgggaccctggccactcatttttctcctccttgggagctgggctcttctgccctggctctgcacataagtgttagccagcagctccagaaaaatcccgattcccgggatctgccacgagtcactcctactccaccctgatggccagcagaggaagggccactcttctcatgggcacagccatcctttgccggggggggcatccagcctgggtggccacccctccttatctctgggtggtgcacatgcccttctttccccactccctgccacgagccactgcacaggaggctatctgtagccccaagctgcctttctgttggacaccaactttagtcttgggctgcaagccagcccagctgaggcgaagtggactccaggcagggaatgggttgcccaattctggtccctttcctttgctcagccccctctgttctgctgattgtagggatgtgcagggctgggagttggcactccccccgagtggggaggtgacagcttgtcacagtagccaggcttgggtgggttcagcactagctcgggacggtgtgtcacacgtctatagtaaaccagttctctgggaggggaaaaaagccctgatttattgcatttgggcagcttctgtggtgtaaattctcccagcagtgtcccatgtcatgctgccagcatcactgaatgcactgaactcagagttgggaagagatgcacataatcgctctcccggcacacctcatgcctcttccctgcctccccattcccctggctgcacttccttgccttctatggggttgaaatattgaagtctcaactgtctctgttcacaagagccaccaaaagttaggggacttcagtcctagcccccagatggccgccctgaagctctctgggctcctcagcaataaagcactttattttc

SEQ ID NO: 331239 - DNA, 1739 bp, Artificial Sequence
  derived and/or modified sequence
agagcagcctcggaaccgagacgatgcgtgcgctccgcgaccgagccgggctcctcctctgcgtgctgctgctggcggcgctgctggaggcggcgctagggctccccgtgaagaagccgcggctccgcggaccacggcctgggagcctcacgaggctcgcagaggtctcagcctccccagatcctaggcctctgaaggaagaggaggaggcaccactgctccccagaacccacctgcaggcagagccacaccaacatggatgctggactgtcactgagccagcagccatgaccccaggcaacgccacccctcccaggaccccagaggttactccgttgcggctggagctgcagaagctgccgggattggccaacacaaccttgagtacccctaaccctgatacccaggcttcagcctccccagatcctaggcctctgagggaagaggaggaggcacgactgctccccagaacccacctgcaggcagagctacaccaacatggatgttggactgtcactgagccagcagccctgaccccagggaatgccacgcctcccaggacccaggaggttactcccttgctgctggagctgcagaagctgccagaattggtccacgcaaccttgagtacccctaaccctgataaccagactatgagcctcagaaggagtggagtccctggtctccctgcagtgggaactgcagcactggcaagcagcagaggactcggccctgtggctatggctgcactgccaccgagacccgtacctgtgacctgccctcctgtcctggcactgaggacaaggacaccttgggcctccccagtgaggagtggaagctcctggcccgcaatgctacggacatgcatgatcaagatgtggacagctgtgagaagtggctgaactgcaagagcgacttcctaatcaagtatctgagccagatgctgcgggacctgcccagctgcccgtgtgcctacccactggaggccatggacagccctgtgagcctacaggacgagcaccagggccgcagcttccggtggagggatgccagtggccctcgcgagcgcctggacatctaccagcccacggcgcgcttctgcctgcgttccatgctgtctggggagagcagcacactggccgcccagcactgctgctatgacgaggacagccggctgctgacccgtggcaagggcgccggcatgcccaacctcatcagcaccgacttctcacctaagctgcacttcaagttcgacacgacgccctggatcctgtgcaagggggactggagccgcctccacgctgtgctccctcccaacaacggccgagcctgcaccgacaaccccctggaggaggagtacctagcacagttgcaggaggccaaggagtactagtgacggggttgctgaacagacactgcagggagagggcaggcggctgctgctgttgcacgggagaactttcctcacccgcccctgcccagacagggtgaggaaagggctcccccagtgaggttggtccgaggctgtgtgccctctgccagcgaccccgaagcagatatctcagtggggttagtgagaaggttgaagggtatgtagggcccagggtgggtgtccctgggagccctggaaatgtgcatatgtgcatgtgtctgccggggcctccctctgctgcctgctgggaccctggccactcatttttctcctccttgggagctgggctcttctgccctggctctgc

SEQ ID NO: 331240 - DNA, 1452 bp, Artificial Sequence
  derived and/or modified sequence
atgaccccaggaaatgccaccccacccaggaccccagaggtgacccccctgcggctggagctgcagaagctgcccggcctggccaacaccaccctgagcacccccaacccagacacccaggccagcgccagcccagacccccggcccctgcgggaggaggaggaggcccggctgctgcccaggacccacctgcaggccgagctgcaccagcacggctgctggacagtgacagagcctgctgccctgaccccaggaaatgccaccccacccaggacccaggaggtgacccccctgctgctggagctgcagaagctgcctgagctggtgcacgccaccctgagcacccccaacccagacaaccaggtgaccatcaaggtggtggaggacccccaggccgaggtgtccattgacctgctggccgagcccagcaaccccccaccccaggacaccctgtcctggctgcctgccctgtggagcttcctgtggggagactacaagggggaggagaaggaccgggcccctggagagaagggggaggagaaggaggaggatgaggactaccccagcgaggacatcgagggggaggaccaggaggacaaggaggaggatgaggaggagcaggccctgtggttcaacggcaccacagacaactgggaccagggctggctggcccctggggactgggtgttcaaggacagcgtgtcctatgactatgagccccagaaggagtggagcccctggagcccctgcagcggcaactgcagcacaggcaagcagcagaggacccggccctgtggctacggctgcacagccacagagaccaggacctgtgacctgcccagctgccctggaacagaggacaaggacaccctgggcctgcccagcgaggagtggaagctgctggccagaaatgccacagacatgcatgaccaggatgtggacagctgtgagaagtggctgaactgcaagagtgacttcctgatcaagtacctgagccagatgctgcgggacctgcccagctgcccctgtgcctaccccctggaggccatggacagccctgtgtccctgcaggatgagcaccagggccgctccttccgctggagagatgccagcggcccccgggagcggctggacatctaccagcccacagcccgcttctgcctgcgctccatgctgtctggagagagcagcaccctggccgcccagcactgctgctatgatgaggacagccggctgctgacccggggcaaaggagctggcatgcccaacctgatcagcacagacttcagccccaagctgcacttcaagtttgacaccaccccctggatcctgtgcaagggggactggagccggctgcatgctgtgctgccccccaacaacggccgggcctgcacagacaaccccctggaggaggagtacctggcccagctgcaggaggccaaggagtactag

SEQ ID NO: 331241 - DNA, 1473 bp, Artificial Sequence
  derived and/or modified sequence
atgagggccctgcgggaccgggccggcctgctgctgtgtgtgctgctgctggccgccctgctggaggccgccctgggcctgcctgtgaagaagccccggctgcggggccccaggcctggcagcctgacccggctggccgaggtgtctgccagcccagacccccggcccctgaaggaggaggaggaggcccccctgctgcccaggacccacctgcaggccgagccccaccagcacggctgctggacagtgacagagcctgctgccatgaccccaggaaatgccaccccacccaggaccccagaggtgacccccctgcggctggagctgcagaagctgcccggcctggccaacaccaccctgagcacccccaacccagacacccaggtgaccatcaaggtggtggaggacccccaggccgaggtgtccattgacctgctggccgagcccagcaaccccccaccccaggacaccctgtcctggctgcctgccctgtggagcttcctgtggggagactacaagggggaggagaaggaccgggcccctggagagaagggggaggagaaggaggaggatgaggactaccccagtgaagatattgaaggagaggaccaggaggacaaggaggaggatgaggaggagcaggccctgtggttcaacggcaccacagacaactgggaccagggctggctggcccctggggactgggtgttcaaggacagcgtgtcctatgactatgagccccagaaggagtggagcccctggagcccctgcagcggcaactgcagcacaggcaagcagcagaggacccggccctgtggctacggctgcacagccacagagaccaggacctgtgacctgcccagctgccccggcacagaggacaaggacaccctgggcctgcccagcgaggagtggaagctgctggccagaaatgccacagacatgcatgaccaggatgtggacagctgtgagaagtggctgaactgcaagagtgacttcctgatcaagtacctgagccagatgctgcgggacctgcccagctgcccctgtgcctaccccctggaggccatggacagccctgtgtccctgcaggatgagcaccagggccgctccttccgctggagagatgccagcggcccccgggagcggctggacatctaccagcccacagcccgcttctgcctgcgctccatgctgagcggggagagcagcaccctggccgcccagcactgctgctatgatgaggacagccggctgctgacccggggcaagggggccggcatgcccaacctgatcagcacagacttcagccccaagctgcacttcaagtttgacaccaccccctggatcctgtgcaagggggactggagccggctgcatgctgtgctgccccccaacaacggccgggcctgcacagacaaccccctggaggaggagtacctggcccagctgcaggaggccaaggagtactag

SEQ ID NO: 331242 - DNA, 1473 bp, Artificial Sequence
  derived and/or modified sequence
atgagggccctgcgggaccgggccggcctgctgctgtgtgtgctgctgctggccgccctgctggaggccgccctgggcctgcctgtgaagaagccccggctgcggggccccaggcctggcagcctgacccggctggccgaggccagcgccagcccagacccccggcccctgcgggaggaggaggaggcccggctgctgcccaggacccacctgcaggccgagctgcaccagcacggctgctggacagtgacagagcctgctgccctgaccccaggaaatgccaccccacccaggacccaggaggtgacccccctgctgctggagctgcagaagctgcctgagctggtgcacgccaccctgagcacccccaacccagacaaccaggtgaccatcaaggtggtggaggacccccaggccgaggtgtccattgacctgctggccgagcccagcaaccccccaccccaggacaccctgtcctggctgcctgccctgtggagcttcctgtggggagactacaagggggaggagaaggaccgggcccctggagagaagggggaggagaaggaggaggatgaggactaccccagtgaagatattgaaggagaggaccaggaggacaaggaggaggatgaggaggagcaggccctgtggttcaacggcaccacagacaactgggaccagggctggctggcccctggggactgggtgttcaaggacagcgtgtcctatgactatgagccccagaaggagtggagcccctggagcccctgcagcggcaactgcagcacaggcaagcagcagaggacccggccctgtggctacggctgcacagccacagagaccaggacctgtgacctgcccagctgccccggcacagaggacaaggacaccctgggcctgcccagcgaggagtggaagctgctggccagaaatgccacagacatgcatgaccaggatgtggacagctgtgagaagtggctgaactgcaagagtgacttcctgatcaagtacctgagccagatgctgcgggacctgcccagctgcccctgtgcctaccccctggaggccatggacagccctgtgtccctgcaggatgagcaccagggccgctccttccgctggagagatgccagcggcccccgggagcggctggacatctaccagcccacagcccgcttctgcctgcgctccatgctgagcggggagagcagcaccctggccgcccagcactgctgctatgatgaggacagccggctgctgacccggggcaagggggccggcatgcccaacctgatcagcacagacttcagccccaagctgcacttcaagtttgacaccaccccctggatcctgtgcaagggggactggagccggctgcatgctgtgctgccccccaacaacggccgggcctgcacagacaaccccctggaggaggagtacctggcccagctgcaggaggccaaggagtactag

SEQ ID NO: 331243 - DNA, 1452 bp, Artificial Sequence
  derived and/or modified sequence
atgacccccggcaacgccacccccccccggacccccgaggtgacccctctccggctcgagctgcagaagctccctggcctggctaacacgacgctctccaccccgaatccagacacacaggcatccgcgtctccggatcctcgccccttgcgcgaggaggaggaggcgaggctgctgcctcggacccatctacaggcagaactacaccagcacgggtgttggacagtgactgagcctgccgctttgaccccaggcaatgccactccacccagaactcaggaggtaaccccgctgctgttagagcttcaaaagctgcctgaactggtacacgccacgctctctacccctaaccccgacaaccaagtcactataaaggtcgtggaggatcctcaggctgaagtaagcatcgaccttctggccgagccctcaaaccctcctccccaggatacactgtcttggttgcccgccttgtggtcttttctctggggagattataagggggaggaaaaggaccgcgcccccggggagaaaggagaagagaaggaggaggacgaggactatccctcggaggacattgagggagaggaccaggaggacaaggaggaggatgaggaagaacaggctctgtggttcaacggcacaacagataattgggaccaggggtggctcgctcccggcgactgggtgtttaaggattcggtgtcatatgactacgagccacagaaagagtggagcccctggtctccatgctctgggaactgcagcactggaaaacagcagaggaccaggccctgcggatacggctgcacagccactgaaactcgtacttgtgacctgccctcatgccctggaactgaggacaaggacacccttggcctgccgagtgaggaatggaagctattggctcgcaacgccaccgatatgcacgaccaggatgttgactcttgcgagaaatggttgaactgtaaatccgactttttaataaagtacctgtcccagatgctaagggatctcccttcctgcccttgtgcctatcccctagaagctatggactcccctgtctccctgcaggatgagcatcagggcaggtctttcagatggcgcgacgcatccggccctcgtgaaaggttagatatttaccagcccactgcccgcttttgtctgcgctctatgctgagcggtgagtcttccacactcgcagcccagcattgttgctatgacgaggatagtagattactgacccgaggaaaaggcgctggaatgcctaatctaatttctactgatttttctcctaagttgcacttcaagtttgacacaaccccatggatcctctgcaagggcgactggtccagattgcacgccgtcctgccccccaataacggccgggcgtgcaccgataaccccctggaggaggagtacctggcacaattgcaggaggccaaggaatactag

SEQ ID NO: 331244 - DNA, 1473 bp, Artificial Sequence
  derived and/or modified sequence
atgcgggccctgcgggaccgggccggcctgctgctgtgcgtgctgctgctggcagctcttttggaggcggctcttggcctacccgtcaaaaaacccagactgagagggccaaggccaggctcccttaccagactcgcggaggtgtcagcttcgcctgacccccgccccctgaaagaggaggaggaggcgccactgttgccccgtacacatctccaggcagagccacatcaacatggttgctggacggtgacagaacccgctgccatgacacccggcaatgctactcctcctagaacacctgaagtaacacccttgcgccttgagttgcagaagctgccaggcttggcgaacactacactctctacacctaaccctgacacccaggttactattaaggtggtggaagacccccaggctgaggtatctattgacttactcgcggagccgtcgaatcctccgccccaggataccctctcatggttgccagcactttggagtttcctttggggtgactataaaggcgaggaaaaggacagggcacccggcgaaaaaggagaggaaaaggaggaggatgaggattatcctagcgaagatatcgagggtgaggatcaggaagataaagaggaggatgaggaagagcaggcattatggttcaacggcaccacagacaactgggatcaagggtggctggcacccggcgattgggttttcaaggattctgtctcctacgattacgaaccccagaaggaatggagcccatggtccccctgttccggcaattgctctaccggcaagcaacagcgtacgagaccttgcggctatggatgcacagctactgagacacggacctgtgacctgccatcatgcccaggaactgaggataaggataccttgggactccccagtgaggaatggaagctactggctcggaacgcgaccgatatgcacgatcaggacgtcgatagttgtgagaagtggctcaattgcaaatccgattttctgattaaatacctgagccagatgctgcgggacctcccaagctgcccttgcgcgtacccccttgaagccatggactcaccggtaagcctgcaggatgagcatcaagggagatcctttcgatggcgcgacgcatccgggcctcgcgaaaggttggacatataccagccgacagcccggttctgtttgcgatccatgctgagcggagagagtagcactctggccgctcagcattgttgttacgacgaagactcccgactgcttacacggggtaagggagcagggatgccgaatctgatctccacagactttagtcccaagctgcactttaaattcgacacaaccccatggatcctgtgtaaaggcgattggagccgcttgcatgccgtgctgccacccaacaatgggagagcttgtaccgacaatccgctggaggaagagtatcttgcccaattgcaggaagctaaggagtattag

SEQ ID NO: 331245 - DNA, 1473 bp, Artificial Sequence
  derived and/or modified sequence
atgcgggccctgcgggaccgggccggcctgctgctgtgcgtgctgctgttggccgctctgctcgaggccgcactcggtctccccgtcaagaaaccaaggctgcgtggcccacggcctggtagtttaacacgcctggccgaagcgtcagccagtccagatcccagaccccttcgggaagaggaggaagcacgcctattaccaaggacacatttacaggccgaactgcaccagcacggatgctggacagtgactgagcctgccgcactcacacccgggaacgccaccccaccgaggacgcaggaagtaactcccctgctgctcgagttgcagaagctgcctgagctagtccacgcaaccctgtctacccccaatccggataatcaagttactatcaaggtggtggaggatccccaggcggaagtgtccatcgatctcctcgctgagccatccaatcctccaccacaggataccctctcttggctgcctgctctgtggtcatttttatggggagactacaaaggtgaggagaaggaccgcgcacctggggaaaaaggtgaggaaaaagaggaagatgaggattaccctagcgaagatatcgagggagaagaccaggaggataaagaagaagatgaggaagagcaggcgctgtggtttaacgggacaactgacaactgggatcagggatggctcgcccccggagattgggtgtttaaagactccgtgagctacgattacgaaccacagaaggagtggtctccctggagcccttgctccggaaactgtagtacaggaaagcaacagaggacccggccctgcggatacggctgtaccgccaccgagactaggacatgcgacttgcccagctgccctgggactgaagacaaagacacgctcggcttgcccagtgaagaatggaagttgctggctagaaacgctacagatatgcacgatcaggacgtagactcatgcgagaagtggctgaactgtaagtcagactttttgatcaagtacttgtcccagatgttacgggacctgcccagctgcccctgtgcctatccactggaggcaatggatagtcccgtaagcctgcaagatgagcaccagggccgatcgtttaggtggcgcgacgccagcggcccacgggagcgactggacatatatcaaccaacagcccgtttctgtttgcggagcatgttgtctggtgagtctagcaccctcgcagctcagcactgctgctacgatgaggatagtagactcttgacccggggtaagggtgcggggatgccaaacctgatttcaacagatttctcccccaaactgcatttcaaatttgacactaccccttggatactgtgcaaaggtgattggtctaggctccacgcagtgcttccccccaacaacgggagggcctgtaccgacaatccactcgaggaggagtatctggcgcagctccaagaagctaaagagtactag

SEQ ID NO: 331246 - DNA, 1452 bp, Artificial Sequence
  derived and/or modified sequence
atgactcctggtaacgcaacccctccccgaacaccagaagtaacccccttgcggctggaactgcaaaagctgccaggactggccaacactacgttgtccacccccaatcccgatacccaggcctcagcctcccctgacccaaggcccctcagagaggaggaagaggccagactgctaccccgtactcacctccaagctgagttgcaccagcatggatgctggaccgttactgagccagccgcacttaccccgggaaatgctacaccgccacgaacccaagaggttactcctttgctgctcgaattgcaaaagctgcctgaactcgtgcacgccacactcagcacacccaacccagataaccaggtcacaataaaggtggtggaggatcctcaggccgaggtttcaatagatttactggcagaaccctccaaccctcccccacaggacactcttagctggctgccggctctgtggagcttcctatggggtgactataagggggaagaaaaggatcgggcaccgggtgagaaaggtgaagaaaaagaggaggacgaagactatccatctgaggacatcgagggtgaagaccaggaggacaaggaagaagacgaggaagagcaggctctctggttcaatggcactaccgacaactgggatcagggctggctcgcacctggggattgggtattcaaggatagcgtatcctatgattacgagccacagaaggagtggagcccatggtccccttgcagcggaaattgtagcactggcaaacagcagagaacaaggccatgtgggtatgggtgcacagctaccgagacccggacctgcgacctgccctcctgccctggcaccgaggataaagacacactgggtctaccttcagaagagtggaagttgctggcccgaaatgctaccgatatgcatgaccaagatgtagattcatgtgaaaagtggctaaattgcaaatcggactttcttatcaaatatctgtcccagatgttgcgcgatctgccttcttgcccgtgcgcgtacccattagaagctatggattcgcctgtgtctttacaagacgaacatcagggcaggtcctttaggtggcgggatgcatcggggccacgtgaacgtctcgacatctaccaaccgactgctagattttgcctgcgatcaatgctgtccggggaatcctctacactcgcagcccaacactgttgctatgatgaagactcccgcctcctgacacgcggtaaaggggcagggatgcctaacttgatctccactgattttagccctaaactgcattttaagtttgatactactccctggatcctatgcaaaggggattggtcacgcctccacgcagtgctacctcctaataacggcagggcctgcactgacaaccctctggaagaagagtacttagctcaactgcaggaggctaaggagtattag

SEQ ID NO: 331247 - DNA, 1473 bp, Artificial Sequence
  derived and/or modified sequence
atgagggctctgcgtgacagggctggcctgctcctttgtgtcctactgctcgctgctcttctggaggccgctctgggcctgcccgttaagaaacctcgccttcggggtccaagacccggttctctaaccagacttgccgaagtttctgcttcaccagaccccaggcctcttaaggaggaggaggaggctccactgctccccaggacccacctccaggccgagccccatcagcacggctgctggaccgtgacggagccagccgcaatgaccccagggaatgcgacaccacccagaacgccagaggtcacaccactacgccttgagctgcagaagctcccaggtctggccaatacaaccctatcaacgcccaaccccgatacgcaggtcaccataaaagtcgtggaggatccccaagccgaggtgtccatagaccttctggccgagccttctaaccccccacctcaggataccctgtcttggttgcccgctctctggagctttctatggggtgactataaaggagaggagaaggatagggctccaggcgagaaaggagaagagaaagaggaggacgaagactatccctccgaggatatagagggtgaggatcaagaggacaaagaagaagacgaagaggagcaagctctctggtttaacgggacgacggacaactgggatcaggggtggctcgcacctggagactgggtgttcaaggattctgtgtcatacgactacgagcctcagaaagagtggagcccatggagtccctgcagcgggaactgctctactggaaaacagcaacggaccaggccctgcggctacggttgtacggcaacggagacaagaacatgcgatttgccgtcatgccctggaactgaggataaagataccctgggcctgccttctgaagagtggaaattattggccaggaacgccaccgacatgcatgatcaggacgtagatagttgtgagaagtggctgaactgtaagtctgactttctcatcaaatatctatctcagatgttgagagaccttccatcttgtccgtgcgcctacccactggaagccatggactctccggtttccctccaagatgagcatcaggggaggagcttccgctggagggacgcatcaggcccacgcgaaaggttggatatctatcaaccaactgctcgattttgtctgagaagtatgctgtccggtgagagtagtacactcgccgctcaacattgctgctatgacgaagatagcagactgctgacgcgcggaaaaggagcaggcatgcccaatcttattagcacggacttttcccccaaactgcactttaaattcgatactaccccatggattctgtgtaaaggggattggagtcggctgcatgccgtcttaccacctaataacggcagggcttgtactgacaatcccctggaagaggagtatctcgcccagctgcaggaagccaaagagtattag

SEQ ID NO: 331248 - DNA, 1473 bp, Artificial Sequence
  derived and/or modified sequence
atgagagcactccgtgatcgggctggacttctgctgtgcgttttgttgctggcagcactcctggaggctgcgttaggcctgcccgtgaaaaagcctcggctccgtggaccacgcccaggcagcctaacaagactggctgaagctagcgcctcaccagaccctagaccgctgcgagaagaagaggaagccaggctgttacctaggacacatcttcaagccgaattgcaccagcacgggtgttggaccgttaccgaacctgcagccctgactcctgggaatgctacacccccacggacacaggaggtcacccctctcctattagaactgcaaaaactacccgagttggtgcatgccacgctgagcactcccaatccggacaaccaggtgacaatcaaagtcgtggaagatccacaggccgaggtgtctatagatctgctcgccgagccgtccaaccctcccccacaggataccctgtcatggctgccggcactgtggtcattcctatggggcgattacaagggcgaagagaaggacagagcacctggcgagaagggagaagagaaagaggaggatgaagattatcctagcgaggatatagagggcgaagatcaggaagataaagaggaagatgaggaggagcaggccctttggttcaacggaacgacagacaattgggaccaaggctggctcgcacctggcgattgggttttcaaggattcagtcagctatgactatgaaccacagaaggagtggtcaccttggtcaccctgttccggcaactgttcaaccgggaaacaacagcggactcggccttgcgggtacggctgcaccgctaccgagacacgaacctgcgatctcccttcttgtccaggcacggaggacaaggatacccttggtctgccttcggaggaatggaaattgctcgccaggaacgcgacggatatgcatgaccaggacgtagattcctgcgagaaatggctgaactgcaagtctgattttctcatcaaatacctcagtcagatgctaagggacctgccctcctgcccatgcgcttaccctctcgaggcaatggactctcctgtgtccttacaagatgagcaccagggaagatcctttcgctggagggacgcgagcggccctcgagagagattagacatataccagcccaccgccaggttctgcctgcgctccatgcttagcggagaaagctcaactctcgccgctcagcactgttgctatgacgaggacagccgacttctgactcggggtaaaggcgcagggatgcctaacctcatatccactgatttcagcccaaagctgcacttcaagttcgacaccacaccatggattctttgcaaaggggactggagcagactgcatgccgtgctacctccgaacaacgggagggcctgcaccgacaaccccctggaagaagagtacttggcacaactccaggaagcgaaagagtattag

SEQ ID NO: 331249 - DNA, 1452 bp, Artificial Sequence
  derived and/or modified sequence
atgacccccggcaacgccaccccccccagaacccccgaggtgacccccctgagactggagctgcagaagctgcccggcctggccaacaccaccctgagcacccccaaccccgacacccaggccagcgccagccccgaccccagacccctgagagaggaggaggaggccagactgctgcccagaacccacctgcaggccgagctgcaccagcacggctgctggaccgtgaccgagcccgccgccctgacccccggcaacgccaccccccccagaacccaggaggtgacccccctgctgctggagctgcagaagctgcccgagctggtgcacgccaccctgagcacccccaaccccgacaaccaggtgaccatcaaggtggtggaggacccccaggccgaggtgagcatcgacctgctggccgagcccagcaacccccccccccaggacaccctgagctggctgcccgccctgtggagcttcctgtggggcgactacaagggcgaggagaaggacagagcccccggcgagaagggcgaggagaaggaggaggacgaggactaccccagcgaggacatcgagggcgaggaccaggaggacaaggaggaggacgaggaggagcaggccctgtggttcaacggcaccaccgacaactgggaccagggctggctggcccccggcgactgggtgttcaaggacagcgtgagctacgactacgagccccagaaggagtggagcccctggagcccctgcagcggcaactgcagcaccggcaagcagcagagaaccagaccctgcggctacggctgcaccgccaccgagaccagaacctgcgacctgcccagctgccccggcaccgaggacaaggacaccctgggcctgcccagcgaggagtggaagctgctggccagaaacgccaccgacatgcacgaccaggacgtggacagctgcgagaagtggctgaactgcaagagcgacttcctgatcaagtacctgagccagatgctgagagacctgcccagctgcccctgcgcctaccccctggaggccatggacagccccgtgagcctgcaggacgagcaccagggcagaagcttcagatggagagacgccagcggccccagagagagactggacatctaccagcccaccgccagattctgcctgagaagcatgctgagcggcgagagcagcaccctggccgcccagcactgctgctacgacgaggacagcagactgctgaccagaggcaagggcgccggcatgcccaacctgatcagcaccgacttcagccccaagctgcacttcaagttcgacaccaccccctggatcctgtgcaagggcgactggagcagactgcacgccgtgctgccccccaacaacggcagagcctgcaccgacaaccccctggaggaggagtacctggcccagctgcaggaggccaaggagtactag

SEQ ID NO: 331250 - DNA, 1473 bp, Artificial Sequence
  derived and/or modified sequence
atgagagccctgagagacagagccggcctgctgctgtgcgtgctgctgctggccgccctgctggaggccgccctgggcctgcccgtgaagaagcccagactgagaggccccagacccggcagcctgaccagactggccgaggtgagcgccagccccgaccccagacccctgaaggaggaggaggaggcccccctgctgcccagaacccacctgcaggccgagccccaccagcacggctgctggaccgtgaccgagcccgccgccatgacccccggcaacgccaccccccccagaacccccgaggtgacccccctgagactggagctgcagaagctgcccggcctggccaacaccaccctgagcacccccaaccccgacacccaggtgaccatcaaggtggtggaggacccccaggccgaggtgagcatcgacctgctggccgagcccagcaacccccccccccaggacaccctgagctggctgcccgccctgtggagcttcctgtggggcgactacaagggcgaggagaaggacagagcccccggcgagaagggcgaggagaaggaggaggacgaggactaccccagcgaggacatcgagggcgaggaccaggaggacaaggaggaggacgaggaggagcaggccctgtggttcaacggcaccaccgacaactgggaccagggctggctggcccccggcgactgggtgttcaaggacagcgtgagctacgactacgagccccagaaggagtggagcccctggagcccctgcagcggcaactgcagcaccggcaagcagcagagaaccagaccctgcggctacggctgcaccgccaccgagaccagaacctgcgacctgcccagctgccccggcaccgaggacaaggacaccctgggcctgcccagcgaggagtggaagctgctggccagaaacgccaccgacatgcacgaccaggacgtggacagctgcgagaagtggctgaactgcaagagcgacttcctgatcaagtacctgagccagatgctgagagacctgcccagctgcccctgcgcctaccccctggaggccatggacagccccgtgagcctgcaggacgagcaccagggcagaagcttcagatggagagacgccagcggccccagagagagactggacatctaccagcccaccgccagattctgcctgagaagcatgctgagcggcgagagcagcaccctggccgcccagcactgctgctacgacgaggacagcagactgctgaccagaggcaagggcgccggcatgcccaacctgatcagcaccgacttcagccccaagctgcacttcaagttcgacaccaccccctggatcctgtgcaagggcgactggagcagactgcacgccgtgctgccccccaacaacggcagagcctgcaccgacaaccccctggaggaggagtacctggcccagctgcaggaggccaaggagtactag

SEQ ID NO: 331251 - DNA, 1473 bp, Artificial Sequence
  derived and/or modified sequence
atgagagccctgagagacagagccggcctgctgctgtgcgtgctgctgctggccgccctgctggaggccgccctgggcctgcccgtgaagaagcccagactgagaggccccagacccggcagcctgaccagactggccgaggccagcgccagccccgaccccagacccctgagagaggaggaggaggccagactgctgcccagaacccacctgcaggccgagctgcaccagcacggctgctggaccgtgaccgagcccgccgccctgacccccggcaacgccaccccccccagaacccaggaggtgacccccctgctgctggagctgcagaagctgcccgagctggtgcacgccaccctgagcacccccaaccccgacaaccaggtgaccatcaaggtggtggaggacccccaggccgaggtgagcatcgacctgctggccgagcccagcaacccccccccccaggacaccctgagctggctgcccgccctgtggagcttcctgtggggcgactacaagggcgaggagaaggacagagcccccggcgagaagggcgaggagaaggaggaggacgaggactaccccagcgaggacatcgagggcgaggaccaggaggacaaggaggaggacgaggaggagcaggccctgtggttcaacggcaccaccgacaactgggaccagggctggctggcccccggcgactgggtgttcaaggacagcgtgagctacgactacgagccccagaaggagtggagcccctggagcccctgcagcggcaactgcagcaccggcaagcagcagagaaccagaccctgcggctacggctgcaccgccaccgagaccagaacctgcgacctgcccagctgccccggcaccgaggacaaggacaccctgggcctgcccagcgaggagtggaagctgctggccagaaacgccaccgacatgcacgaccaggacgtggacagctgcgagaagtggctgaactgcaagagcgacttcctgatcaagtacctgagccagatgctgagagacctgcccagctgcccctgcgcctaccccctggaggccatggacagccccgtgagcctgcaggacgagcaccagggcagaagcttcagatggagagacgccagcggccccagagagagactggacatctaccagcccaccgccagattctgcctgagaagcatgctgagcggcgagagcagcaccctggccgcccagcactgctgctacgacgaggacagcagactgctgaccagaggcaagggcgccggcatgcccaacctgatcagcaccgacttcagccccaagctgcacttcaagttcgacaccaccccctggatcctgtgcaagggcgactggagcagactgcacgccgtgctgccccccaacaacggcagagcctgcaccgacaaccccctggaggaggagtacctggcccagctgcaggaggccaaggagtactag

SEQ ID NO: 331252 - DNA, 251 bp, Artificial Sequence
  derived and/or modified sequence
gcactcatggcatgttctgctgcctggaaggccgctgcctctgtcccagttccatggggatctctgctctagaggggtagcttcttccttgaaaagatgctgcttaaagtcagaggatggatggctctccttggggcatttctagctctggactgtgccacaagccctggatgtgttttcacctctgacagagcccagacaccatgaacgcaagtgaattccgaaggagagggaaggagatggtggattac

SEQ ID NO: 331253 - DNA, 99 bp, Artificial Sequence
  derived and/or modified sequence
atggccgagagcagcagcgagagcgaccacttcagatgcagagacagactgagcccctgggccgccagaagcacccacagaggcaccagaagcctgtag

SEQ ID NO: 331254 - DNA, 99 bp, Artificial Sequence
  derived and/or modified sequence
atggccgagtcctcctccgaatcagatcatttcaggtgccgagaccgtctttccccatgggctgcccgaagcacacataggggaactcggtctctgtag

SEQ ID NO: 331255 - DNA, 99 bp, Artificial Sequence
  derived and/or modified sequence
atggccgagagcagcagcgagagtgaccacttccgctgccgggaccggctgagcccctgggccgcccggagcacccaccggggcaccaggagcctgtag

SEQ ID NO: 331256 - DNA, 99 bp, Artificial Sequence
  derived and/or modified sequence
atggccgagagcagcagcgagagcgaccacttccggtgccgggaccgactgtcaccctgggccgcaaggagtacgcataggggcaccaggagtctgtag

SEQ ID NO: 331257 - DNA, 99 bp, Artificial Sequence
  derived and/or modified sequence
atggccgaaagtagtagcgaatcggatcacttcagatgccgcgatcggctgtcaccctgggcggcaaggtcgacccatagggggaccaggagtctgtag

SEQ ID NO: 331258 - protein, 435 aa, Artificial Sequence
  derived and/or modified sequence
MAESSSESDHFRCRDRLSPWAARSTHRGTRSLPTVEVTEKVNTITSTLQDTSRNLRQVDQMLGRYREYSNGQAGAIEHLKESLEQSIDQLRSQRLLRNSGGRSISVTSLSASDLDGGTGSELHHFPPTSPLKDYGDPQGIKRMRSRTGVRFVQETDDMTQLHGFHQSLRDLSSEQIRLGDDFNRELSRRSRSDAETKRALEELTEKLNEAQKQEVVSDRVERRLQELEREMRTERELVERRQDQLGLMSLQLQEALKKQEAKADEHEGAIKNKLRQTETEKNQLEQELELSRRLLNQSEGSRETLLHQVEELRTQLTKAEGDRKGLQHQVSQISKQQSNYQDEQGEDWRFRRGVEREKQDLEKQMSDLRVQLNFSAMASELEEVKRCMERKDKEKAHLASQVEHINRKCLLNLVQDLDCKDNEILTYSLQSPLHV

SEQ ID NO: 331259 - protein, 187 aa, Artificial Sequence
  derived and/or modified sequence
MLGRYREYSNGQAGAIEHLKESLEQSIDQLRSQRLLRNSGGRSISVTSLSASDLDGGTGSELHHFPPTSPLKDYGDPQGIKRMRSRTGVRFVQETDDMTQLHGFHQSLRDLSSEQIRLGDDFNRELSRRSRSDAETKRALEELTEKLNEAQKQEVFFVKSLGKVKIQCLSSAEVDNVFPINVWQCGI

SEQ ID NO: 331260 - protein, 179 aa, Artificial Sequence
  derived and/or modified sequence
MAESSSESDHFRCRDRLSPWAARSTHRGTRSLPTVEVTEKVNTITSTLQDTSRNLRQVDQMLGRYREYSNGQAGAIEHLKESLEQSIDQLRSQRLLRNSGGRSISVTSLSASDLDGGTGSELHHFPPTSPLKDYGDPQGIKRMRSRTGVRFVQETDDMTQLHGFHQSLRDLSSEQIRLG

SEQ ID NO: 331261 - protein, 128 aa, Artificial Sequence
  derived and/or modified sequence
MAESSSESDHFRCRDRLSPWAARSTHRGTRSLPTVEVTEKVNTITSTLQDTSRNLRQVDQMLGRYREYSNGQAGAIEHLKESLEQSIDQLRSQRLLRNSGGRSISVTSLSASDLDGGTGSELHHFPPT

SEQ ID NO: 331262 - DNA, 1296 bp, Artificial Sequence
  derived and/or modified sequence
atgccaataataaaagaacccattgactttatcaataaacctgaatctgaagcccaaaaatggggcaaagaagaagaaaaacgttggtttacgaaattaaataatcttgaagaagtagccgtaaatcaacttaaaactaaggaagataaaacaaaaatagataatttttctacagatattttattttcttcattaactgcaatagaaattatgaaagaagacgaaaatcaaaatctttttgatgttgaaagaattagagaagcacttttaaaaaatactttagatagagaagttataggctatgtaaattttacacctaaagagcttggaattaatttttctataagagatgtagaattaaatagagatatatcagatgaaattttagataaagttagacagcaaataataaatcaagaatatactaaattttcatttgtatcattagggttaaatgacaacagcatcgatgagagtataccagttattgtgaaaactagagttccaacaacgtttaattatggtgttcttaataataaagaaacagtatcattattattaaatcaaggtttttctataattcctgagtcagctattataactactataaaaggaaaagactatatattaatagaaggaagtcttagtcaagagcttgatttctataataaaggatcagaagcttggggagaaaaaaattatggtgattatgtttcaaaactttcccaggaacaattaggtgctttagaaggatatctgcattcagattataaagctattaatagttatttaagaaataatagagttccaaataatgacgagcttaataaaaaaattgaattaataagttctgctctatctgtaaagccaatacccgaaacattaatagcatatagaagagtagatggtattccattcgatttaccttctgatttttcctttgataaaaaagaaaatggtgaaataatagctgataaacaaaaattaaacgagtttatagataaatggactggaaaagaaattaaaaatttatcattttctagtacttctcttaaatccaccccattatcatttagtaaatctcgttttatatttagattgcgtttaagtgaagggaccattggagcatttatttatgggttttctggatttcaagatgaacaagaaattcttttgaataagaattctactttcaagatatttagaataactccaataacttcaataattaatagagttactaaaatgactcaggtagtaattgatgctgaagttatacaaaataaagagatttag

SEQ ID NO: 331263 - DNA, 564 bp, Artificial Sequence
  derived and/or modified sequence
atgctgggcagatacagagagtacagcaacggccaggccggcgccatcgagcacctgaaggagagcctggagcagagcatcgaccagctgagaagccagagactgctgagaaacagcggcggcagaagcatcagcgtgaccagcctgagcgccagcgacctggacggcggcaccggcagcgagctgcaccacttcccccccaccagccccctgaaggactacggcgacccccagggcatcaagagaatgagaagcagaaccggcgtgagattcgtgcaggagaccgacgacatgacccagctgcacggcttccaccagagcctgagagacctgagcagcgagcagatcagactgggcgacgacttcaacagagagctgagcagaagaagcagaagcgacgccgagaccaagagagccctggaggagctgaccgagaagctgaacgaggcccagaagcaggaggtgttcttcgtgaagagcctgggcaaggtgaagatccagtgcctgagcagcgccgaggtggacaacgtgttccccatcaacgtgtggcagtgcggcatctag

SEQ ID NO: 331264 - DNA, 540 bp, Artificial Sequence
  derived and/or modified sequence
atggccgagagcagcagcgagagcgaccacttcagatgcagagacagactgagcccctgggccgccagaagcacccacagaggcaccagaagcctgcccaccgtggaggtgaccgagaaggtgaacaccatcaccagcaccctgcaggacaccagcagaaacctgagacaggtggaccagatgctgggcagatacagagagtacagcaacggccaggccggcgccatcgagcacctgaaggagagcctggagcagagcatcgaccagctgagaagccagagactgctgagaaacagcggcggcagaagcatcagcgtgaccagcctgagcgccagcgacctggacggcggcaccggcagcgagctgcaccacttcccccccaccagccccctgaaggactacggcgacccccagggcatcaagagaatgagaagcagaaccggcgtgagattcgtgcaggagaccgacgacatgacccagctgcacggcttccaccagagcctgagagacctgagcagcgagcagatcagactgggctag

SEQ ID NO: 331265 - DNA, 387 bp, Artificial Sequence
  derived and/or modified sequence
atggccgagagcagcagcgagagcgaccacttcagatgcagagacagactgagcccctgggccgccagaagcacccacagaggcaccagaagcctgcccaccgtggaggtgaccgagaaggtgaacaccatcaccagcaccctgcaggacaccagcagaaacctgagacaggtggaccagatgctgggcagatacagagagtacagcaacggccaggccggcgccatcgagcacctgaaggagagcctggagcagagcatcgaccagctgagaagccagagactgctgagaaacagcggcggcagaagcatcagcgtgaccagcctgagcgccagcgacctggacggcggcaccggcagcgagctgcaccacttcccccccacctag

SEQ ID NO: 331266 - DNA, 564 bp, Artificial Sequence
  derived and/or modified sequence
atgctgggccgatacagggaatacagcaatggccaggctggggctatcgagcacctcaaggaaagcctggaacagagcattgaccagctgaggtcacaacgccttttaaggaattcaggtggtcgttcaatttctgtgacttccttatctgcttccgacctggacgggggaaccggctccgaactgcaccatttcccaccaacaagccccttgaaggattacggagatcctcagggaattaaacggatgagaagtcggacaggagttagattcgtgcaggaaactgatgatatgactcagctgcacgggttccaccagagcctccgcgacctgtcctccgaacagattcggctcggagatgatttcaacagagaactctctagacgtagtaggagcgatgccgagacgaagcgcgccctggaagagctgacagaaaagcttaatgaagcccagaagcaagaggtgttcttcgtcaaaagtcttggcaaagtgaagattcagtgcctgagttctgccgaggtggacaatgtctttcctataaatgtgtggcagtgcggcatctag

SEQ ID NO: 331267 - DNA, 540 bp, Artificial Sequence
  derived and/or modified sequence
atggccgagtccagcagtgagtccgaccatttcagatgcagggaccgactgtctccctgggcagctcgatcaacccaccgtggaacgaggagtctcccaaccgtggaagtgaccgagaaggttaacacgattacaagcaccttgcaggacactagccgcaatctccggcaggttgaccaaatgctaggccggtatcgtgagtattccaacggtcaggctggtgccattgaacatctcaaggaatcattggagcagtcaatcgatcagctccgcagccagaggctcctgagaaacagcggcgggagatcaatctcggtcacaagcctcagtgccagcgacctcgatgggggcaccggctctgaactgcaccatttccccccaacatcgcctctcaaagattacggggacccccaagggatcaaacgtatgcggtctcgaacaggcgtgagattcgtgcaggagaccgacgatatgacccagttacacggcttccaccagtcccttcgagatctgagctctgagcaaatccgtctcggctag

SEQ ID NO: 331268 - DNA, 387 bp, Artificial Sequence
  derived and/or modified sequence
atggctgagtcctcttcagaaagtgatcacttccgatgccgagatagactgtctccttgggcagcgaggtcaacccatagggggacccggtcattacctaccgtggaagtgacagaaaaggttaacacgattactagcacattgcaggatacttctcgtaatttacggcaagtggaccagatgctaggcagatatcgcgagtactccaatggtcaagctggggccatcgagcacctgaaagagtcacttgaacaaagtatagatcagctgcgtagccaacgtctcctgcgaaacagtggaggtcggtcaatttctgtgacatctttaagcgcctccgacttggatggcgggaccgggtccgagcttcaccacttccctcctacgtag

SEQ ID NO: 331269 - DNA, 564 bp, Artificial Sequence
  derived and/or modified sequence
atgctgggccgctaccgggagtacagcaatggccaggccggggccatcgagcacctgaaggagagcctggagcagagcattgaccagctgcggagccagaggctgctgagaaattctgggggccgcagcatctctgtgaccagcctgagcgccagtgacctggatggcggcaccggcagcgagctgcaccacttcccccccaccagccccctgaaggactatggagacccccagggcatcaagaggatgaggagcaggactggagtgcgctttgtgcaggagacagatgacatgacccagctgcacggcttccaccagagcctgcgggacctgagcagcgagcagatccggctgggagatgacttcaaccgggagctgagccgccgcagcagaagtgatgctgagaccaagagggccctggaggagctgacagagaagctgaatgaggcccagaagcaggaggtgttctttgtgaagagcctgggcaaggtgaagatccagtgcctgagcagcgctgaggtggacaacgtgttccccatcaacgtgtggcagtgtggcatctag

SEQ ID NO: 331270 - DNA, 1606 bp, Artificial Sequence
  derived and/or modified sequence
gctgcgtttggtcagttgcaccttctgggtcactggtagccgcgggagccgggtggggcctaggcgatgatccggcattaaggagctgggatcatcctccgtctcaggtggtttggggaaagtgtaggggcaaccaaagatcatcggcttgactaggccctttgccctgaacctcatgaagaaatgataggaggcagacatatgtgcctaaaaagagcgttgagctcagagaagagcaactcggagttttgggggtgtgctttgatttgtgtacatcaatggcagaatcatccagcgaatcagatcacttccgctgtcgtgaccgattgagtccatgggctgccagatcaacgcacaggggaactcgaagtcttcctacagtagaagttaccgagaaggtcaacactataacaagtactttacaggataccagtcggaacctgcgacaagtggaccagatgcttggacgataccgagaatacagtaatggacaggcgggtgcgatagaacatttaaaagaaagcttggaacaatcaatcgaccaactccggagtcaacgtttattgagaaactcaggagggagaagtatttctgttacaagtttgagtgcaagtgaccttgatggtggcactgggtcagagctccatcattttccacctacctcacctctcaaggactatggggatccacagggtattaaacgaatgagatcaagaactggtgtccggtttgttcaagagactgatgatatgactcagcttcatggttttcatcagtctcttcgagacctcagcagtgaacaaattcgccttggagatgatttcaacagggagctttccagaaggagccggtcagatgccgaaacaaaaagggctttggaagaattgactgaaaaacttaatgaagcccagaaacaagaagtggtttcagatcgggtggagcggcggcttcaggaactggagagagagatgcgcacagaaagggagctggtggaaagacgccaggatcaactgggactcatgtccctgcagctacaggaggcactaaagaaacaagaagctaaagcagatgagcatgagggggcaataaaaaataagctaagacaaactgaaactgagaagaatcaacttgaacaggaattggagctatctcgaaggttattgaatcaatcagaaggcagccgagaaacacttttgcatcaggtagaagaactgcgtacacaacttacgaaagcagaaggtgatcgaaagggtttacagcatcaagtatctcagatttccaagcaacagtcaaactatcaggatgaacaaggggaggactggagatttaggagaggggttgagcgggaaaaacaggacctggagaagcaaatgtcagatttgagagtgcagctgaacttcagcgcaatggcatctgagttagaggaagtgaaacggtgcatggagagaaaagacaaggagaaagcacatttggcatcacaagtagagcacatcaatagaaaatgtcttttaaatttggttcaagatttggattgtaaagataatgaaatattgacatactctttacaaagccctctacatgtttaataaagacttacttgaaattg

SEQ ID NO: 331271 - DNA, 540 bp, Artificial Sequence
  derived and/or modified sequence
atggccgagagcagcagcgagagtgaccacttccgctgccgggaccggctgagcccctgggccgcccggagcacccaccggggcaccaggagcctgcccaccgtggaggtgacagagaaggtgaacaccatcaccagcaccctgcaggacaccagcaggaacctgcggcaggtggaccagatgctgggccgctaccgggagtacagcaatggccaggccggggccatcgagcacctgaaggagagcctggagcagagcattgaccagctgcggagccagaggctgctgagaaattctgggggccgcagcatctctgtgaccagcctgagcgccagtgacctggatggcggcaccggcagcgagctgcaccacttcccccccaccagccccctgaaggactatggagacccccagggcatcaagaggatgaggagcaggactggagtgcgctttgtgcaggagacagatgacatgacccagctgcacggcttccaccagagcctgcgggacctgagcagcgagcagatccggctgggctag

SEQ ID NO: 331272 - DNA, 387 bp, Artificial Sequence
  derived and/or modified sequence
atggccgagagcagcagcgagagtgaccacttccgctgccgggaccggctgagcccctgggccgcccggagcacccaccggggcaccaggagcctgcccaccgtggaggtgacagagaaggtgaacaccatcaccagcaccctgcaggacaccagcaggaacctgcggcaggtggaccagatgctgggccgctaccgggagtacagcaatggccaggccggggccatcgagcacctgaaggagagcctggagcagagcattgaccagctgcggagccagaggctgctgagaaattctgggggccgcagcatctctgtgaccagcctgagcgccagtgacctggatggcggcaccggcagcgagctgcaccacttcccccccacctag

SEQ ID NO: 331273 - DNA, 564 bp, Artificial Sequence
  derived and/or modified sequence
atgctgggccggtaccgggagtacagcaacggccaggccggcgccatcgaacacctcaaggagtccttagaacaaagcattgatcagctcagaagtcagcgcctgctgaggaactccggcggccgatcaatttcagttacgagtctgagcgctagcgatctggacgggggaacgggcagcgagctgcaccattttcccccaaccagcccccttaaagactatggcgacccacaggggataaaacggatgcggagtcgcaccggggtgcgattcgttcaagagacagacgacatgacccagctacatgggtttcatcagagcctgagagacctgagctcagagcaaatcagacttggcgacgatttcaacagagaattgtctcgtcgatcaagaagcgacgccgagacaaagagagcactcgaggaattaactgagaagctgaacgaagcacagaagcaggaggtattcttcgtgaagagcttgggtaaggttaaaatccaatgcctgagctccgcagaggtggacaatgtgtttcccataaatgtttggcagtgtggcatctag

SEQ ID NO: 331274 - DNA, 540 bp, Artificial Sequence
  derived and/or modified sequence
atggccgagagcagcagcgagagcgaccacttccggtgccgggacagactttccccatgggccgcccgatcaacccatagaggtacccggtctttgccgactgtcgaggtgactgagaaggtcaacaccattacaagcaccctccaggacacgtctaggaatctgcgccaggtcgaccagatgctcgggagatatagagagtattcgaatggacaggccggcgcgatagagcacctaaaagagtcattggagcagagcattgaccagcttcgatcacagagactgctgcgtaactccgggggccgctcaatttctgtgaccagcctctctgcatctgacttggacggtggtactggatctgagttacaccattttccacccacatctcctctgaaggactatggtgatcctcaggggatcaagagaatgcggtcaagaaccggggttagattcgtccaagagacagatgacatgactcagctgcacggcttccaccagtcactccgcgacctgtccagtgaacaaatcagattggggtag

SEQ ID NO: 331275 - DNA, 387 bp, Artificial Sequence
  derived and/or modified sequence
atggccgagagcagcagcgagagcgaccacttccggtgccgggaccgcctatctccttgggcagccaggtccacgcaccgagggacacgtagcctccccaccgttgaggtgaccgagaaagtcaacaccattacgagcaccctgcaagacacctctcggaacctgcgccaggtggaccagatgctggggcgttaccgcgaatactccaatgggcaggctggagctattgaacatctcaaggaatccctggagcagtccatagaccaacttagaagtcagcgtctcctgcgtaactctggcggtcggagtattagtgtaacgagcctttccgcctccgatctcgacggtggtactggatccgaattacatcatttcccccctacctag

SEQ ID NO: 331276 - DNA, 564 bp, Artificial Sequence
  derived and/or modified sequence
atgttggggcgttatagggaatatagcaatggacaagccggagctattgagcatctgaaagagtccttggagcagtccatagatcagcttcggagccaaagactgttacggaactctggtggacggagcatctcagtcacttcactcagtgcttccgacctcgacggtggaacaggctctgagctccaccatttccctcctacctcgcctctcaaagattatggcgacccccagggaatcaaaaggatgcgttcccgcactggggttcggtttgtgcaggagacagatgacatgactcagctgcacgggttccaccagtctcttcgcgacctgtcatctgagcagatccgtctcggagacgactttaatagggagctgagccgccgatctagaagtgacgctgaaaccaaaagggccttggaagaactcacagagaagctgaacgaagcccagaagcaggaagtgttcttcgtaaagtcactcgggaaggtaaagatccagtgcctcagctcagcagaggtggataatgtcttccccataaacgtatggcagtgcggaatctag

SEQ ID NO: 331277 - DNA, 540 bp, Artificial Sequence
  derived and/or modified sequence
atggcagagtcaagcagtgaaagcgatcactttcgatgcagggataggctgagcccatgggcggcaagatccactcaccgcggaacacgttccctccctacagtggaagttactgaaaaagttaatacaatcacgtccaccttgcaggacacctcccgaaacctgaggcaggtggatcagatgctggggagatacagggagtacagtaacgggcaggcaggcgcaatcgaacacttaaaggagtccttggaacagagcatcgaccagctgagatcccaacggctcctccggaacagtgggggacgcagtatctcagtcacctccctctctgcgagtgacctcgatggaggaaccgggtccgagcttcatcactttccacccacctctcctcttaaggactacggtgatccacaggggattaagagaatgcggtctagaaccggcgttcggtttgtccaggagacggacgacatgacccaactgcatggctttcatcaaagcttgagagatctctcaagtgagcagattcgcctgggatag

SEQ ID NO: 331278 - DNA, 387 bp, Artificial Sequence
  derived and/or modified sequence
atggcagaatccagctccgaatccgaccactttcggtgcagggatcggctctccccttgggcagcccgatcaacgcataggggcaccaggagtctccccactgtagaggtaacggaaaaggttaataccattacgagcactttacaagacacatcccgcaaccttcgccaagtcgatcagatgctcggtaggtatcgagagtacagtaatgggcaagctggcgctatcgagcacttgaaagaatctctagaacagtcgattgatcagctgcggtcacagaggcttcttcggaattccggcggacgctctatcagcgttacatcactgtccgcctccgatttggacggcggaacgggttccgaactacaccacttcccacctacctag

SEQ ID NO: 331279 - DNA, 869 bp, Artificial Sequence
  derived and/or modified sequence
cagagaaggaaggatcttctcatgcacagaggcaacaaatggcaactttctgagtcctcatctataaaatgagcataataacatcacctacttaattggatttggtgaggattcactgggtgagttcatgcaaagcgctgagaacaggaccccccgcccccgtggtttggggaaagtgtaggggcaaccaaagatcatcggcttgactaggccctttgccctgaacctcatgaagaaatgataggaggcagacatatgtgcctaaaaagagcgttgagctcagagaagagcaactcggagttttgggggtgtgctttgatttgtgtacatcaatggcagaatcatccagcgaatcagatcacttccgctgtcgtgaccgattgagtccatgggctgccagatcaacgcacaggggaactcgaagtcttcctacagtagaagttaccgagaaggtcaacactataacaagtactttacaggataccagtcggaacctgcgacaagtggaccagatgcttggacgataccgagaatacagtaatggacaggcgggtgcgatagaacatttaaaagaaagcttggaacaatcaatcgaccaactccggagtcaacgtttattgagaaactcaggagggagaagtatttctgttacaagtttgagtgcaagtgaccttgatggtggcactgggtcagagctccatcattttccacctacctcacctctcaaggactatggggatccacagggtattaaacgaatgagatcaagaactggtgtccggtttgttcaagagactgatgatatgactcagcttcatggttttcatcagtctcttcgagacctcagcagtgaacaaattcgccttgga

SEQ ID NO: 331280 - DNA, 576 bp, Artificial Sequence
  derived and/or modified sequence
ctttctacctccttattcagagaaggaaggatcttctcatgcacagaggcaacaaatggcaactttctgagtcctcatctataaaatgagcataataacatcacctacttaattggatttggtgaggattcactgggtgagttcatgcaaagcgctgagaacaggaccccccgcccccgatttgtgtacatcaatggcagaatcatccagcgaatcagatcacttccgctgtcgtgaccgattgagtccatgggctgccagatcaacgcacaggggaactcgaagtcttcctacagtagaagttaccgagaaggtcaacactataacaagtactttacaggataccagtcggaacctgcgacaagtggaccagatgcttggacgataccgagaatacagtaatggacaggcgggtgcgatagaacatttaaaagaaagcttggaacaatcaatcgaccaactccggagtcaacgtttattgagaaactcaggagggagaagtatttctgttacaagtttgagtgcaagtgaccttgatggtggcactgggtcagagctccatcattttccacctac

SEQ ID NO: 331281 - DNA, 545 bp, Artificial Sequence
  derived and/or modified sequence
atcctttctacctccttattcagagaaggaaggatcttctcatgcacagaggcaacaaatggcaactttctgagtcctcatctataaaatgagcataataacatcacctacttaattggatttggtgaggattcactgggtgagttcatgcaaagcgctgagaacaggaccccccgcccccagtgaggagatgacacctagactgaagtagcagcagtaatgagctgacagcctcacatctacttttggtgtgccgtgaataagccatatgatcttaggtggtttggggaaagtgtaggggcaaccaaagatcatcggcttgactaggccctttgccctgaacctcatgaagaaatgataggaggcagacatatgtgcctaaaaagagcgttgagctcagagaagagcaactcggagttttgggggtgtgctttgatttgtgtacatcaatggcagaatcatccagcgaatcagatcacttccgctgtcgtgaccgattgagtccatgggctgccagatcaacgcacaggggaactcgaagtctt

SEQ ID NO: 331282 - DNA, 915 bp, Artificial Sequence
  derived and/or modified sequence
gtggtttggggaaagtgtaggggcaaccaaagatcatcggcttgactaggccctttgccctgaacctcatgaagaaatgataggaggcagacatatgtgcctaaaaagagcgttgagctcagagaagagcaactcggagttttgggggtgtgctttgatttgtgtacatcaatggcagaatcatccagcgaatcagatcacttccgctgtcgtgaccgattgagtccatgggctgccagatcaacgcacaggggaactcgaagtcttcctacagtagaagttaccgagaaggtcaacactataacaagtactttacaggataccagtcggaacctgcgacaagtggaccagatgcttggacgataccgagaatacagtaatggacaggcgggtgcgatagaacatttaaaagaaagcttggaacaatcaatcgaccaactccggagtcaacgtttattgagaaactcaggagggagaagtatttctgttacaagtttgagtgcaagtgaccttgatggtggcactgggtcagagctccatcattttccacctacctcacctctcaaggactatggggatccacagggtattaaacgaatgagatcaagaactggtgtccggtttgttcaagagactgatgatatgactcagcttcatggttttcatcagtctcttcgagacctcagcagtgaacaaattcgccttggagatgatttcaacagggagctttccagaaggagccggtcagatgccgaaacaaaaagggctttggaagaattgactgaaaaacttaatgaagcccagaaacaagaagtgttttttgtgaagagccttggaaaggtgaagatacaatgcctgtcttctgctgaagtagacaacgtctttccaattaatgtgtggcaatgtggtatctaa

SEQ ID NO: 331283 - DNA, 1308 bp, Artificial Sequence
  derived and/or modified sequence
atggccgagtcttctagcgagagcgaccattttcgttgtagagatagacttagtccatgggcagcccgctctacacatcgcggcacaagaagtctacccaccgtggaagtgactgagaaagtgaacaccataacctccactctccaggatacgtcgcggaacctgaggcaggtggaccagatgctggggcggtatagagaatattcgaatggacaagccggggccatcgaacacctgaaagagtccctggaacaatctatcgatcaactgagatctcagcgtctcctgcgcaatagcggcggccgaagcattagtgtaacgagcttgagcgccagcgacctggatggggggactggatctgaattgcaccacttccctcctacttccccgttgaaggactacggagacccacaaggcataaagcgcatgagaagccggactggtgtaagattcgtccaagagacagacgatatgacccaactccatggctttcaccagagcctgagagacttgtcctctgagcaaatacggctgggcgatgacttcaatcgggagttgagtagacgctcacgctcagatgcagaaacaaagagagctctcgaagagctgacagaaaaactgaatgaggcacagaagcaggaagtggttagcgatcgtgttgaacgacgcctacaggagcttgagcgagaaatgagaacagagcgagagctggtggagaggaggcaagatcagctgggactcatgtccctgcagctccaggaagcattgaagaagcaggaggccaaagctgatgagcacgagggagctatcaagaataaactaagacagactgagacagagaaaaatcagctcgaacaggagttagagctgagccggagattgctaaatcagagtgaaggatcccgtgaaactctgcttcaccaggtagaggagctgaggacacagcttaccaaagccgaaggcgacagaaaaggattgcagcaccaggtatctcaaatatctaagcagcagtcaaactatcaggatgagcagggggaggattggcgattccgtcggggtgtggagcgcgaaaaacaggacttggaaaagcagatgagtgacttacgggtgcaactgaacttctccgctatggctagcgagcttgaagaggtaaagagatgcatggaacggaaggacaaggagaaggcccatttggcgtcccaggtagaacacatcaatagaaagtgtctgctgaacctggttcaggatctcgactgtaaagataacgagattctcacatatagcttgcagagcccactgcatgtctag

SEQ ID NO: 331284 - DNA, 1308 bp, Artificial Sequence
  derived and/or modified sequence
atggccgagagcagcagcgagagtgaccacttccgctgccgggaccggctgagcccctgggccgcccggagcacccaccggggcaccaggagcctgcccaccgtggaggtgacagagaaggtgaacaccatcaccagcaccctgcaggacaccagcaggaacctgcggcaggtggaccagatgctgggccgctaccgggagtacagcaatggccaggccggggccatcgagcacctgaaggagagcctggagcagagcattgaccagctgcggagccagaggctgctgagaaattctgggggccgcagcatctctgtgaccagcctgagcgccagtgacctggatggcggcaccggcagcgagctgcaccacttcccccccaccagccccctgaaggactatggagacccccagggcatcaagaggatgaggagcaggactggagtgcgctttgtgcaggagacagatgacatgacccagctgcacggcttccaccagagcctgcgggacctgagcagcgagcagatccggctgggagatgacttcaaccgggagctgagccgccgcagcagaagtgatgctgagaccaagagggccctggaggagctgacagagaagctgaatgaggcccagaagcaggaggtggtgtctgacagagtggagcggcggctgcaggagctggagcgggagatgaggacagagcgggagctggtggagcggcggcaggaccagctgggcctgatgagcctgcagctgcaggaggccctgaagaagcaggaggccaaggcagatgagcacgagggcgccatcaagaacaagctgcggcagacagaaacagagaagaaccagctggagcaggagctggagctgagccggcggctgctgaaccagagcgagggcagccgggagaccctgctgcaccaggtggaggagctgcggacccagctgaccaaggccgagggggacaggaagggcctgcagcaccaggtgtcccagatcagcaagcagcagagcaactaccaggatgagcagggcgaggactggaggttcagaagaggagtggagcgggagaagcaggacctggagaagcagatgtctgacctgcgggtgcagctgaacttcagcgccatggccagcgagctggaggaggtgaagcgctgcatggagaggaaggacaaggagaaggcccacctggccagccaggtggagcacatcaacaggaagtgcctgctgaacctggtgcaggacctggactgcaaggacaatgagatcctgacctacagcctgcagagccccctgcacgtgtag

SEQ ID NO: 331285 - DNA, 1308 bp, Artificial Sequence
  derived and/or modified sequence
atggccgagagcagcagcgagagcgaccacttccggtgccgggaccgcctgtctccatgggccgcacgctcaactcataggggtactcgttccctaccaacagtagaagtgacggaaaaagttaacactattactagcacacttcaggacacctcacggaacttgagacaggtggatcagatgcttggaaggtacagggagtacagcaacggccaggccggcgccatcgagcacctcaaggaaagccttgaacagagcatcgaccagctaagatcccagcggcttttgcgcaactcaggcggccgctccatcagtgtgacttctctctctgctagcgaccttgatggaggaaccggaagcgaacttcaccacttcccaccaaccagccctttaaaggattacggcgatcctcaagggattaaacgaatgagaagccgcaccggcgttcgcttcgttcaggagacagacgacatgacccagctgcatggattccatcagagcctgagggacctgtcctccgagcagatccggctgggagacgatttcaatcgcgagctgtcgaggcggtcaagatcagatgcggaaaccaaaagggccctggaggagctgactgagaaattgaatgaggcacagaagcaggaggtggtatccgaccgcgtggagaggcggttacaggaactggaacgggagatgcggacagagcgggagcttgtggaacggagacaagaccagctggggctgatgagcttgcagctacaggaggctcttaaaaagcaggaggccaaggccgatgagcatgaaggtgcaattaagaataagcttagacagactgagacagaaaagaaccaattggaacaggagctcgagctttctcggagacttctgaaccagagcgagggcagccgcgagacgctgctgcatcaggttgaggagctgaggacccagctcacgaaagccgaaggcgataggaaggggttacagcaccaggttagccaaattagcaagcaacagtccaactatcaagatgagcagggagaggactggcgattcagacggggagtagagcgcgagaaacaggatctggaaaagcagatgtccgatctccgcgtgcagttgaatttcagcgccatggcatcagaacttgaagaggtgaaacggtgtatggaacgcaaggacaaggagaaagcacacctggcctcccaagtggaacacatcaatcggaaatgtctccttaacctcgtacaggatctggattgcaaggataacgagattctgacatactcacttcagagtcccttacacgtgtag

SEQ ID NO: 331286 - DNA, 1308 bp, Artificial Sequence
  derived and/or modified sequence
atggctgagtcaagcagcgagagcgatcacttcaggtgcagagatcgcctctcaccttgggcggctaggtcaacacaccgaggtaccagaagcctgccaacggtggaagtgacagagaaagtgaacacaattactagcactcttcaggacacaagcaggaatctcaggcaggttgaccagatgcttggccgttaccgagagtactctaatgggcaggccggtgcaattgaacacttgaaggagtccctagagcagtccatcgatcagctgcgttctcagcggctactgcggaactccggaggaaggtcaatctccgtgacatcactgtccgccagtgatttggacggcggtacaggcagcgaactgcaccacttcccccctactagccccctgaaggattacggggaccctcagggaataaagcgcatgaggtcgaggacaggagtcaggtttgtgcaggaaaccgatgacatgacccaactccacgggtttcaccagtcactccgggatctctcatccgaacagatcaggctaggggacgatttcaacagggagctgagccgacgctcaaggagtgatgccgaaactaaaagggccctcgaagaactcaccgagaaattgaacgaagctcaaaagcaagaagttgtgtctgaccgtgtggagaggcggctccaagagttggagcgggaaatgaggactgaacgagaactcgtggagcgacggcaagaccagttaggcctgatgtcacttcagctacaagaagctctgaagaagcaggaagccaaggcagacgaacacgagggcgcaattaagaacaagttgaggcagaccgagactgaaaagaaccaacttgagcaagagttagagctttctcgcaggctcctcaaccaaagcgaaggcagcagggagaccctgctgcaccaagtggaagagctccggacacaactcaccaaagctgaaggtgatcgcaaagggctgcagcaccaggtctctcagatatctaagcagcagagcaactatcaggatgagcagggagaggattggcggtttcggagaggtgtggagcgagagaaacaggatctcgagaagcagatgtctgaccttcgcgtgcagctgaatttctccgccatggcgtctgagttggaagaagtgaagcgatgtatggaaaggaaggacaaggaaaaggcgcaccttgcgagccaggtggaacatattaatcgcaagtgtctgttaaacctcgttcaggatctggattgcaaggacaatgaaatcctcacctacagcctgcagagtccactgcacgtgtag

SEQ ID NO: 331287 - DNA, 1308 bp, Artificial Sequence
  derived and/or modified sequence
atggccgagagcagcagcgagagcgaccacttcagatgcagagacagactgagcccctgggccgccagaagcacccacagaggcaccagaagcctgcccaccgtggaggtgaccgagaaggtgaacaccatcaccagcaccctgcaggacaccagcagaaacctgagacaggtggaccagatgctgggcagatacagagagtacagcaacggccaggccggcgccatcgagcacctgaaggagagcctggagcagagcatcgaccagctgagaagccagagactgctgagaaacagcggcggcagaagcatcagcgtgaccagcctgagcgccagcgacctggacggcggcaccggcagcgagctgcaccacttcccccccaccagccccctgaaggactacggcgacccccagggcatcaagagaatgagaagcagaaccggcgtgagattcgtgcaggagaccgacgacatgacccagctgcacggcttccaccagagcctgagagacctgagcagcgagcagatcagactgggcgacgacttcaacagagagctgagcagaagaagcagaagcgacgccgagaccaagagagccctggaggagctgaccgagaagctgaacgaggcccagaagcaggaggtggtgagcgacagagtggagagaagactgcaggagctggagagagagatgagaaccgagagagagctggtggagagaagacaggaccagctgggcctgatgagcctgcagctgcaggaggccctgaagaagcaggaggccaaggccgacgagcacgagggcgccatcaagaacaagctgagacagaccgagaccgagaagaaccagctggagcaggagctggagctgagcagaagactgctgaaccagagcgagggcagcagagagaccctgctgcaccaggtggaggagctgagaacccagctgaccaaggccgagggcgacagaaagggcctgcagcaccaggtgagccagatcagcaagcagcagagcaactaccaggacgagcagggcgaggactggagattcagaagaggcgtggagagagagaagcaggacctggagaagcagatgagcgacctgagagtgcagctgaacttcagcgccatggccagcgagctggaggaggtgaagagatgcatggagagaaaggacaaggagaaggcccacctggccagccaggtggagcacatcaacagaaagtgcctgctgaacctggtgcaggacctggactgcaaggacaacgagatcctgacctacagcctgcagagccccctgcacgtgtag

SEQ ID NO: 331288 - protein, 330 aa, Artificial Sequence
  derived and/or modified sequence
IPEALGYVRQALQLQGDDANSLHLLALLLSAQKHYHDALNIIDMALSEYPENFILLFSKVKLQSLCRGPDEALLTCKHMLQIWKSCYNLTNPSDSGRGSSLLDRTIADRRQLNTITLPDFSDPETGNSPEAYFHGFPSLFSVSSVHATSVAASRVEQALSEVASSLQSSAPKQGPLHPWMTLAQIWLHAAEVYIGIGKPAEATACTQEAANLFPMSHNVLYMRGQIAELRGSMDEARRWYEEALAISPTHVKSMQRLALILHQLGRYSLAEKILRDAVQVNSTAHEVWNGLGEVLQAQGNDAAATECFLTALELEASSPAVPFTIIPRVL

SEQ ID NO: 331289 - DNA, 1257 bp, Artificial Sequence
  derived and/or modified sequence
atgaccatcgccagacagctggccgagatcctgctgagaggcatgtgcgagcagagctactggaaccccctggaggaccccccctgccagagccccctggacgaccccctgagaaagggcgccaacaccaagacctacaccctgaccagaagagccagagtgtacagcggcgagaacatcttctgcccccaggagaacaccgaggaggccctgctgctgctgctgatcagcgagagcatggccaacagagacgccgtgctgagcagaatccccgagcacaagagcgacagactgatcagcctgcagagcgccagcgtggtgtacgacctgctgaccatcgccctgggcagaagaggccagtacgagatgctgagcgagtgcctggagagagccatgaagttcgccttcgaggagttccacctgtggtaccagttcgccctgagcctgatggccgccggcaagagcgccagagccgtgaaggtgctgaaggagtgcatcagactgaagcccgacgacgccaccatccccctgctggccgccaagctgtgcatgggcagcctgcactggctggaggaggccgagaagttcgccaagaccgtggtggacgtgggcgagaagaccagcgagttcaaggccaagggctacctggccctgggcctgacctacagcctgcaggccaccgacgccagcctgagaggcatgcaggaggtgctgcagagaaaggccctgctggccttccagagagcccacagcctgagccccaccgaccaccaggccgccttctacctggccctgcagctggccatcagcagacagatccccgaggccctgggctacgtgagacaggccctgcagctgcagggcgacgacgccaacagcctgcacctgctggccctgctgctgagcgcccagaagcactaccacgacgccctgaacatcatcgacatggccctgagcgagtaccccgagaacttcatcctgctgttcagcaaggtgaagctgcagagcctgtgcagaggccccgacgaggccctgctgacctgcaagcacatgctgcagatctggaagagctgctacaacctgaccaaccccagcgacagcggcagaggcagcagcctgctggacagaaccatcgccgacagaagacagctgaacaccatcaccctgcccgacttcagcgaccccgagaccggcaaccagtgcagctggatcgccttcggcgagatgctggtggacatgggcatccagtgcatctag

SEQ ID NO: 331290 - DNA, 993 bp, Artificial Sequence
  derived and/or modified sequence
atccccgaggccctgggctacgtgagacaggccctgcagctgcagggcgacgacgccaacagcctgcacctgctggccctgctgctgagcgcccagaagcactaccacgacgccctgaacatcatcgacatggccctgagcgagtaccccgagaacttcatcctgctgttcagcaaggtgaagctgcagagcctgtgcagaggccccgacgaggccctgctgacctgcaagcacatgctgcagatctggaagagctgctacaacctgaccaaccccagcgacagcggcagaggcagcagcctgctggacagaaccatcgccgacagaagacagctgaacaccatcaccctgcccgacttcagcgaccccgagaccggcaacagccccgaggcctacttccacggcttccccagcctgttcagcgtgagcagcgtgcacgccaccagcgtggccgccagcagagtggagcaggccctgagcgaggtggccagcagcctgcagagcagcgcccccaagcagggccccctgcacccctggatgaccctggcccagatctggctgcacgccgccgaggtgtacatcggcatcggcaagcccgccgaggccaccgcctgcacccaggaggccgccaacctgttccccatgagccacaacgtgctgtacatgagaggccagatcgccgagctgagaggcagcatggacgaggccagaagatggtacgaggaggccctggccatcagccccacccacgtgaagagcatgcagagactggccctgatcctgcaccagctgggcagatacagcctggccgagaagatcctgagagacgccgtgcaggtgaacagcaccgcccacgaggtgtggaacggcctgggcgaggtgctgcaggcccagggcaacgacgccgccgccaccgagtgcttcctgaccgccctggagctggaggccagcagccccgccgtgcccttcaccatcatccccagagtgctgtag

SEQ ID NO: 331291 - DNA, 1257 bp, Artificial Sequence
  derived and/or modified sequence
atgaccattgcccggcaactggcggaaatccttctccgagggatgtgtgaacagagctattggaaccccctggaggatcccccctgtcagtctcccttagacgaccccttgcgtaaaggcgcgaataccaagacttacaccttaacccggcgcgctcgcgtgtactccggagagaatatcttctgcccacaggagaacactgaggaggctttgctcctcttgttgatctccgagtccatggccaacagagacgctgttctttcgcggattccagagcataaatctgataggctgatctctctgcagtccgcaagcgttgtgtatgatctcctcaccattgccctcggccggcgtggtcaatacgaaatgctgtccgaatgtctggagcgcgccatgaaatttgcattcgaagaatttcacctctggtatcagtttgccctcagcctcatggctgctggcaaaagcgcccgtgctgttaaagttcttaaagagtgcataaggctgaagccggacgatgcaaccattcccctcctggccgcaaagctgtgtatgggcagcctgcactggttggaagaggctgagaagttcgccaaaacggtggttgatgtcggggagaagaccagcgagttcaaggcaaagggatatctggctctgggactcacttactctttacaggcaaccgacgcctcattgaggggaatgcaagaggtcctccagagaaaagctcttctggcatttcagcgggcccacagcctctctcccaccgatcatcaggctgcattctacttggcccttcagttagcaattagccggcagatccctgaggccctggggtacgtccggcaggcactccagctgcagggggacgacgctaattcactgcacctgctggccctgctcctgagcgcccaaaagcactatcatgatgccttgaacattattgacatggcattgagcgagtacccagagaactttattttgctcttctcaaaagtgaaattgcaatcattatgcaggggccctgacgaggccctattaacttgcaagcacatgcttcagatctggaagtcttgctacaacctgaccaatcccagcgacagcggaagagggagcagcctgctcgataggactatcgccgaccgcagacaattgaatacaatcacacttccggacttttcagacccagagacaggcaatcagtgttcatggatagcctttggagaaatgttggtggacatgggtatccagtgcatttag

SEQ ID NO: 331292 - DNA, 993 bp, Artificial Sequence
  derived and/or modified sequence
attcccgaggctcttggctatgtgcgtcaggcgttgcagttgcagggggacgatgccaatagcctgcatctcttggctctcctgctatcagcgcagaaacactatcacgatgcgctgaacatcattgatatggcactgtccgagtacccagagaatttcattctattattctctaaggtcaagttacagtccctttgccgtgggccagatgaagcccttcttacgtgtaagcatatgctgcagatctggaagtcctgttataacttgaccaacccctccgattccggtaggggaagtagtctattggaccggacgattgctgaccgacggcagctgaacacaatcacactacccgatttttccgaccccgagaccggcaattcacccgaggcctactttcacggattcccgtctttattctccgtctcctctgtccatgccacatctgtggctgcctcacgggtagagcaggccctgtccgaggtggcgtccagtttgcagtctagtgcacctaaacagggccctcttcatccatggatgaccctggcccagatctggctgcatgcagcagaggtgtacatcgggataggcaaaccagccgaagcgactgcctgcacacaggaagctgctaacctgtttccaatgtcacacaatgtgctgtatatgagaggtcagatcgctgaactacgcgggtccatggatgaggcacggagatggtatgaagaggccctggctatttcaccaacccacgtgaaatccatgcaaaggttggccctgatcctgcaccagctgggacgctattcactagccgagaagatactgcgggacgcggttcaggttaatagcaccgcccatgaagtatggaatggcctgggtgaggtgttacaggctcagggaaacgatgcagccgctactgagtgttttctgaccgctttggaactcgaggcatcctcacccgccgtgccttttaccattatacccagggtgctttag

SEQ ID NO: 331293 - DNA, 1257 bp, Artificial Sequence
  derived and/or modified sequence
atgaccatcgcccggcagctggccgagatcctgctgcggggcatgtgtgagcagagctactggaaccccctggaggaccccccctgccagagccccctggatgaccccctgaggaaaggagccaacaccaagacctacaccctgacccggcgggcccgggtgtacagcggggagaacatcttctgcccccaggagaacacagaggaggccctgctgctgctgctgatcagcgagagcatggccaacagagatgctgtgctgagccgcatccctgagcacaagagtgacaggctcatcagcctgcagagcgcctctgtggtgtatgacctgctgaccatcgccctgggcagaagaggccagtatgagatgctgtctgagtgcctggagcgggccatgaagtttgcctttgaggagttccacctgtggtaccagtttgccctgagcctgatggccgccggcaagagcgcccgggctgtgaaggtgctgaaggagtgcatccggctgaagccagatgatgccaccatccccctgctggccgccaagctgtgcatgggcagcctgcactggctggaggaggccgagaagtttgccaagacagtggtggatgtgggggagaagaccagcgagttcaaggccaagggctacctggccctgggcctgacctacagcctgcaggccacagatgccagcctgcggggcatgcaggaggtgctgcagaggaaggccctgctggccttccagagggcccacagcctgagccccacagaccaccaggccgccttctacctggccctgcagctggccatcagccggcagatccctgaggccctgggctacgtgcggcaggccctgcagctgcagggagatgatgccaacagcctgcacctgctggccctgctgctgagcgcccagaagcactaccatgatgccctgaacatcatcgacatggccctgtctgagtacccagagaacttcatcctgctcttcagcaaggtgaagctgcagagcctgtgccggggcccagatgaggccctgctgacctgcaagcacatgctgcagatctggaagagctgctacaacctgaccaaccccagcgacagcggccggggcagcagcctgctggacaggaccatcgctgaccggcggcagctgaacaccatcaccctgcctgacttcagtgaccctgagactggaaaccagtgctcctggatcgccttcggggagatgctggtggacatgggcatccagtgcatctag

SEQ ID NO: 331294 - DNA, 993 bp, Artificial Sequence
  derived and/or modified sequence
atccctgaggccctgggctacgtgcggcaggccctgcagctgcagggagatgatgccaacagcctgcacctgctggccctgctgctgagcgcccagaagcactaccatgatgccctgaacatcatcgacatggccctgtctgagtacccagagaacttcatcctgctcttcagcaaggtgaagctgcagagcctgtgccggggcccagatgaggccctgctgacctgcaagcacatgctgcagatctggaagagctgctacaacctgaccaaccccagcgacagcggccggggcagcagcctgctggacaggaccatcgctgaccggcggcagctgaacaccatcaccctgcctgacttcagtgaccctgagactggaaacagccctgaggcctacttccacggcttccccagcctcttctctgtgtcctctgtgcacgccacctctgtggccgccagccgggtggagcaggccctgtctgaggtggccagcagcctgcagagcagcgcccccaagcagggccccctgcacccctggatgaccctggcccagatctggctgcatgctgctgaggtgtacatcggcatcggcaagccagctgaggccacagcctgcacccaggaggccgccaacctcttccccatgagccacaacgtgctgtacatgaggggccagattgctgagctgcggggctccatggatgaggcccggcgctggtatgaggaggccctggccatcagccccacccacgtgaagtccatgcagaggctggccctgatcctgcaccagctgggccgctacagcctggccgagaagatcctgagagatgctgtgcaggtgaacagcacagcccacgaggtgtggaatggcctgggggaggtgctgcaggcccagggcaatgatgctgctgccacagagtgcttcctgacagccctggagctggaggccagcagccctgctgtgcccttcaccatcatcccccgggtgctgtag

SEQ ID NO: 331295 - DNA, 1257 bp, Artificial Sequence
  derived and/or modified sequence
atgaccatcgcccggcagctggccgagatcctgctgcggggcatgtgcgagcagtcttactggaaccctttagaagatccgccgtgtcagtcaccactcgatgaccccctgcgaaaaggcgctaataccaaaacatacacgctgaccaggcgcgcccgcgtatacagcggagaaaatatcttctgcccccaggagaacacggaagaggctctgctacttcttctcatctcagagagcatggcgaatagagatgcggtgctgtccagaattcccgagcataaaagtgatcgtctgatctcactacagtctgcctctgtcgtttatgacttactcaccatcgccctgggcagaagaggtcaatacgaaatgctgtccgagtgccttgaaagggcaatgaaattcgcattcgaggagttccacctttggtaccagtttgctctctcgctcatggccgccgggaaatccgccagagcggtcaaagtcctgaaagagtgcattcgcctgaagccagacgacgccactatacctctcctggctgcgaagctctgtatgggctccctgcactggcttgaggaggctgagaagtttgccaagactgttgtcgacgtcggcgaaaagacctcagagtttaaggccaaaggctacctggccttgggattaacttactccctccaagccacggatgcatccctccgagggatgcaagaggtgctccagagaaaggccctcttggctttccagcgggctcactctctgagccctacagaccatcaggctgctttttatctggccttgcagcttgccatctcccgtcagataccggaggccctgggatacgtccgacaggccctccagcttcagggcgacgacgccaacagcttgcatctgctcgccctgctgctgtctgcccagaaacactatcatgatgctctgaacattatcgatatggctctctccgaatatccggagaacttcatccttttatttagtaaggtgaagctccagagcttatgtcgggggccggacgaagctctcttgacttgcaagcacatgcttcaaatctggaagagctgctacaaccttactaatccctccgactccgggcggggttcttctcttttggacagaacgatcgcggacagacgccaactgaatactatcacactgcctgatttctccgaccccgagaccggcaaccagtgctcttggatcgccttcggggaaatgctggtggatatggggatccagtgcatttag

SEQ ID NO: 331296 - DNA, 993 bp, Artificial Sequence
  derived and/or modified sequence
atccccgaggccctgggctacgtgcggcaggccctgcagctgcagggagatgacgctaacagtctgcatctgttggccctgctgctctctgcacaaaaacattatcacgacgcgttaaacataatcgacatggcactgtccgagtacccagagaactttatcctcctattttcaaaagtaaaacttcaaagcctctgtagaggccctgatgaagccctgctcacctgcaagcacatgctgcagatttggaagtcttgctacaacctgacgaatcccagtgactcgggcaggggcagtagccttcttgatagaacaattgcggatcgtaggcaattgaacacgattactttaccagactttagtgacccagaaaccgggaactctccggaagcatacttccatggatttcctagtctcttctcagtcagctccgtccatgccacaagcgtcgccgcatctcgcgtggaacaggcactgagtgaagtcgcctcctccctccagagttccgcgcctaaacaggggccattgcatccgtggatgaccctagcacaaatatggctgcacgccgcagaggtgtatataggtatcggaaagccagctgaggcaacggcttgcacccaagaagctgctaatctcttccccatgtcccacaacgtcctgtacatgaggggacagattgccgagttgagagggagcatggacgaagcccgtaggtggtatgaggaggctttggccatatcacccactcacgttaagtctatgcagcggcttgctctcatcctgcaccaactgggacggtacagcttagccgaaaaaattctccgcgacgctgttcaggtcaattcgaccgcccacgaggtgtggaacggcctcggcgaagtcttgcaagctcagggcaatgatgcagccgcgactgaatgttttttaaccgctctcgaacttgaggcatcgagccccgcagtaccttttaccatcatcccacgggtactctag

SEQ ID NO: 331297 - DNA, 1257 bp, Artificial Sequence
  derived and/or modified sequence
atgacaattgctcgccagctggccgagatcctgctgagaggcatgtgtgagcaatcttactggaatccgctggaagaccccccttgtcagagccctctggatgaccctcttagaaagggtgcaaacacaaaaacttacaccctgactcgtcgcgctcgggtgtactcaggagaaaacattttctgccctcaggaaaacaccgaagaggctttattactcctgttaatctccgagagtatggccaatcgggacgctgtcctgtctaggattcctgaacacaaatcagatcgacttatatctctgcagagtgccagtgtcgtttatgatctcctgaccatcgccctcggccgacgtggacagtacgagatgttatctgaatgtctcgaacgagcaatgaaattcgcgtttgaagagtttcacctctggtatcagttcgccctgtccctgatggccgcagggaagtctgctcgcgctgtgaaagttctgaaggaatgcatccgcctcaagcccgacgacgctaccataccgctcttggctgctaaattgtgcatgggctcacttcactggctcgaagaagccgagaagttcgcgaagactgttgtggatgtgggtgagaagacttcggaattcaaggccaaaggatacctggctctgggactaacctactctctgcaggccacagacgcctccctgcgtggtatgcaggaggttcttcagcgtaaagcactccttgcatttcagagggcacatagcctctcgcccactgatcaccaggccgctttctacctggccctgcagctggccatcagcagacagattccggaggcactcggctatgtgaggcaagccctgcagctgcaaggtgacgacgctaattcgctccacctgctggctctcttactgtccgctcaaaagcactaccacgatgcccttaatatcatagacatggccctttctgagtaccccgaaaattttatcctgctctttagcaaagtgaagttacagagcctttgtcggggaccagacgaagctctgctgacatgcaagcatatgctgcagatttggaagtcatgctacaatctcaccaacccgagcgactcaggacggggttcctcactcctagatcgtactatagcagaccggaggcagttgaatacaatcactctccccgacttctcggatccagaaacgggcaaccagtgcagttggattgctttcggagagatgctggtagacatggggattcagtgcatatag

SEQ ID NO: 331298 - DNA, 993 bp, Artificial Sequence
  derived and/or modified sequence
atccctgaggccctgggatacgtaaggcaagccctccagctccagggcgatgacgcaaatagtcttcatctccttgcgctgctgctttcagcgcaaaagcattatcatgatgctctaaacatcatcgatatggccttgtccgagtatccagagaattttattctgctgttctcaaaagtaaagcttcaatcactgtgccgcggtccggatgaagccttattgacctgtaaacacatgttgcagatttggaagtcttgttacaatctcaccaacccgtccgactctggcaggggttcctcccttttggaccggaccattgctgaccgccgacagctgaacacaatcacacttccagacttcagcgaccctgagactggtaattccccagaagcatactttcatgggttcccatccttattttctgtcagcagcgtccacgctacatccgtggccgcttcaagagtggaacaggccctctcagaagtcgccagttcactgcagagctcagcccctaagcagggtcccctgcacccttggatgaccctcgctcagatttggctgcacgccgctgaggtgtacattgggatcggcaagcccgcagaggctacagcatgcactcaagaggccgctaacctcttccccatgagccacaatgtactctacatgcgcggacaaatagcagagctacggggaagtatggatgaagccaggaggtggtatgaggaggccctggctatctctcccacgcacgttaagtccatgcaacgactggccctcatcctccatcaactgggcagatatagcctcgccgagaagattcttagggatgccgttcaggtgaactctactgcacatgaagtgtggaacgggctgggcgaagtgctacaggctcagggtaacgacgcagctgccacagagtgctttctgacggcactcgaactcgaagcctcctcacccgctgtgccattcacaatcattccacgggtgctgtag

SEQ ID NO: 331299 - DNA, 1719 bp, Artificial Sequence
  derived and/or modified sequence
atcccagaggctctggggtatgtccgccaagctcttcagcttcaaggtgacgatgccaactccctgcacctccttgccctcctgctgtcagcacagaagcattaccatgacgctctgaacatcatcgacatggccctgagtgaatacccagaaaatttcatactactgttttccaaagtgaagttgcagtcactctgccgaggcccggacgaggcactgctgacttgtaagcacatgctgcagatatggaaatcctgctacaacctcaccaaccccagtgattctggacgtgggagcagcctcttagatagaaccattgctgacagacgacagcttaatacaattactttgccagacttcagcgatcccgagacaggcaactctccagaagcatactttcatggttttccttcccttttttcagttagctccgtccatgccacatcggtagcagcctcaagagtggagcaggcactgtcggaagtggcttcgtctctgcagagcagtgcccctaagcagggcccgctgcacccctggatgacgctggcacagatctggctccatgcagctgaagtctatatcggcatcgggaagcctgcagaagccacagcctgtacccaagaagctgccaacctcttcccaatgtcccacaatgtcctctacatgcgcggccagattgctgagctccggggaagcatggacgaggcgcggcggtggtatgaagaggccttagccatcagccccacccacgtgaagagcatgcagcgactggccctgatccttcaccagctaggccgctacagtctggcggagaagatcctccgggacgcggtgcaggtgaactcgacagcccacgaggtctggaacgggctgggcgaggtcctccaagctcagggcaacgatgcggcggctacggagtgcttcctgacagccttggagctggaggccagcagccccgccgtgcccttcaccatcatcccccgcgtgctctgagcaggcgcctgccagcctcacctgccgctcaggcctcagaggccctgccgggcaccagggcttgtgccatcgccccaaggggatgaatctgccacactgaggccagggacgagtgttcagtgggccacagtgaaccaaccaaaccaaccccgaatcatcgctctcgccatgtgcgtttctcttgttttttttgccagcccaatggtagtttctgaacctattgacattgttcaaaatggatcatgtgccatattttgttagttgacatctgagttttcagtaaaatgattatggaattaatcagcaaatgtagaagaatatattcaaagttaaaattcagtggcagcacagattatttttatcagagctgtaaagaaaacaactgtccttttctccccaccacccctcctgccccactttggcccagaaaccaaatgtgaacttcctgtctcccacctcagcactagtccatgccaggacaccagctgacaatttcttggttttactgtcaataattgtaccatgtgatcaattactgtcctcacttagaacaaagcctgagtccgagaatatttatattttaccaatatatgcctgttacaagagaaggaaatatgagttatttaagtttaacttttttatgtgaattcagagtttatttatcgagggaaatatgtacaaagaagcttcaaatggaatatttaccgacattccttatacatgaca

SEQ ID NO: 331300 - protein, 20 aa, Artificial Sequence
  derived and/or modified sequence
IIGGRESRPHSRPYMAYLQI

SEQ ID NO: 331301 - protein, 20 aa, Artificial Sequence
  derived and/or modified sequence
TAAHCWGSNINVTLGAHNIQ

SEQ ID NO: 331302 - protein, 20 aa, Artificial Sequence
  derived and/or modified sequence
RRENTQQHITARRAIRHPQY

SEQ ID NO: 331303 - protein, 20 aa, Artificial Sequence
  derived and/or modified sequence
HPQYNQRTIQNDIMLLQLSR

SEQ ID NO: 331304 - protein, 20 aa, Artificial Sequence
  derived and/or modified sequence
RVRRNRNVNPVALPRAQEGL

SEQ ID NO: 331305 - protein, 20 aa, Artificial Sequence
  derived and/or modified sequence
RPGTLCTVAGWGRVSMRRGT

SEQ ID NO: 331306 - protein, 20 aa, Artificial Sequence
  derived and/or modified sequence
DTLREVQLRVQRDRQCLRIF

SEQ ID NO: 331307 - protein, 20 aa, Artificial Sequence
  derived and/or modified sequence
GSYDPRRQICVGDRRERKAA

SEQ ID NO: 331308 - protein, 21 aa, Artificial Sequence
  derived and/or modified sequence
FKGDSGGPLLCNNVAHGIVSY

SEQ ID NO: 331309 - protein, 27 aa, Artificial Sequence
  derived and/or modified sequence
GKSSGVPPEVFTRFVSSFLPWIRTTMR

SEQ ID NO: 331310 - protein, 15 aa, Artificial Sequence
  derived and/or modified sequence
CTVAGWGRVSMRRGT

SEQ ID NO: 331311 - protein, 223 aa, Artificial Sequence
  derived and/or modified sequence
IIGGRESRPHSRPYMAYLQIQSPAGQSRCGGFLVREDFVLTAAHCWGSNINVTLGAHNIDRRENTQQHITARRAIRHPQYNQRTIQNDIMLLQLSRRVRRNRNVNPVALPRAQEGLRPGTLCTVAGWGRVSMRRGTDTLREVQLRVQRDRQCLRIFGSYDPRRQICVGDRRERKAAFKGDSGGPLLCNNVAHGIVSYGKSSGVPPEVFTRVSSFLPWIRTTMR

SEQ ID NO: 331312 - protein, 158 aa, Artificial Sequence
  derived and/or modified sequence
MYIETSRPRLEGEKARLLSPVFSIAPKNPYGPTNTAYCFSFFYHMYGQHIGVLNVYLRLKGQTTIENPLWSSSGNKGQRWNEAHVNIYPITSFQLIFEGIRGPGIEGDIAIDDVSIAEGECAKQDLATKNSVDGAVGILVHIWLFPIIVLISILSPRR

SEQ ID NO: 331313 - DNA, 2184 bp, Artificial Sequence
  derived and/or modified sequence
atggtttcatttaggctgtcgaacaagacagcttctccctccatcaaactcctggtagacgaccccatcgttgtcaacccaggagaagccatcacactggtctgtgtgacaactggaggggagcctgctccgtcactcacctgggtacggagcttcggcaccctgcctgagaaaactgtcctgaacggcgggactcttacaataccagcaattacatctgatgacgccgggacctactcctgcattgccaacaacaatgttggtaatcctgccaagaaatcgacaaatatcattgtgagagccctgaagaaagggcggttctggataacccccgacccatatcacaaggatgataatatacagattgggagggaagtgaaaataagttgtcaggtggaagcagttcccagtgaggaactcaccttctcttggtttaaaaatggaaggcctttgcgaagtagtgaacgaatggtgattacccaaactgacccggacgtaagccccgggaccacgaatctcgacattatcgacctgaaatttactgacttcggcacctacacgtgcgtagccagtctgaaaggaggagggatctctgacatatccatagacgtgaacatttcaagcagtaccgtgcccccgaatttgactgtgcctcaggaaaagagcccactggtaactcgagagggggacaccatcgagctgcagtgccaggtcactggaaagccaaagcccattatactatggtcccgcgccgataaagaggtggctatgcctgacggatctatgcagatggagtcctatgatgggaccctcagaatcgtcaatgtgtcgcgggaaatgtcaggaatgtatagatgccagacatcccaatataacgggttcaatgtcaagccgcgcgaagctttagtgcagttaatcgtccaatacccacccgccgtggagcctgcctttttggaaatccgccaggggcaagatcggagcgtgactatgtcttgccgtgtgttgcgagcatatcctatccgagtgctgacttatgagtggcggctcgggaacaagctcttacggacaggccagtttgatagtcaggaatacaccgaatacgccgtaaaaagtctgtctaacgaaaactatggggtgtacaactgttcaatcatcaacgaggccggggccggacgttgtagcttcctggtcaccggcaaagcgtatgcgccagagttttactatgatacttataacccagtgtggcagaaccgccatagggtgtacagctacagcctgcagtggacccagatgaatccggatgctgtcgaccgaattgttgcataccgtctggggatccgacaggcaggccagcaaagatggtgggagcaggagataaagataaacgggaacatccagaagggagagcttataacatataacctgactgagttaataaaaccagaagcttatgaagtgcggctgacccctctgaccaagttcggtgaaggcgactccactatccgggtgataaagtattctgccccagtcaatcctcatctgagggagtttcactgtgggttcgaagatggcaatatttgcttattcacccaggatgataccgacaactttgattggacaaagcagtctacagccacaagaaacacgaaatacaccccaaatacaggcccaaatgccgaccgatctggatccaaagagggtttttatatgtacattgaaacatctagacctcgcctagagggagaaaaggcgagactgcttagccccgtgttcagcattgcacctaagaacccgtatggcccaacaaatacagcctactgtttttcctttttctatcatatgtacggacagcacatcggcgtgttgaacgtatatctacgcttaaaagggcaaacaacaatcgagaatcctctgtggtcctcctcggggaataagggacagcgatggaatgaggcacacgtgaatatctacccaatcacaagcttccagttaatatttgaggggatacggggcccagggatcgagggcgacattgctatcgacgacgtgtctatcgctgagggagaatgtgccaaacaggatcttgccaccaaaaattcagtagacggcgcagtgggcatactcgtgcatatttggctgtttccgatcattgtgctgatctctatcctgtcccctcgccgctag

SEQ ID NO: 331314 - DNA, 2184 bp, Artificial Sequence
  derived and/or modified sequence
atggtctccttccgcctctctaacaagaccgcttcccccagcatcaagcttctcgtggacgaccctattgtcgtcaatcctggcgaggctatcacacttgtgtgtgtgaccaccggaggcgagccagcccctagcttgacctgggtgcgaagcttcggtaccttgccggaaaagacagtcctgaacggaggcactctcaccatcccagcaatcaccagcgacgatgcgggcacctattcttgcattgcaaataacaacgtaggaaacccagctaaaaagagcaccaacattattgtgagggccttaaagaagggcaggttttggattacgcctgatccatatcataaggatgataacattcagatcggtcgggaagtaaaaatcagctgccaagttgaggctgtcccatctgaggaactgaccttttcttggtttaagaacggccgccccctgcgatcctcagagcgtatggttatcactcagacggaccccgatgtcagtccaggcaccacgaacctggatataatcgatctaaaatttacagattttggtacatacacatgtgtggcttcactaaagggtggggggattagtgatatttccatagacgttaacatcagttcttcaacagttccaccgaatctcaccgtgccacaggagaaaagcccgctggtgacacgcgaaggcgataccatagaactccagtgccaggtgacaggcaaacctaagcccatcatcctctggtcccgcgctgataaagaggttgccatgccagacggctcaatgcagatggaatcttatgacggtacccttcgtatcgtcaatgtcagcagggaaatgtcaggcatgtatcggtgccaaacttcacaatataatggcttcaacgtgaaaccccgggaggcattagttcagctgattgtccagtaccctccggctgtcgaaccagcctttcttgagattaggcaggggcaggaccggagcgttacaatgtcctgtagggtgttaagggcatatcccattagggtgctgacatatgaatggcgcctcggaaataagctcctccgcaccggacagttcgactcacaagagtatactgaatacgccgtaaaatccctctccaacgaaaattatggggtgtataactgtagcattatcaatgaggccggtgcagggcgttgtagctttctagtgacaggcaaagcatatgctccggaattctattacgacacgtacaatcctgtctggcaaaataggcatcgtgtgtattcctacagcttacagtggactcagatgaatcccgatgccgtcgataggatcgttgcgtacagactgggtattagacaagctggccagcaaaggtggtgggagcaagagatcaagatcaatggaaatatacaaaagggagagctcattacctataatttgacggagcttataaaaccggaggcctacgaagtgcgactgactcctctgaccaaattcggggagggcgattcgacaatccgagtcatcaagtattctgcccccgtcaatccccatctgagggagttccactgcggattcgaggatggcaatatctgcctgttcacgcaggatgacacagataactttgattggaccaagcagtccacggcaaccaggaatacaaaatatactcctaacacaggaccgaatgctgaccggtctggttctaaagaggggttttatatgtacatcgaaaccagtcgcccacgcctagaaggcgaaaaggcccgcctgctctccccagtcttcagcattgctccaaagaatccctatggcccaacaaatacagcatattgcttctcattcttctaccacatgtacggccaacatatcggagtcctgaacgtctatctgcggctgaagggtcagacgaccattgagaaccctctgtggagttctagtggcaacaaaggacaacgctggaacgaagcccatgtcaatatttaccccattacgagcttccagctgattttcgagggtatccgcggcccgggaattgagggcgacatagcaattgatgacgtcagcatagccgagggagaatgcgcaaagcaggacctggccaccaagaactccgtggacggcgctgtcggcattctggtgcatatatggctgtttcctataattgtgttaatctccattttatctcctcgcagatag

SEQ ID NO: 331315 - DNA, 2184 bp, Artificial Sequence
  derived and/or modified sequence
atggtgtccttccggctgagcaacaagacagccagccccagcatcaagctgctggtggatgaccccatcgtggtgaaccctggagaggccatcaccctggtgtgtgtgaccaccggcggggagcccgcccccagcctgacctgggtgcgcagctttggcaccctgcctgagaagacagtgctgaatggaggcaccctgaccatcccagccatcaccagtgatgatgctggcacctacagctgcatcgccaacaacaacgtgggcaacccagccaagaagagcaccaacatcatcgtgcgggccctgaagaagggccgcttctggatcaccccagacccctaccacaaggatgacaacatccagatcggccgggaggtgaagatcagctgccaggtggaggccgtgcccagcgaggagctgaccttctcctggttcaagaatggccggcccctgcggagcagcgagaggatggtgatcacccagacagatcctgatgtgtccccaggcaccaccaacctggacatcatcgacctgaagttcacagactttggcacctacacctgtgtggccagcctgaagggcggcggcatcagtgacatcagcattgatgtgaacatcagcagcagcacagtgccccccaacctgactgtgccccaggagaagagccccctggtgacccgggagggggacaccatcgagctgcagtgccaggtgacaggcaagcccaagcccatcatcctgtggagcagagctgacaaggaggtggccatgccagatggctccatgcagatggagagctatgatggcaccctgagaattgtgaatgtgtcccgggagatgagcggcatgtaccgctgccagaccagccagtacaacggcttcaacgtgaagccccgggaggccctggtgcagctgattgtgcagtaccccccagctgtggagcccgccttcctggagatccggcagggccaggacagatctgtgaccatgagctgccgggtgctgcgggcctaccccatccgggtgctgacctatgagtggaggctgggcaacaagctgctgaggacaggccagtttgacagccaggagtacacagaatatgctgtgaagagcctgagcaatgaaaattatggagtgtacaactgcagcatcatcaatgaggccggggccggccgctgcagcttcctggtgacaggcaaggcctatgcccctgagttctactatgacacctacaaccctgtgtggcagaacagacaccgggtgtacagctacagcctgcagtggacccagatgaacccagatgctgtggacagaattgtggcctaccgcctgggcatccggcaggccggccagcagcgctggtgggagcaggagatcaagatcaatggaaacatccagaagggggagctgatcacctacaacctgacagagctgatcaagccagaggcctatgaggtgcggctgacccccctgaccaagtttggagagggggacagcaccatccgggtcatcaagtacagcgcccctgtgaacccccacctgcgggagttccactgcggctttgaagatggcaacatctgcctcttcacccaggatgacacagacaactttgactggaccaagcagagcacagccaccaggaacaccaagtacacccccaacacaggccccaatgctgacaggagcggcagcaaggagggcttctacatgtacatcgagaccagccggccccggctggagggggagaaggcccggctgctgagccctgtgttcagcatcgcccccaagaacccctacggccccaccaacacagcctactgcttctccttcttctaccacatgtatggccagcacatcggcgtgctgaatgtgtacctgcggctgaagggccagaccaccatcgagaaccccctgtggagcagcagcggcaacaagggccagcgctggaatgaggcccacgtgaacatctaccccatcaccagcttccagctgatctttgagggcatccggggccctggcatcgagggggacatcgccattgatgatgtgtccattgctgaaggagaatgtgccaagcaggacctggccaccaagaacagcgtggatggagctgtgggcatcctggtgcacatctggctgttccccatcatcgtgctgatcagcatcctgagccccaggaggtag

SEQ ID NO: 331316 - DNA, 2965 bp, Artificial Sequence
  derived and/or modified sequence
tcgagcatctggttattcaagctcctcccacggttcgtattgtgcactcaggcttggcctgtaacattgaagaggagcgctactccgaaagggtctacactatccgggaaggagaaacccttgagttgacttgtctagtcacaggacatccacgtccacagatcaggtggaccaaaacagcaggaagtgcctctgacagattccaagactcaagtgtcttcaatgagactttgaggattacaaatattcagcgacaccaaggaggccggtattactgtaaagcagagaatggcttggggtctccagcgataaagtcaatcagagtggatgtatactatttggatgatccagtagtaactgttcatcaaagtataggtgaagctaaagaacaattttactatgagagaacagtgttcctccggtgtgttgccaattccaatcctcctgttcggtatagctggagacgtggccaggaggtcttgctgcaaggatctgataaaggagttgagatttatgaaccattctttacccagggtgaaacaaagatcttaaaactaaagaatcttcgacctcaggactatgctaattatagctgcattgcttcagtgaggaatgtatgtaatattcctgataagatggtgtcgtttagactgtccaataaaacagcatcaccgtcaattaaactcttggtggatgatcctatagttgtaaatcctggagaggccataacattagtatgtgttacaacaggaggagagcctgcaccttctctcacctgggtcaggtcctttgggactctgcctgaaaagactgttttgaatggaggaactttgaccatacctgccatcacctcagatgatgctggtacttacagctgcattgccaataataatgtgggaaaccctgcaaaaaagtccaccaacatcattgtgagagcattaaaaaaaggacgattttggatcacaccagatccttatcacaaagatgacaacatccagattggccgtgaggtgaaaatatcttgccaagtagaagctgttccttctgaggagctaacatttagttggtttaaaaatggtcgtccattaagaagttctgagcggatggtcattacacagactgatcctgatgtctctccgggaacaacaaacttggacatcattgatttaaaattcacggattttgggacgtacacatgtgtagcatctctgaagggaggaggaatatctgatatcagtatcgatgttaatatatccagcagcacagttccacccaatctgactgttccacaggaaaaatcaccattggtcaccagagaaggagacacaatagaactgcaatgtcaagtaactggcaaacctaaaccaatcatcctttggtctagagcggataaagaagttgcaatgcctgatggatcaatgcaaatggagagttatgatggaacactgaggattgtgaatgtatctagggaaatgtcaggaatgtacagatgtcagaccagccaatacaatggatttaacgtgaaaccaagggaagccttggtgcagctcatcgttcagtatccccctgcagtggaaccagcattcttggaaatccggcaaggacaggatcgaagtgtcactatgagttgcagagtactgagagcctatccaatacgggtgctgacctatgagtggcgcttgggcaataaattattacggacgggtcaatttgactctcaggaatacacagagtacgctgtgaagagtctttccaatgaaaactatggggtttataactgtagcatcataaatgaagctggagctgggagatgcagctttcttgttacaggaaaggcctatgctccagaattctattatgatacctacaatccagtatggcagaacagacaccgtgtttattcttacagtctacagtggacacagatgaatcctgatgcagtggatcggattgttgcataccggttgggcatcaggcaggctggacagcagcgctggtgggagcaggagattaaaataaatgggaatattcaaaagggagaattaattacatataacttgacagagctaattaaaccagaagcttatgaagtccgactgactcctctcaccaaatttggtgaaggagattcaacaattcgtgtgatcaaatatagtgctcctgtaaatcctcatttgagagaatttcattgtggatttgaagatggtaatatttgtttgttcactcaagatgatacagataattttgactggacaaagcaaagtacagcaacaagaaatacaaaatatactcctaatacaggacctaatgctgaccgtagtggctccaaagaaggtttttatatgtacattgagacatcacgacccagattggaaggcgaaaaggctcgacttctcagccctgttttcagcatagctcccaaaaacccttatggacccacaaacactgcatattgtttcagcttcttttatcacatgtatggacaacatataggtgtcttaaatgtttatctacgtttgaaagggcaaacaacaatagagaatccactgtggtcttcaagtgggaataaaggacaaagatggaatgaggctcatgttaatatatacccaattacttcatttcagctcatttttgaaggtatccgaggtcctggaatagaaggtgacattgctattgatgatgtatcaattgcagaaggagaatgtgcaaaacaagacctagcaactaagaattccgttgatggtgctgttgggattttggttcatatatggctttttcccattatcgtcctcatctctatcttaagtcctcgaaggtgaccttatcctggcagaggctataaaagattcaccaggcactggcatgaagaaagagtctttgtaaatggacattgaacaaacaaactaccaaagattcctccactgactactgactcaaaaataaaataataaaaacaaattttttt

SEQ ID NO: 331317 - DNA, 5239 bp, Artificial Sequence
  derived and/or modified sequence
gaaaaaaacaaacaaacaaaaaaaatcaccattccttttaatagcttgagcctgtaccagaatgataagtggaaattagtcctcaaagtaacctcagctgtttcattattgtgtgcctcgagcatctggttattcaagctcctcccacggttcgtattgtgcactcaggcttggcctgtaacattgaagaggagcgctactccgaaagggtctacactatccgggaaggagaaacccttgagttgacttgtctagtcacaggacatccacgtccacaggtggaccaaaacagcaggaagtgcctctgacagattccaagactcaagtgtcttcaatgagactttgaggattacaaatattcagcgacaccaaggaggccggtattactgtaaagcagagaatggcttggggtctccagcgataaagtcaatcagagtggatgtatactatttggatgatccagtagtaactgttcatcaaagtataggtgaagctaaagaacaattttactatgagagaacagtgttcctccggtgtgttgccaattccaatcctcctgttcggtatagctggagacgtggccaggaggtcttgctgcaaggatctgataaaggagttgagatttatgaaccattctttacccagggtgaaacaaagatcttaaaactaaagaatcttcgacctcaggactatgctaattatagctgcattgcttcagtgaggaatgtatgtaatattcctgataagatggtgtcgtttagactgtccaataaaacagcatcaccgtcaattaaactcttggtggatgatcctatagttgtaaatcctggagaggccataacattagtatgtgttacaacaggaggagagcctgcaccttctctcacctgggtcaggtcctttgggactctgcctgaaaagactgttttgaatggaggaactttgaccatacctgccatcacctcagatgatgctggtacttacagctgcattgccaataataatgtgggaaaccctgcaaaaaagtccaccaacatcattgtgagagcattaaaaaaaggacgattttggatcacaccagatccttatcacaaagatgacaacatccagattggccgtgaggtgaaaatatcttgccaagtagaagctgttccttctgaggagctaacatttagttggtttaaaaatggtcgtccattaagaagttctgagcggatggtcattacacagactgatcctgatgtctctccgggaacaacaaacttggacatcattgatttaaaattcacggattttgggacgtacacatgtgtagcatctctgaagggaggaggaatatctgatatcagtatcgatgttaatatatccagcagcacagttccacccaatctgactgttccacaggaaaaatcaccattggtcaccagagaaggagacacaatagaactgcaatgtcaagtaactggcaaacctaaaccaatcatcctttggtctagagcggataaagaagttgcaatgcctgatggatcaatgcaaatggagagttatgatggaacactgaggattgtgaatgtatctagggaaatgtcaggaatgtacagatgtcagaccagccaatacaatggatttaacgtgaaaccaagggaagccttggtgcagctcatcgttcagtatccccctgcagtggaaccagcattcttggaaatccggcaaggacaggatcgaagtgtcactatgagttgcagagtactgagagcctatccaatacgggtgctgacctatgagtggcgcttgggcaataaattattacggacgggtcaatttgactctcaggaatacacagagtacgctgtgaagagtctttccaatgaaaactatggggtttataactgtagcatcataaatgaagctggagctgggagatgcagctttcttgttacaggaaaggcctatgctccagaattctattatgatacctacaatccagtatggcagaacagacaccgtgtttattcttacagtctacagtggacacagatgaatcctgatgcagtggatcggattgttgcataccggttgggcatcaggcaggctggacagcagcgctggtgggagcaggagattaaaataaatgggaatattcaaaagggagaattaattacatataacttgacagagctaattaaaccagaagcttatgaagtccgactgactcctctcaccaaatttggtgaaggagattcaacaattcgtgtgatcaaatatagtgctcctgtaaatcctcatttgagagaatttcattgtggatttgaagatggtaatatttgtttgttcactcaagatgatacagataattttgactggacaaagcaaagtacagcaacaagaaatacaaaatatactcctaatacaggacctaatgctgaccgtagtggctccaaagaaggtttttatatgtacattgagacatcacgacccagattggaaggcgaaaaggctcgacttctcagccctgttttcagcatagctcccaaaaacccttatggacccacaaacactgcatattgtttcagcttcttttatcacatgtatggacaacatataggtgtcttaaatgtttatctacgtttgaaagggcaaacaacaatagagaatccactgtggtcttcaagtgggaataaaggacaaagatggaatgaggctcatgttaatatatacccaattacttcatttcagctcatttttgaaggtatccgaggtcctggaatagaaggtgacattgctattgatgatgtatcaattgcagaaggagaatgtgcaaaacaagacctagcaactaagaattccgttgatggtgctgttgggattttggttcatatatggctttttcccattatcgtcctcatctctatcttaagtcctcgaaggtgaccttatcctggcagaggctataaaagattcaccaggcactggcatgaagaaagagtctttgtaaatggacattgaacaaacaaactaccaaagattcctccactgactactgactcaaaaataaaataataaaaacaaatttttttaagcactggggataaaaagacatcatggaagtataacttattccagactaaacataaaagataatcttgacctgagtagagaagagaccttcaggtgcttttgtggctaaaaagattacagcgtcatctggttgaactctggaaaaaaaaaaaaaaatgaaaaaaagaaaaaaaaaagagctatagaaatccttgtcaaagcacaaagtcatggctggttttgtttcaaatgaatagtttgcttgttaccatggaaacctaatggcctgccaacaaaaacctcactgtaaacagggtacgtgaagagctggcatttattttccttacgagaaggttttcgtagagaattaaataaatgtaggcccttttacctttggctgttacccttccttgaaaataacccgaactcagaattatttaaagcattcatgtttctccccaccttatccccatcccacctttattattattatttttctcccatggctaagctagataactgtatgctgtctctttttgcatgcactactatccaggatggtaaacctgggcttacatgttacacaggcttatcggagtttgcttgcggccacttgaacacccaaactacgtcatctgttccaatgaagaaaccaaaccaccatcttttataaattgccatggaaaccaagtgccttcaatgaaacaagcctgaataattttcaactcagaagcttgcactgctaagagtggtttgtgtaaaactattttataaacaaactacagagcctaaatgtgcaaattacaggcaagacaacaaagccgcttctgaagaagaaaggaccgaagctgctgcgtaagcccatgcagacaagatatttgttgtttaacctcctagacagccatggcctttcggcttattgtccattagaaaatcacttccattgagaccagacatggagcaacactttttttcttccaggttattaaatgggtcaaccagagcaaaaggttattaagaatacttagtgcagaaggtggtaaaacacaaaagtgatttttttactctaacctccatttgaaatgaaattggccctagctttagagggaacaagaaaatgtttgggattgcagtgcatactaactctacagtggaactgggcctgaaaaatctggctttattctaaactctgagggtaatatgcctctgccctttagtcagactctgtgcaaattgtgaaatattattttattattttaccaagattataaaaacacttttacaaaaaaacaaaaacctgtaaaaataattttgagctacctgacgacaaatcatatctttaaccagccagttttccaatgcattgtaaatttcacttaaacctgttggttatgaaaatttgaagatcattttccttaaattatctcagcttttaacttcatttaaaaagacttttgtctaagaagaatattattattatatgttctttcaacaccccaggattaaaaaaactgattatgcaagcaattggaatataagtattaaattatagcatttgcaaatattaatataaaagcacaacaaaatgtagtggaaaatgacaaagcttgttttttaaaacaattctgtagaaatgtttgtgcaaattcagtaattcaacttaaaatataattttacagctatgttcaataaagcctctttccaggtaaggtatgacaagcagtatgtgtgtttgttgagcaatgttcacttatcactaaaatgaaattagttatacaatttattggttaccatgggataaatcttcagtgctccacataccttaatgtctgcagaaagaaattttaataggaactccctgatgcactcccctatattgtaatacatgcagaaagcagttaaacctttgaaggtaaaatatgaaacatatatgaacctggaatttaatgtctattttcagtcagttcaaaaggggaccagtttgaatatttaggtagtgatggaattgatctgaaccaagtcctttaaattaaacataataaacaaatgagtttcataacttatttgaatgaattagacatcttaaaattttttcagagtttcacagtaacccatatactttatcagaccaaagagattcaagtacacaatatctggggcatttcttttacgttttacaaaa

SEQ ID NO: 331318 - DNA, 2184 bp, Artificial Sequence
  derived and/or modified sequence
atggtgagcttccggctgagcaacaagaccgccagccccagcatcaagcttttggtggacgatcctatcgtggttaacccaggtgaggccatcacactggtgtgcgtgaccacaggcggagaaccagctccaagcctgacatgggtgcgatccttcggaaccctccctgagaagactgttcttaatggtggcacacttaccatcccagctattacatcagacgatgctggaacttatagctgtatcgcgaataataatgttgggaatccagccaagaaaagcacaaacatcattgttcgcgctcttaaaaagggaaggttctggatcacaccagacccataccacaaggatgacaacatccagatcggaagagaggtgaagatcagctgccaagtggaagcggtgccgtcggaggagctcaccttttcatggttcaagaacggccgccctctgcggagttcagagcgcatggtgatcacgcaaacggatcccgatgtgagtccaggcacaacaaacctggacataatcgatctgaaattcactgatttcggaacttatacctgtgttgctagcctgaaaggaggaggtatctctgatataagtatcgatgttaatatctcaagcagcactgtgccacctaatctgaccgttcctcaggaaaaatcaccgttagtgacaagggagggtgatacaattgagctccagtgccaggtgacagggaaaccaaagccaatcatcctttggagtagagcagataaggaagtggccatgcctgacggatctatgcagatggagagctacgacggcaccctgcgcatagttaacgtcagtagggaaatgtctggaatgtatcgatgtcagacctcccagtataatgggttcaatgtaaaacccagagaagctctggtgcagctgattgtccagtacccccccgccgtggagcctgctttcctagaaattcggcaggggcaggacagatctgttacgatgtcatgccgcgtactgagggcctaccctatccgcgttctgacctacgaatggcgcctcggcaataagcttctcaggaccggccaattcgattcgcaagaatataccgagtacgccgttaaaagtctgagcaatgagaattacggcgtgtacaattgcagcattatcaatgaggcgggcgcaggccgctgcagtttccttgtgaccgggaaagcatacgctccggagttttactatgacacttataaccccgtatggcagaatcggcatcgtgtgtactcttactctctccaatggacccagatgaatccagacgccgtcgacagaatcgtcgcctacagactcggcattcgccaggcgggacaacaacggtggtgggaacaagagataaagataaatgggaacatccagaaaggcgagctgattacatataacctgactgagctcattaagcccgaagcatacgaggttcgtctgacccctctgacaaagtttggcgaaggggactccactattcgggtgatcaaatattctgcccctgttaatccccatcttcgcgagtttcattgtgggttcgaggacggaaatatctgcctcttcacccaggatgacacagacaactttgactggactaagcagtctacagcaaccaggaacacgaagtatactcccaacaccggtccaaacgctgacaggagtggatctaaggaggggttctacatgtacattgagaccagcaggccccgcctggagggggaaaaagcccgactcctgagccctgtcttctccatcgctcccaaaaatccatacggaccaacgaacactgcctactgttttagcttcttttaccacatgtacggccaacatataggggtgcttaacgtgtacctccgtcttaaaggccagactacgatagaaaaccctctatggtcatcttctgggaacaagggccagaggtggaacgaggcgcatgttaacatctatcccatcaccagtttccagctcattttcgagggtattcggggccctgggattgagggggacattgctatcgatgatgtgtccatcgcagagggcgaatgcgccaagcaagatctcgccactaagaacagcgttgacggcgcagtgggaatactagtacatatctggttatttccaattatagtgttaatttccattctgtctccacgacgttag

SEQ ID NO: 331319 - DNA, 2184 bp, Artificial Sequence
  derived and/or modified sequence
atggtgagcttccggctgagcaacaagaccgccagccccagcatcaagcttcttgtagacgatcccatcgttgtgaaccctggcgaagccataactcttgtatgtgtgacaaccggtggcgaacctgcgccgtccctaacatgggtcaggagttttgggaccttgcctgagaaaactgtgcttaacggtgggaccttgaccataccagccatcacctccgatgacgctggcacgtattcctgtattgccaacaacaacgtcgggaatcctgctaaaaaaagtaccaatatcatcgttcgcgctttgaaaaaggggaggttctggattacccccgacccttaccacaaggatgataacatccagatcggaagagaggttaagattagctgtcaggtcgaggctgttccttctgaagagctgaccttctcatggttcaaaaatggacggccgttaagatccagtgagcgaatggtgattactcagaccgatcctgacgtgagtcctggaacaacaaacttggacatcattgacttgaaattcactgattttggaacctacacatgcgtcgcttctttaaaaggaggcggcatctccgacatctcgatcgatgtcaatatttccagctctaccgtgccgccgaacctcactgtgccacaggaaaaatcccccctggtgacaagagagggcgatactatcgaacttcaatgccaggtgacaggtaagccaaagcccattattttgtggagccgggccgacaaggaggtcgcaatgcctgacgggagcatgcagatggaaagttatgatggcactctcagaatcgtgaatgtgtcccgagagatgtctggtatgtatcgatgtcaaacctcacaatacaacgggtttaatgtgaagcccagagaagccctggttcagttgatcgtccagtacccacccgccgtggagccagcttttctcgagatacgccagggtcaggatcggtcagtgactatgtcttgcagagtgcttcgggcataccccatacgggtgctgacatacgaatggcgactgggcaacaagctgcttcgcacaggccagtttgatagccaggagtatactgagtacgcggtcaaatccctaagcaacgagaactatggtgtttataactgtagtatcatcaatgaggccggagccggcagatgttctttccttgttactggaaaggcttacgctccagagttttactacgacacttataatccagtgtggcaaaataggcaccgggtgtatagttacagcctgcaatggacccagatgaacccagacgctgtggataggattgtcgcttacagactaggtattaggcaggcgggacaacagcggtggtgggaacaggaaattaagattaatggcaatatccagaaaggagagcttattacctacaatctgactgagctgatcaagcctgaagcgtacgaggtgaggctcacgcctctgacaaaattcggggagggggattcaaccatcagggtgatcaagtactctgctccagtcaatccacaccttcgcgagtttcattgcggctttgaggatggcaatatttgtctcttcactcaagacgacacggacaacttcgactggacgaaacaatcaaccgccactcggaacactaagtacacccctaacaccggcccaaatgccgataggagtggttccaaggaagggttttacatgtacattgagacgtccagaccaaggctggaaggcgagaaggcccggttgttgtctcctgtgttcagtatagcccctaagaatccctacggcccgaccaacaccgcctactgctttagtttcttttaccatatgtatggccagcacatcggtgtgctcaacgtatatctgagacttaaagggcagaccacaatcgagaacccgctttggagctccagcggaaataaggggcaaagatggaatgaagcacacgtgaacatctaccccatcacctctttccagctaatatttgaaggcatccggggccctgggattgaaggtgacatcgccatcgatgacgtctccatagccgaaggcgagtgtgctaagcaggatctggccactaagaatagcgtggatggagccgtcgggatactggttcacatctggctgtttccaattatcgtgctgattagtatcttatccccgagacgctag

SEQ ID NO: 331320 - DNA, 2184 bp, Artificial Sequence
  derived and/or modified sequence
atggtatcctttcgtctgtccaataaaaccgcttcccccagtattaagctgttggtggacgaccctatcgtggtgaatccaggcgaggcaattacccttgtatgcgtgacaactggcggagaacccgcaccctcactcacctgggtacggagcttcggtaccttgccagaaaaaacggtgctcaatggaggtaccttaacaatccctgccatcaccagtgacgatgctggaacatattcatgcatcgccaacaataatgtgggcaatcctgcaaagaaaagcacaaatatcatagtgagggcactgaaaaagggcagattctggatcacacccgacccataccacaaggacgacaacatacaaatcgggagagaggtgaaaatcagttgccaggtagaagccgtgcctagcgaggagcttaccttttcatggttcaagaacggaaggccattgcgctcttctgagcggatggtgatcacgcagactgaccccgacgtgagcccgggaactacgaatctggacattatcgaccttaagtttacagatttcggtacatacacatgcgtggctagtcttaagggcggaggcatcagtgatatctcgatcgacgtgaatatctcatcgtctacggtaccacctaatctgaccgtgcctcaggagaaatctcccctggtgaccagggaaggagatacgatagagttgcagtgccaggtaactgggaagcccaaaccaattattctctggtctagggccgacaaagaggtggccatgcccgatggcagtatgcagatggaatcttacgatggaacactccgcattgtgaacgtgagcagggaaatgagcgggatgtatcgctgtcagactagccagtataatggcttcaatgttaaacccagggaagccctggtgcagctgattgtccaatatccacctgccgtagagccagccttcctggaaattaggcaaggccaagaccgatccgtgacaatgagttgcagagtattacgcgcttaccctattagggttttgacatacgaatggcgccttgggaacaagttactgagaactggacagtttgactctcaggagtacaccgaatacgcagttaaaagtttgagcaacgaaaattatggcgtctacaattgtagtattatcaatgaggcaggtgccggacgatgttccttcctggtaacaggaaaggcctacgcccctgagttctattacgacacttataatcccgtctggcagaatcgccatagagtgtacagttattctctccagtggacccaaatgaaccccgatgctgtggacaggatcgtggcttatcggctcggcataagacaagctggccagcagcggtggtgggagcaggaaataaaaatcaacggcaatatccagaagggcgaattaataacttataatcttactgaactgatcaagcctgaggcatatgaggtacgcctcacacccctcactaaattcggagagggagacagcacaatccgggtgattaagtacagtgcccctgtgaaccctcacctgagagaatttcactgcggatttgaagacggcaacatctgcttgtttacgcaggacgacactgataattttgattggaccaaacagagtaccgctaccagaaacactaagtacacccccaatacagggccaaacgccgatagatcgggcagtaaggagggattttacatgtacattgagaccagcaggccccgattagagggggagaaggcccgattgctgtcccccgttttcagcattgctccgaaaaacccatacggcccaaccaatacagcatattgcttcagcttcttctatcatatgtacgggcagcacattggtgttctgaatgtctatttgcggttgaaaggacagaccacaattgagaaccccctctggtcctcttccggtaataagggccagcgctggaacgaagcacacgtgaacatttatcccataacaagtttccagctgattttcgaagggatcagaggaccaggtatcgagggcgatattgcaattgacgacgtgagcattgctgagggagagtgtgctaagcaggatctggcaacaaaaaatagtgtggatggcgcagtggggatcctggttcatatctggctgtttcctatcatagtgttaatctctatactttcgccccgacgctag

SEQ ID NO: 331321 - DNA, 2184 bp, Artificial Sequence
  derived and/or modified sequence
atggtgagctttcgcctgagcaacaagactgcctctccttctatcaagcttttggttgatgaccccatcgtcgtgaacccaggagaagccattactctggtttgcgtaacaaccggaggggaacctgcgccatccctgacttgggtgcggtcatttggaacgttgccagaaaaaactgtgctgaatggaggaaccctgactatccccgctattaccagtgatgacgccggaacctatagttgtattgccaacaacaatgtcggcaatcccgcaaaaaaaagtaccaatatcattgtgcgagccctcaagaagggacgtttttggatcaccccagacccatatcacaaagacgacaatatacagatcggccgtgaagtcaagatctcatgccaagtggaagcagtcccatcagaggagctgacattcagctggtttaagaacggtcggcctctgcgtagtagcgaacgtatggtcattactcagaccgatcctgatgtcagtccaggcactaccaatctcgatataatcgacctcaagtttacagacttcggcacctatacatgtgttgcatcactaaaagggggtggcatttctgatataagtattgatgttaacatctcctcaagcaccgtgcccccaaacttgaccgtaccacaggaaaagagcccattggtgacaagggagggcgataccatagagctgcagtgccaggtgacagggaagcctaagcctatcatcctctggtcacgggcagacaaagaggttgcaatgccggatggaagcatgcagatggagtcatacgacggaactttgcgcattgtcaacgtttcacgagagatgtctggaatgtatcgatgccagacctcgcagtacaacggatttaacgtcaagcctcgcgaagctctcgtgcaactgattgtgcagtatcctcctgccgtggagcccgcatttctggagattcgccagggccaagatcgatctgtcactatgtcctgtcgggtacttagggcctacccgattagggttttgacttacgaatggaggctcgggaataagttacttcgaactgggcagtttgactcccaagagtacactgagtacgctgttaaatcattatccaacgagaactatggggtgtacaactgctcaataatcaatgaggcaggcgctggaagatgtagcttcctggtgactgggaaagcatatgcccctgagttttattacgacacttacaatccagtgtggcagaacaggcaccgagtgtactcctactcccttcagtggactcagatgaaccctgacgctgtggaccggatcgtggcctaccgccttggaatcaggcaagccggacagcagcggtggtgggagcaggaaatcaagatcaatggcaacatccagaagggggaactgattacctataatcttaccgagttgatcaaacccgaggcgtatgaggttaggctaacacctctcacaaaatttggcgaaggagattctacaatcagagtgatcaaatattccgctccagtgaacccccacttgcgagagttccactgcggcttcgaggatggaaatatttgtctgtttactcaagatgacacagacaattttgattggaccaaacaatcaaccgccacaaggaacactaagtataccccaaatactgggcctaacgctgacagatcaggaagcaaagaagggttttacatgtatatagagacttcaaggccccgtttagaaggggagaaagctcgcctcctgagtccagtgttttccatcgcaccaaagaacccatacggaccaaccaatactgcttactgtttttcatttttctatcacatgtacggccagcacatcggagtcctcaatgtctatctgagactgaaaggtcagacaaccatagaaaatccactgtggtctagctccggaaataagggtcaacggtggaatgaggctcatgtaaacatatacccaattacaagctttcagctgatttttgagggtatccggggtcccggaatcgaaggtgacatcgccatcgacgacgtgtccatcgcagagggcgaatgtgcaaagcaggatctggcaactaaaaatagtgtggatggtgcggtcggcatcttggtgcacatttggctctttcctatcatcgtgctgatctccatcctgtccccacgtaggtag

SEQ ID NO: 331322 - DNA, 2184 bp, Artificial Sequence
  derived and/or modified sequence
atggtgagcttcagactgagcaacaagaccgccagccccagcatcaagctgctggtggacgaccccatcgtggtgaaccccggcgaggccatcaccctggtgtgcgtgaccaccggcggcgagcccgcccccagcctgacctgggtgagaagcttcggcaccctgcccgagaagaccgtgctgaacggcggcaccctgaccatccccgccatcaccagcgacgacgccggcacctacagctgcatcgccaacaacaacgtgggcaaccccgccaagaagagcaccaacatcatcgtgagagccctgaagaagggcagattctggatcacccccgacccctaccacaaggacgacaacatccagatcggcagagaggtgaagatcagctgccaggtggaggccgtgcccagcgaggagctgaccttcagctggttcaagaacggcagacccctgagaagcagcgagagaatggtgatcacccagaccgaccccgacgtgagccccggcaccaccaacctggacatcatcgacctgaagttcaccgacttcggcacctacacctgcgtggccagcctgaagggcggcggcatcagcgacatcagcatcgacgtgaacatcagcagcagcaccgtgccccccaacctgaccgtgccccaggagaagagccccctggtgaccagagagggcgacaccatcgagctgcagtgccaggtgaccggcaagcccaagcccatcatcctgtggagcagagccgacaaggaggtggccatgcccgacggcagcatgcagatggagagctacgacggcaccctgagaatcgtgaacgtgagcagagagatgagcggcatgtacagatgccagaccagccagtacaacggcttcaacgtgaagcccagagaggccctggtgcagctgatcgtgcagtacccccccgccgtggagcccgccttcctggagatcagacagggccaggacagaagcgtgaccatgagctgcagagtgctgagagcctaccccatcagagtgctgacctacgagtggagactgggcaacaagctgctgagaaccggccagttcgacagccaggagtacaccgagtacgccgtgaagagcctgagcaacgagaactacggcgtgtacaactgcagcatcatcaacgaggccggcgccggcagatgcagcttcctggtgaccggcaaggcctacgcccccgagttctactacgacacctacaaccccgtgtggcagaacagacacagagtgtacagctacagcctgcagtggacccagatgaaccccgacgccgtggacagaatcgtggcctacagactgggcatcagacaggccggccagcagagatggtgggagcaggagatcaagatcaacggcaacatccagaagggcgagctgatcacctacaacctgaccgagctgatcaagcccgaggcctacgaggtgagactgacccccctgaccaagttcggcgagggcgacagcaccatcagagtgatcaagtacagcgcccccgtgaacccccacctgagagagttccactgcggcttcgaggacggcaacatctgcctgttcacccaggacgacaccgacaacttcgactggaccaagcagagcaccgccaccagaaacaccaagtacacccccaacaccggccccaacgccgacagaagcggcagcaaggagggcttctacatgtacatcgagaccagcagacccagactggagggcgagaaggccagactgctgagccccgtgttcagcatcgcccccaagaacccctacggccccaccaacaccgcctactgcttcagcttcttctaccacatgtacggccagcacatcggcgtgctgaacgtgtacctgagactgaagggccagaccaccatcgagaaccccctgtggagcagcagcggcaacaagggccagagatggaacgaggcccacgtgaacatctaccccatcaccagcttccagctgatcttcgagggcatcagaggccccggcatcgagggcgacatcgccatcgacgacgtgagcatcgccgagggcgagtgcgccaagcaggacctggccaccaagaacagcgtggacggcgccgtgggcatcctggtgcacatctggctgttccccatcatcgtgctgatcagcatcctgagccccagaagatag

SEQ ID NO: 331323 - DNA, 303 bp, Artificial Sequence
  derived and/or modified sequence
atgggcaccagcagcatcttcctgtgcgtgctgttcctgtgcggcgctctcgggctgaccatgagcccagccagggggcgcctcagatgttatatctgcggatttaccaagccttgccaccctgtgcctactgaatgcagagatgacgaggcatgcgggatctcaataggaacctccggccgcacactagttcagtggccctttagccggcgattgcccacgagcattcacccagctttccccgtcgcaccagcttccgcctgcctctttcatcccacggaccaaagcgagataaccgagtag

SEQ ID NO: 331324 - DNA, 477 bp, Artificial Sequence
  derived and/or modified sequence
atgtacatcgagactagccgtccaagactggagggagagaaggccaggcttctgagccctgtcttttctatagcgcccaaaaacccttacggccctaccaacaccgcctactgtttcagtttcttttaccacatgtacggccaacacatcggagttctgaacgtatacctgcgactgaaaggacagacgactatcgagaatccgctgtggtcctcctccggcaataagggccaaaggtggaatgaggctcatgttaacatctaccccatcacatcatttcaactgatttttgagggaatccgaggccccgggatcgagggcgacattgcaatcgacgacgtgagcatcgctgaaggcgaatgcgcgaaacaggacctggctaccaaaaattccgtggacggagctgtgggaatcctggtccatatctggctgtttccgattatcgtcctgataagcattctgtcccctcgccgatag

SEQ ID NO: 331325 - DNA, 477 bp, Artificial Sequence
  derived and/or modified sequence
atgtacatcgagaccagccggccccggctggagggggagaaggcccggctgctgagccctgtgttcagcatcgcccccaagaacccctacggccccaccaacacagcctactgcttctccttcttctaccacatgtatggccagcacatcggcgtgctgaatgtgtacctgcggctgaagggccagaccaccatcgagaaccccctgtggagcagcagcggcaacaagggccagcgctggaatgaggcccacgtgaacatctaccccatcaccagcttccagctgatctttgagggcatccggggccctggcattgaaggagacatcgccattgatgatgtgtccattgctgagggggagtgtgccaagcaggacctggccaccaagaacagcgtggatggagctgtgggcatcctggtgcacatctggctgttccccatcatcgtgctgatcagcatcctgagccccaggaggtag

SEQ ID NO: 331326 - DNA, 2416 bp, Artificial Sequence
  derived and/or modified sequence
aaaataaatgggaatattcaaaagggagaattaattacatataacttgacagagctaattaaaccagaagcttatgaagtccgactgactcctctcaccaaatttggtgaaggagattcaacaattcgtgtgatcaaatatagtggagaatttcattgtggatttgaagatggtaatatttgtttgttcactcaagatgatacagataattttgactggacaaagcaaagtacagcaacaagaaatacaaaatatactcctaatacaggacctaatgctgaccgtagtggctccaaagaaggtttttatatgtacattgagacatcacgacccagattggaaggcgaaaaggctcgacttctcagccctgttttcagcatagctcccaaaaacccttatggacccacaaacactgcatattgtttcagcttcttttatcacatgtatggacaacatataggtgtcttaaatgtttatctacgtttgaaagggcaaacaacaatagagaatccactgtggtcttcaagtgggaataaaggacaaagatggaatgaggctcatgttaatatatacccaattacttcatttcagctcatttttgaaggtatccgaggtcctggaatagaaggtgacattgctattgatgatgtatcaattgcagaaggagaatgtgcaaaacaagacctagcaactaagaattccgttgatggtgctgttgggattttggttcatatatggctttttcccattatcgtcctcatctctatcttaagtcctcgaaggtgaccttatcctggcagaggctataaaagattcaccaggcactggcatgaagaaagagtctttgtaaatggacattgaacaaacaaactaccaaagattcctccactgactactgactcaaaaataaaataataaaaacaaatttttttaagcactggggataaaaagacatcatggaagtataacttattccagactaaacataaaagataatcttgacctgagtagagaagagaccttcaggtgcttttgtggctaaaaagattacagcgtcatctggttgaactctggaaaaaaaaaaaaaaatgaaaaaaagaaaaaaaaaagagctatagaaatccttgtcaaagcacaaagtcatggctggttttgtttcaaatgaatagtttgcttgttaccatggaaacctaatggcctgccaacaaaaacctcactgtaaacagggtacgtgaagagctggcatttattttccttacgagaaggttttcgtagagaattaaataaatgtaggcccttttacctttggctgttacccttccttgaaaataacccgaactcagaattatttaaagcattcatgtttctccccaccttatccccatcccacctttattattattatttttctcccatggctaagctagataactgtatgctgtctctttttgcatgcactactatccaggatggtaaacctgggcttacatgttacacaggcttatcggagtttgcttgcggccacttgaacacccaaactacgtcatctgttccaatgaagaaaccaaaccaccatcttttataaattgccatggaaaccaagtgccttcaatgaaacaagcctgaataattttcaactcagaagcttgcactgctaagagtggtttgtgtaaaactattttataaacaaactacagagcctaaatgtgcaaattacaggcaagacaacaaagccgcttctgaagaagaaaggaccgaagctgctgcgtaagcccatgcagacaagatatttgttgtttaacctcctagacagccatggcctttcggcttattgtccattagaaaatcacttccattgagaccagacatggagcaacactttttttcttccaggttattaaatgggtcaaccagagcaaaaggttattaagaatacttagtgcagaaggtggtaaaacacaaaagtgatttttttactctaacctccatttgaaatgaaattggccctagctttagagggaacaagaaaatgtttgggattgcagtgcatactaactctacagtggaactgggcctgaaaaatctggctttattctaaactctgagggtaatatgcctctgccctttagtcagactctgtgcaaattgtgaaatattattttattattttaccaagattataaaaacacttttacaaaaaaacaaaaacctgtaaaaataattttgagctacctgacgacaaatcatatctttaaccagccagttttccaatgcattgtaaatttcacttaaacctgttggttatgaaaatttgaagatcattttccttaaattatctcagcttttaacttcatttaaaaagacttttgtctaagaagaatattattattatatgttctttcaacaccccaggatt

SEQ ID NO: 331327 - DNA, 477 bp, Artificial Sequence
  derived and/or modified sequence
atgtacatcgagaccagccggccccggctggagggcgagaaggccagactgttgtcaccggtcttttccatagcccccaaaaatccgtatggcccgacgaatacagcatactgtttcagtttcttttatcacatgtacggccagcatattggtgtgctgaatgtgtatcttcggttaaaaggccagaccaccattgaaaaccccctgtggagttcttcgggaaacaagggtcagcggtggaacgaggcccacgtaaatatttacccaattacaagcttccagctcatcttcgagggcatacgcggccctggcatcgagggggacatagccatcgacgatgtaagcatcgctgagggcgaatgtgccaagcaagatctggccacaaagaatagcgtggacggcgcagtcggcatactcgtccacatctggctatttcccatcattgtgcttatcagcatcctttctccaagaaggtag

SEQ ID NO: 331328 - DNA, 477 bp, Artificial Sequence
  derived and/or modified sequence
atgtacatcgagacatcccggcctcgactcgagggggaaaaagctcgccttctgtctccagtatttagcatcgcccctaagaatccttacggaccaactaacacagcctattgcttttcgtttttttaccatatgtatggccagcatatcggggtcttaaacgtgtacctgcggctcaaaggccaaactactatagaaaatcccctctggtctagctcgggcaataagggtcagaggtggaatgaagcacatgttaatatctatcctattaccagcttccagctgattttcgagggcatccgcggaccagggatcgagggcgacatagctatcgacgacgtctccatcgctgagggagaatgtgccaagcaggatcttgctactaaaaactccgtcgacggggctgtggggatcttggtgcatatatggctttttcctatcatcgttctcatatctattcttagcccacggagatag

SEQ ID NO: 331329 - DNA, 477 bp, Artificial Sequence
  derived and/or modified sequence
atgtacatcgagaccagcagacccagactggagggcgagaaggccagactgctgagccccgtgttcagcatcgcccccaagaacccctacggccccaccaacaccgcctactgcttcagcttcttctaccacatgtacggccagcacatcggcgtgctgaacgtgtacctgagactgaagggccagaccaccatcgagaaccccctgtggagcagcagcggcaacaagggccagagatggaacgaggcccacgtgaacatctaccccatcaccagcttccagctgatcttcgagggcatcagaggccccggcatcgagggcgacatcgccatcgacgacgtgagcatcgccgagggcgagtgcgccaagcaggacctggccaccaagaacagcgtggacggcgccgtgggcatcctggtgcacatctggctgttccccatcatcgtgctgatcagcatcctgagccccagaagatag

SEQ ID NO: 331330 - protein, 187 aa, Artificial Sequence
  derived and/or modified sequence
MAYEVYYGLTEEEGAVPAEHQVAMAAARALGDVTVLGSLLLQHLLHFSTPGLVLRSLGALTGPQLLSLAQSPAGSHVLDAILTSPSVTRKLRRRVLQNLKGQYVALACSRHGSRVLDAIWSGAALRARKEIAAELGEQNQELIRDPFGHHVARNVALTTFLKRREAWEQQQGAVAKRRRALNSILED

SEQ ID NO: 331331 - DNA, 2679 bp, Artificial Sequence
  derived and/or modified sequence
attccatgtttcccatcagctgtcccctgtgtttgaggagctgagccctgtcttggaagctgtattggcccagggccacccaggggtagtcattgccctggtgggggcctgtcgcagagttggggcctaccaagccaaggtcctacagctcttgttggaggcattccactgtgcagagccctcatcccggcaagtggcctgtgtgcctctctttgccactttgatggcttatgaggtgtactatggactgacggaggaggagggggcagtgcctgcagagcaccaggtggcaatggccgcagccagagccttgggggatgtgacagtccttgggtctctactgctccagcatctgctgcacttctccactcctggtcttgtacttcgaagtctgggtgccttgacgggaccacagcttctgtcccttgcccaaagtcccgctggctctcatgtgctcgatgccatcctgaccagcccctctgtgacgcgcaagctgcgccgccgtgtgctgcagaacctaaagggacaatatgtggctctggcctgtagtcgccatggcagccgtgtgctagatgccatctggagtggagcagccttgagggcccggaaggaaattgctgctgagcttggggagcagaaccaggagctgataagagaccctttcggccaccatgtggctcgaaatgtggccttgactaccttcctaaagcggcgagaggcttgggaacagcagcagggtgcggtggccaagcggaggcgggcattgaactccatacttgaagactgaggctttggatctgggactgggtgttgatgggggagggcaaaatggggtatccaccccatccctttcctggtttaaattggagtcagaagtcttagtggtaaatatttgatatttttattggaaatgtttttgttagtttgaggggaagggtatgaagacagatctcaaggtaaagtcagagagggctgtcatcagtatgctggggagtttagggacaggaggcattggtaggggattagatgtagcagcagtcaggctgggatcaagatgcctgggggacatcttgatcttggcctttcagggcaagtgggaggccagaaaggtggctaggaaagaacagcattcttcaggtaagggtatagacttgggatgtgaggcgttatgctgaaaggttctgtcacgaggggatcagaggacagtggggaaattgggtgggttatctagcctgtactgtctgcaggtcctgaaatttgatgctgtcatagtctttgcagtgggtcggttggaatgattctgggggcagaagctcagagccccttagtaggaatggaggcggcccttctgctgccactgctcagccccctccactgcatgacgaagggtggaggaaattcccagcaacatatggcccaggccttgcagcagtgtggaggtccaacgaaggagctccctgaatggcagagacaagaggaaatcagatgatttggaaaacttgggaggaagccatcaagctgggagatgaggactttccacaagcaagagctaactaggggtaggtgggtgcaagaggacgaattatggggactatccaactgtaggggatggggcagtatgacatgttgatttctgacctgagtactttctttgggccaagtccttgaaagtcacaactcatagagtagagcccgtagaatgtggctttgacattcaggctgccaaagaggtctcgagggttttgcttgtacacgtcaaaggtgaatcgggcgatgtccttgctgtgcttgggcctctcccgtcccaggccatatgacagcactccactctgtaggacacccttgtcagtgcagtagatcctcataccagacacccaccactaatctccatcagcactgggtcagaccctccctcgcttggactttctgtccactgtgtgacatccttgacaattccacaactcctcctgcacctggtccccaggatcagggttaagctagagaggaagcccgggaaagctctaaaggacaggcattggaagcagccccagtataggcctcttacccttgtagggctccagctctgaccagactgcaacaccatcaggcacgtgtcatcctccagcagctggaagaagtcctcactgtccactgcagttccatcctcctctagcaccagggttagcactccattcagcagtagggtctccaatgcctgcccaatggcaagaagcaagaagggcaggtcttatcccatgccccttccctctttagctgcctatatcccctaaaggtggagggtagagcggagggttagcagtcacctgagtaagtcactggggttcagagctgagaggtactccatggtggaccggagagttccttccctggaacttctgggctgggtggttctctcctgtgctggggctttagtggtgttttctgttacaaacctgggatctcagcccaggacaaggtgggaatgagtcaagcctggactctggcccccctgcctggccagtaagaagggcaaagtccaaggggagggatgagggaggggccagatggggtcctggaggaagaattgcctggcaaaagccattggagcttgtatgtgtgtctttggtgatgacatgtgttgtgagggtagatgggaaccatgtaaaaggatgaaatgtg

SEQ ID NO: 331332 - DNA, 564 bp, Artificial Sequence
  derived and/or modified sequence
atggcctacgaggtgtactacggcctgaccgaggaggagggcgccgtgcccgccgagcaccaggtggccatggccgccgccagagccctgggcgacgtgaccgtgctgggcagcctgctgctgcagcacctgctgcacttcagcacccccggcctggtgctgagaagcctgggcgccctgaccggcccccagctgctgagcctggcccagagccccgccggcagccacgtgctggacgccatcctgaccagccccagcgtgaccagaaagctgagaagaagagtgctgcagaacctgaagggccagtacgtggccctggcctgcagcagacacggcagcagagtgctggacgccatctggagcggcgccgccctgagagccagaaaggagatcgccgccgagctgggcgagcagaaccaggagctgatcagagaccccttcggccaccacgtggccagaaacgtggccctgaccaccttcctgaagagaagagaggcctgggagcagcagcagggcgccgtggccaagagaagaagagccctgaacagcatcctggaggactag

SEQ ID NO: 331333 - DNA, 564 bp, Artificial Sequence
  derived and/or modified sequence
atggcttatgaagtgtactatggacttactgaggaggaaggggccgtaccagccgagcatcaggtagccatggcagctgcgagagctctgggagacgttacagtgcttggcagcctgctgttgcagcatctgctgcacttctccacaccggggttggtgctgaggtccttgggcgcgttaaccggtcctcagctgttatctctggcgcagtctcccgcaggcagccacgtgttggatgccattctcaccagtccgagcgttacccgcaaactaagaaggcgagtcctgcagaacttgaagggccaatatgtcgccttggcctgttcacgtcacggctcaagggtgctcgacgccatctggtctggggccgctctgagagctcgaaaggagattgccgctgagttgggcgaacaaaaccaggagctcatccgcgaccctttcggacaccacgtggcaagaaacgttgcactgactaccttcttaaaaagaagggaggcctgggaacagcagcagggcgccgttgcaaaaaggcggagagccttgaatagcatcttagaggattag

SEQ ID NO: 331334 - DNA, 564 bp, Artificial Sequence
  derived and/or modified sequence
atggcctatgaggtgtactacggcctgacagaggaggagggcgctgtgcctgctgagcaccaggtggccatggccgccgcccgggccctgggagatgtgacagtgctgggcagcctgctgctgcagcacctgctgcacttcagcaccccaggcctggtgctgcggagcctgggcgccctgaccggcccccagctgctgagcctggcccagagccctgctggcagccacgtgctggatgccatcctgaccagccccagcgtgaccaggaagctgcggaggagagtgctgcagaacctgaagggccagtatgtggccctggcctgcagcagacatggcagccgggtgctggatgccatctggagcggggccgccctgcgggccaggaaggagattgctgctgagctgggggagcagaaccaggagctgatccgggaccccttcggccaccacgtggccagaaatgtggccctgaccaccttcctgaagagaagagaggcctgggagcagcagcagggcgctgtggccaagagaagaagagccctgaacagcatcctggaggactag

SEQ ID NO: 331335 - DNA, 564 bp, Artificial Sequence
  derived and/or modified sequence
atggcctacgaggtgtactacggcctgaccgaggaggagggcgccgtgcctgccgaacatcaggtagctatggccgcagcacgagctctgggcgacgttacggtgctgggctcattacttctgcagcacttgttgcatttttcaacaccagggctggtgctgcgctctctcggggcgctcaccggaccccagctactgtcactggcacagtcgccagcaggctcccatgtcctcgacgctatcttgactagtccatctgtcacccgaaagctacggaggcgagttcttcaaaatcttaaaggacagtacgttgcactggcttgctcaaggcatggttcgcgggtcctagatgcaatctggagcggtgcggctttaagagctcggaaggagatcgctgccgaactgggagagcagaatcaagaactgattcgggatccctttggccatcatgtcgcacgaaatgtggcacttaccacttttctgaagcgaagggaggcctgggaacagcagcagggcgccgttgccaagagacgccgagcacttaatagtatcctggaagactag

SEQ ID NO: 331336 - DNA, 564 bp, Artificial Sequence
  derived and/or modified sequence
atggcctacgaggtgtattacggtttaactgaggaggaaggggctgtgcctgctgaacaccaggtggcgatggccgcagctagggccttaggtgacgttacggtgttggggagcctgctcttgcagcatctcctccattttagcacccctggccttgtacttagatctttgggcgcactaacagggccacagctcctctctctcgctcagtcccctgcaggcagccacgtgttggatgctattctgacttctccatctgtgactaggaaactgagacggcgagtgcttcaaaacctgaaaggacagtacgtggccctcgcttgttctcggcatggatctagggtgcttgatgcgatatggtctggcgctgctctgcgtgctaggaaggaaattgctgctgagttgggtgagcagaatcaggaactcatccgagacccttttgggcaccatgtggccaggaatgtcgctctgactaccttccttaagcgccgagaggcatgggaacagcagcagggagctgtagcaaaaaggagacgcgcattaaattcaattttagaggattag

SEQ ID NO: 331337 - protein, 550 aa, Artificial Sequence
  derived and/or modified sequence
MSAAWIPALGLGVCLLLLPGPAGSEGAAPIAITCFTRGLDIRKEKADVLCPGGCPLEEFSVYGNIVYASVSSICGAAVHRGVISNSGGPVRVYSLPGRENYSSVDANGIQSQMLSRWSASFTVTKGKSSTQEATGQAVSTAHPPTGKRLKKTPEKKTGNKDCKADIAFLIDGSFNIGQRRFNLQKNFVGKVALMLGIGTEGPHVGLVQASEHPKIEFYLKNFTSAKDVLFAIKEVGFRGGNSNTGKALKHTAQKFFTVDAGVRKGIPKVVVVFIDGWPSDDIEEAGIVAREFGVNVFIVSVAKPIPEELGMVQDVTFVDKAVCRNNGFFSYHMPNWFGTTKYVKPLVQKLCTHEQMMCSKTCYNSVNIAFLIDGSSSVGDSNFRLMLEFVSNIAKTFEISDIGAKIAAVQFTYDQRTEFSFTDYSTKENVLAVIRNIRYMSGGTATGDAISFTVRNVFGPIRESPNKNFLVIVTDGQSYDDVQGPAAAAHDAGITIFSVGVAWAPLDDLKDMASKPKESHAFFTREFTGLEPIVSDVIRGICRDFLESQQ

SEQ ID NO: 331338 - protein, 401 aa, Artificial Sequence
  derived and/or modified sequence
MLGIGTEGPHVGLVQASEHPKIEFYLKNFTSAKDVLFAIKEVGFRGGNSNTDITLEKYLFVMLKRSENQQTYLMNADVAERMSSTTVDSEERLLRGKALKHTAQKFFTVDAGVRKGIPKVVVVFIDGWPSDDIEEAGIVAREFGVNVFIVSVAKPIPEELGMVQDVTFVDKAVCRNNGFFSYHMPNWFGTTKYVKPLVQKLCTHEQMMCSKTCYNSVNIAFLIDGSSSVGDSNFRLMLEFVSNIAKTFEISDIGAKIAAVQFTYDQRTEFSFTDYSTKENVLAVIRNIRYMSGGTATGDAISFTVRNVFGPIRESPNKNFLVIVTDGQSYDDVQGPAAAAHDAGITIFSVGVAWAPLDDLKDMASKPKESHAFFTREFTGLEPIVSDVIRGICRDFLESQQ

SEQ ID NO: 331339 - protein, 243 aa, Artificial Sequence
  derived and/or modified sequence
MLSRWSASFTVTKGKSSTQEATGQAVSTAHPPTGKRLKKTPEKKTGNKDCKADIAFLIDGSFNIGQRRFNLQKNFVGKVALMLGIGTEGPHVGLVQASEHPKIEFYLKNFTSAKDVLFAIKEVGFRGGNSNTGKALKHTAQKFFTVDAGVRKGIPKVVVVFIDGWPSDDIEEAGIVAREFGVNVFIVSVAKPIPEELGMVQDVTFVDKAVCRNNGFFSYHMPNWFGTTKYVSLWYRSCALMNK

SEQ ID NO: 331340 - DNA, 1653 bp, Artificial Sequence
  derived and/or modified sequence
atgagcgccgcttggatcccagccctgggactgggagtctgcctcctgctgctccctggaccagccggctccgagggtgcggcacccatagccattacatgcttcacacgcggccttgatatcagaaaggagaaagccgatgtgctctgtccagggggctgccctctggaagagttctcagtgtatgggaacatcgtctatgctagcgtctcttccatatgtggtgctgccgtgcataggggcgtcatctcaaactccggcgggccagttcgcgtctacagcctgccaggccgcgagaattacagtagcgtcgatgccaacggcattcagtctcagatgttgagcagatggtctgcaagcttcaccgttacaaaagggaagtcctccacccaagaagcaaccggtcaggctgtgtctacagcacaccctccaactgggaagcgtctgaagaaaacacctgaaaagaaaaccggcaacaaggactgtaaagctgatatcgcattcctaatcgatggctcttttaatatcgggcaacggcggtttaatctacagaagaacttcgtcggcaaagtcgcactaatgctgggaattggaactgaagggccacacgttggacttgtgcaggctagtgaacacccaaaaatcgaattctacctgaagaatttcacttccgctaaggacgtactcttcgcgatcaaagaagttggattccgaggtggcaacagcaatacagggaaagccttaaagcacacagcccagaaattttttaccgttgatgcaggcgtgcggaagggaataccaaaggtcgtggtggtgtttatagatggttggccaagtgacgacatagaagaggctggtattgtggcgagagagttcggtgtgaacgtcttcattgtcagcgtcgctaagcctattcccgaggagttgggaatggtccaggatgttaccttcgttgataaggctgtatgtaggaataacgggttcttctcgtatcatatgcccaattggttcgggactaccaagtatgtgaaacctctggttcagaagctttgtacccacgaacaaatgatgtgcagcaagacctgctataatagtgtgaatatcgcattcttaatcgacggatcctcttccgtcggcgatagcaatttccggctaatgctggaattcgtcagtaacattgcaaagacattcgaaattagtgatattggagcgaaaatagccgcggtgcagttcacgtacgatcagcgcactgaattctcctttacagactactccaccaaggagaatgtcttggctgtcattagaaacatccggtacatgagtgggggtacagctaccggagatgcgatatcttttaccgtgcgcaacgtgttcgggccaatccgcgaaagcccaaacaagaacttcctggtgattgtgacagacggccagagttatgacgacgtgcagggtcccgccgctgccgcccatgacgctggaatcactattttctcagtgggcgtcgcttgggctccattggacgacctaaaggacatggcatccaaacctaaagaatctcatgccttttttactcgagagttcaccgggctggagcctattgtttctgatgtgattcgggggatctgcagagatttcctagagagccaacagtag

SEQ ID NO: 331341 - DNA, 1206 bp, Artificial Sequence
  derived and/or modified sequence
atgctgggcatcggtacagagggacctcacgtcgggcttgtgcaggcctccgagcacccaaagatcgaattttacttgaaaaatttcaccagtgcgaaggacgtgctgtttgccattaaggaagtcggattccggggtggcaattcaaataccgatatcaccctagagaagtacctcttcgtgatgctgaaacgttctgagaaccaacagacttatctcatgaacgccgacgtagccgagcggatgagctcgaccacagttgattctgaggagcgtctgctacggggtaaggccctcaagcacaccgcccagaagttctttacagtggatgccggcgtacgaaagggaatacctaaagtggtggtggtgttcatcgatggatggccatcggacgatatcgaggaagcaggcattgtggctcgagaattcggcgtgaatgtgttcattgtgtccgtggcaaaacctatccccgaggagttgggcatggtgcaggacgtgacatttgtggataaagccgtgtgtaggaacaacggcttcttctcgtaccatatgccaaattggtttggaactactaaatatgttaaacctttggtacaaaaactgtgtacacatgaacagatgatgtgtagtaagacctgctacaattctgtaaatatcgcctttttgatcgacggcagtagttctgtgggagactccaacttcagactgatgctagagttcgtaagtaatattgcaaagacctttgagatctctgatattggggctaagattgctgcagtgcagtttacatatgaccagaggacggaatttagtttcacagattattccactaaggagaacgtactcgccgtgataaggaacatccgctacatgagcggggggacggctacaggggatgcgatatcttttaccgtgaggaacgttttcggtcctatcagggagtccccaaataaaaacttcttggtgatagtcactgacggacagtcatatgatgacgtccagggacccgctgcagctgctcatgacgccggcatcacgatctttagcgtgggagtggcatgggcgccactcgatgatctgaaggatatggccagcaagcccaaggaatcccacgcatttttcaccagagagtttaccggactggagcccatcgtgtctgacgtgattcgaggcatttgccgggactttttggagtcccagcagtag

SEQ ID NO: 331342 - DNA, 1653 bp, Artificial Sequence
  derived and/or modified sequence
atgagtgccgcatggattcccgcacttggtctgggagtctgtctgctgctgcttccaggcccagcggggtccgagggcgccgcccccatcgccataacctgtttcacaagaggcctggatatcaggaaggagaaagctgacgtcctctgtccaggggggtgtcctctagaggaattctcagtctatgggaacatcgtgtatgcctccgtgtctagtatttgtggtgcagcggtccatcggggcgtgatctccaattctggtgggcctgtcagagtttacagtcttcccggcagagagaactacagtagcgtggatgcaaatggcatccaatcgcagatgctctcacgttggtccgcttcttttacggtgacgaagggaaagtcgtcgacacaagaggccactggtcaggctgtgagcacagcccacccacccacaggcaagaggctgaaaaaaacgcctgaaaagaagacagggaataaggattgtaaagctgatattgctttcctgattgatgggtccttcaatatcggccagcggagattcaatctgcagaaaaacttcgtcggcaaagtggcccttatgctgggcataggaacagaaggtccgcatgtgggtctcgtgcaggcatctgaacacccgaaaatcgagttctacttaaaaaactttactagtgcgaaagatgtcctgttcgctatcaaagaggtgggattccgcggtggaaactcaaacactgggaaagccctaaagcacactgcccaaaagttcttcaccgtggatgccggcgtgcgcaaaggaattccaaaagtggtggtcgtatttatcgatggctggccctctgacgatatagaagaagcgggcatcgtggcgcgggaatttggggttaatgttttcatagtctctgtagcaaagcccattcctgaggagctcgggatggtccaagatgtgacctttgtggacaaagctgtttgtcgtaataatggtttcttcagttaccatatgcctaattggttcggcaccaccaaatacgtgaagcccctcgtgcagaagctttgtacccacgagcagatgatgtgtagcaagacttgctataacagtgttaatatagccttcctcattgacggctcctcgagtgtgggggactctaactttcgactgatgctcgagttcgtgtccaacatagccaagacatttgaaatcagcgatataggagccaaaatcgcagccgtgcagtttacctatgaccagagaacagaattttcttttaccgactactccacgaaggaaaacgtgcttgccgtaatacgcaacatccggtacatgagtggaggcactgcaaccggcgacgctattagctttacggtcaggaatgtgttcggacctattcgggagtctccgaataaaaactttcttgtgatagtgactgacggtcaaagctatgatgatgtccagggcccagctgccgcagcccacgatgctggaataaccattttttccgtcggcgtggcctgggcccccttggatgatttgaaagacatggcatctaaaccaaaggagagccatgcattctttacaagggaattcacagggctggaaccgatagtatctgacgtgattcgcgggatatgccgcgacttcctcgaaagccagcagtag

SEQ ID NO: 331343 - DNA, 732 bp, Artificial Sequence
  derived and/or modified sequence
atgctgtctcgttggtcagcatctttcacagttaccaagggcaagagctctacacaggaggccacgggccaggcggtttcaaccgcgcacccacctacagggaaaagactgaagaaaacaccggagaaaaagactgggaacaaggattgtaaggccgacatcgccttcctgatcgatggttcctttaacatcggccaaagaaggttcaatctgcagaaaaacttcgtgggtaaagtcgccctgatgctcggaatcggaactgaagggccccacgtcggtctggttcaggcatctgaacacccaaaaatcgagttttacctgaaaaactttacatcagccaaggatgtactgttcgcaattaaggaggtcggttttcgggggggtaatagtaatactggcaaggcccttaagcacaccgcccagaaatttttcaccgtcgatgccggcgtcaggaaggggattcctaaagtggttgtagtgtttattgacgggtggccgagtgacgacatagaggaagcaggtattgtcgcgagggagtttggtgtcaacgtgttcatcgtctcagtagccaaacctatccctgaagaactcgggatggttcaagatgtcacctttgtggacaaagcggtttgcagaaacaatggattttttagctaccatatgccaaactggtttggcaccacgaagtacgtctcactgtggtaccgctcctgtgctctgatgaacaagtag

SEQ ID NO: 331344 - DNA, 1653 bp, Artificial Sequence
  derived and/or modified sequence
atgtctgctgcctggatcccagccctgggcctgggcgtgtgcctgctgctgctgcccggccctgctggcagcgagggcgccgcccccatcgccatcacctgcttcacccggggcctggacatcaggaaggagaaggcagatgtgctgtgccctgggggctgccccctggaggagttctctgtgtatggcaacatcgtgtatgcctctgtgagcagcatctgtggggctgctgtgcacagaggagtcatcagcaacagcggcggccctgtgcgggtgtacagcctgcccggccgggagaactacagctctgtggatgccaacggcatccagagccagatgctgagccgctggagcgccagcttcaccgtgaccaagggcaagagcagcacccaggaggccaccggccaggccgtgtccacagcccaccccccaacaggcaagaggctgaagaagaccccagagaagaagacaggcaacaaggactgcaaggctgacatcgccttcctgattgatggcagcttcaacatcggccagaggcgcttcaacctgcagaagaactttgtgggcaaggtggccctgatgctgggcattggaacagagggcccccacgtgggcctggtgcaggccagcgagcaccccaagattgagttctacctgaagaacttcaccagcgccaaggatgtgctgtttgccatcaaggaggtgggcttccggggcggcaacagcaacacaggcaaggccctgaagcacacagcccagaagttcttcaccgtggatgctggggtgaggaagggcatccccaaggtggtggtggtgttcattgatggctggcccagtgatgacatcgaggaggccggcatcgtggcccgggagtttggagtgaatgtgttcatcgtgtctgtggccaagcccatccctgaggagctgggcatggtgcaggatgtgacctttgtggacaaggctgtgtgcaggaacaacggcttcttctcctaccacatgcccaactggtttggcaccaccaagtatgtgaagcccctggtgcagaagctgtgcacccatgagcagatgatgtgcagcaagacctgctacaacagcgtgaacatcgccttcctgattgatggcagcagctctgtgggggacagcaacttccggctgatgctggagtttgtgagcaacatcgccaagacctttgagatcagtgacatcggggccaagattgctgctgtgcagttcacctatgaccagaggacagagttctccttcacagactacagcaccaaggaaaatgtgctggccgtcatccggaacatccgctacatgtctgggggcacagccactggagatgccatctccttcaccgtgagaaatgtgtttggccccatccgggagagccccaacaagaacttcctggtgattgtgacagatggccagagctatgatgatgtgcagggccctgctgctgctgcccatgatgctggcatcaccatcttctctgtgggcgtggcctgggcccccctggatgacctgaaggacatggccagcaagcccaaggagagccacgccttcttcacccgggagttcaccggcctggagcccatcgtgtctgatgtgatccggggcatctgccgggacttcctggagagccagcagtag

SEQ ID NO: 331345 - DNA, 1206 bp, Artificial Sequence
  derived and/or modified sequence
atgctgggcatcggcacagagggcccccacgtgggcctggtgcaggccagcgagcaccccaagattgagttctacctgaagaacttcaccagcgccaaggatgtgctgtttgccatcaaggaggtgggcttccggggcggcaacagcaacacagacatcaccctggagaagtacctgtttgtgatgctgaagagaagtgagaaccagcagacctacctgatgaatgctgatgtggccgagaggatgagcagcaccaccgtggacagcgaggagcggctgctgcggggcaaggccctgaagcacacagcccagaagttcttcaccgtggatgctggggtgaggaagggcatccccaaggtggtggtggtgttcattgatggctggcccagtgatgacatcgaggaggccggcatcgtggcccgggagtttggagtgaatgtgttcatcgtgtctgtggccaagcccatccctgaggagctgggcatggtgcaggatgtgacctttgtggacaaggctgtgtgcagaaataatggcttcttctcctaccacatgcccaactggtttggcaccaccaagtatgtgaagcccctggtgcagaagctgtgcacccatgagcagatgatgtgcagcaagacctgctacaacagcgtgaacatcgccttcctgattgatggcagcagctctgtgggggacagcaacttccggctgatgctggagtttgtgagcaacatcgccaagacctttgagatcagtgacattggagccaagattgctgctgtgcagttcacctatgaccagaggacagagttctccttcacagactacagcaccaaggaaaatgtgctggccgtcatccggaacatccgctacatgtctgggggcacagccactggagatgccatctccttcaccgtgagaaatgtgtttggccccatccgggagagccccaacaagaacttcctggtgattgtgacagatggccagagctatgatgatgtgcagggccctgctgctgctgcccatgatgctggcatcaccatcttctctgtgggcgtggcctgggcccccctggatgacctgaaggacatggccagcaagcccaaggagagccacgccttcttcacccgggagttcaccggcctggagcccatcgtgtctgatgtgatccggggcatctgccgggacttcctggagagccagcagtag

SEQ ID NO: 331346 - DNA, 732 bp, Artificial Sequence
  derived and/or modified sequence
atgctgagccgctggagcgccagcttcaccgtgaccaagggcaagagcagcacccaggaggccaccggccaggccgtgtccacagcccaccccccaacaggcaagaggctgaagaagaccccagagaagaagacaggcaacaaggactgcaaggctgacatcgccttcctgattgatggcagcttcaacatcggccagaggcgcttcaacctgcagaagaactttgtgggcaaggtggccctgatgctgggcattggaacagagggcccccacgtgggcctggtgcaggccagcgagcaccccaagattgagttctacctgaagaacttcaccagcgccaaggatgtgctgtttgccatcaaggaggtgggcttccggggcggcaacagcaacacaggcaaggccctgaagcacacagcccagaagttcttcaccgtggatgctggggtgaggaagggcatccccaaggtggtggtggtgttcattgatggctggcccagtgatgacatcgaggaggccggcatcgtggcccgggagtttggagtgaatgtgttcatcgtgtctgtggccaagcccatccctgaggagctgggcatggtgcaggatgtgacctttgtggacaaggctgtgtgcaggaacaacggcttcttctcctaccacatgcccaactggtttggcaccaccaagtatgtgtccctgtggtaccgcagctgtgccctgatgaacaagtag

SEQ ID NO: 331347 - DNA, 1653 bp, Artificial Sequence
  derived and/or modified sequence
atgagcgccgcctggatccccgccctgggcctgggcgtgtgcctgctgctgctgccaggacccgctgggtccgagggcgctgcacccatcgccataacatgcttcacccgtgggctcgatattcggaaggagaaggccgatgtgttgtgcccagggggttgtcccctcgaggagttctctgtgtatggtaatattgtttacgcttctgtttcaagcatatgtggcgcggccgttcacagaggagtgatttctaatagtggtgggcctgttcgggtatattccctgcctggccgtgagaactactcatctgtggatgcaaatggtattcaaagccagatgctgtcgaggtggtccgcatcattcactgtgactaaaggtaagtcctctactcaggaagccaccggtcaggctgtctccaccgcccatcctcctacgggcaagcgtttaaaaaagacacccgaaaaaaaaactggcaataaggattgtaaggccgatatcgccttcctgattgacggttcctttaatattgggcagcgacggtttaacctccagaaaaacttcgtgggaaaggtggcattgatgcttggtattggcacggaggggccacacgttggacttgttcaggcgtcagagcatcccaaaattgagttctacttgaaaaatttcacatcggcaaaggacgtcctgttcgctatcaaagaagtaggcttcagaggcggcaatagtaacaccgggaaggcgctgaaacatactgcacagaaattctttaccgttgacgcgggagtgaggaaaggcattcccaaagtcgttgtggtgtttatcgatggttggcctagtgacgacatagaggaggccgggatcgtggccagggaatttggcgtgaatgtattcatcgtttctgtggctaagcccatccctgaggagttggggatggtgcaggatgttacgtttgtcgataaggcagtctgcagaaataacggattcttttcgtatcatatgcctaattggttcggcaccactaagtacgtcaaacccctagtccagaagctgtgcacacacgagcagatgatgtgtagtaaaacttgctataactccgtgaacatagcgttccttatcgacggtagcagttccgttggtgattcgaacttccgcttgatgctggagttcgttagcaacatcgcaaagacattcgaaatttctgatattggggctaaaattgcggccgttcagttcacctacgatcaacgcacggaattcagctttaccgactacagcactaaagaaaacgtgctggcggtaattaggaatatcagatacatgtctggggggaccgctaccggggacgcgatcagctttaccgtgcgcaatgtgttcggcccaatccgggagtcacctaataagaactttctggtcatcgttacagatgggcagtcgtatgacgacgtgcagggcccagctgccgcggcacacgacgcaggaattactattttttctgtcggcgttgcctgggcgcctttagacgatctgaaggacatggccagcaagcccaaagagtcacacgctttctttactagggaattcacaggcctggagcccatcgtctcggacgtgattaggggcatatgtagagattttctggaaagccagcaatag

SEQ ID NO: 331348 - DNA, 1206 bp, Artificial Sequence
  derived and/or modified sequence
atgctgggcatcggcaccgagggcccccacgtgggcctggtgcaggcttccgaacaccccaaaatcgagttttatctgaaaaattttacatccgccaaagatgtactcttcgccataaaggaggtgggcttccgtgggggaaactccaataccgatatcacgctggagaagtatctgtttgtgatgcttaaacggagcgaaaaccagcagacatacctcatgaatgccgatgtggcggagagaatgagttccacaactgtcgatagtgaagagcgcctcctacggggaaaagcactgaagcacaccgcacagaagtttttcaccgtcgatgccggcgttaggaaggggattcctaaggtggtggtcgtgttcatcgatggctggccatctgatgatatcgaagaagccggaatcgtcgcacgagaatttggggtaaacgtctttatcgtttcagttgctaaacccatcccggaagagctcggaatggtccaagatgtcacatttgttgataaagccgtgtgtcggaacaatggttttttttcctaccatatgcccaattggtttggaaccactaaatacgttaagcccctagtgcagaagctctgtacacacgagcagatgatgtgttctaaaacatgctataattccgtgaacatcgcattcttaattgatggctcctcgtcagttggtgactcaaattttcggcttatgctggagttcgttagtaatattgctaaaactttcgagatctctgacattggtgccaagattgccgcagtgcaattcacatacgaccagcggaccgagttttctttcacagattactctaccaaggagaacgtcctggccgtaatcagaaacatcagatatatgtcaggcgggaccgccactggcgacgctattagttttaccgtgcggaacgtgtttggacctataagggagagcccaaataagaacttcctggtgatagtgaccgatggacaatcctatgatgacgtccagggcccagctgcagccgctcacgacgcagggataaccattttttctgtcggagtcgcatgggccccactggacgacttaaaagatatggctagcaaacccaaggaatcccatgcatttttcacacgggaattcaccggattagagccaattgtctccgatgtgattagaggcatctgccgtgacttcctggagtcccagcagtag

SEQ ID NO: 331349 - DNA, 1653 bp, Artificial Sequence
  derived and/or modified sequence
atgagcgccgcctggatccccgccctgggcctgggcgtgtgcctgcttcttctgcccggccctgctggaagcgagggtgccgctccaatcgccataacctgcttcactagaggcttggacatacggaaggagaaggcagacgtgctgtgcccagggggttgcccactggaagaattttcggtatacgggaatatcgtgtatgcctccgtgagcagcatctgcggtgccgccgtgcacaggggggtgattagtaactcaggtggcccagtgcgggtgtacagccttcctggtagagagaactattcaagcgtcgacgccaatggtatccagagtcagatgctgagccgctggagtgcctcattcactgtgacaaaaggtaaaagcagtacccaggaggctactgggcaggcagtgtccacggctcacccgcctactggcaagaggcttaaaaaaacgccagagaaaaagaccggcaataaggattgcaaggcggacattgcctttttaatcgatggctcattcaatataggtcagcggcgcttcaacctgcagaaaaacttcgtgggcaaagtcgctcttatgcttggtataggcaccgaggggccccatgttggcctcgtgcaggcctctgaacatcccaagatcgagttctatctaaaaaatttcacctcagctaaggatgtgctgttcgctattaaggaggtcgggtttagaggcgggaattccaacactggcaaagcactgaagcacacagcgcaaaaattctttacggtcgacgccggtgtgcgcaaaggaattcccaaagtcgtagtggtgttcattgatggctggccctccgatgatattgaggaggccgggatagtcgcacgggagttcggggtcaacgtgtttatcgtgtctgtggctaaaccaatccccgaggaactcggtatggtacaagacgtgacattcgttgataaggcagtgtgtcgaaacaatgggttcttcagctaccacatgccaaactggttcgggaccacaaaatatgtcaaacccctagtgcagaaactgtgcacccacgaacaaatgatgtgttctaagacttgctacaacagtgtaaacatagcctttcttatcgacggttcctcctccgtaggagacagtaattttcgactaatgctggagttcgtgagtaatatcgcgaaaacttttgagatctctgacattggggcgaaaatcgcagccgtgcaattcacctacgaccagcggaccgaatttagctttacagattactccacgaaagaaaatgtcctcgcagtcataaggaacatccgttatatgtctggcggaaccgctaccggcgatgctatttcattcactgttagaaatgtgtttggtcccatccgtgagtcgccgaataaaaactttctagtgatcgtcacagatggacagtcatacgacgacgtgcagggtcctgcagccgccgcccatgacgccggtatcacaatatttagcgtaggtgtggcatgggccccactggacgatctgaaggacatggcctctaaacccaaggagtcacatgctttctttactagggaattcacaggattagagccaattgtgtctgatgtcatcagagggatttgtcgcgacttcctggagtcccaacagtag

SEQ ID NO: 331350 - DNA, 732 bp, Artificial Sequence
  derived and/or modified sequence
atgctgagccggtggagcgccagcttcaccgtgaccaagggcaagagttccacccaggaggcgactggacaagctgtctctacagcccatccgccaacggggaaaaggctgaaaaagacacccgagaaaaagactggcaacaaagactgcaaggcagacatcgcatttctgatcgacggctcgtttaatatagggcagagacgatttaatctgcagaaaaactttgtagggaaggttgccctgatgctggggattggcacagaaggcccccacgttggacttgtgcaagcctcagagcatcccaagatagagttttacctaaaaaacttcacctctgcgaaggatgtgctgtttgccattaaggaggttggtttccggggaggtaactcaaacaccggaaaggccctgaaacacacagcacagaagttttttaccgtggacgcgggagttcgcaaaggaatccctaaagtggtggttgtgtttatcgacggctggccttctgacgatatcgaggaagccggcatcgttgccagggagttcggggtcaacgtgttcatcgtgagcgtagccaaacctataccagaggagcttggaatggtgcaagacgtgacatttgtcgataaagcagtgtgtaggaacaatggcttcttttcttatcacatgccaaattggtttgggactaccaagtatgtcagcttatggtatcggagttgcgccctcatgaataaatag

SEQ ID NO: 331351 - DNA, 1653 bp, Artificial Sequence
  derived and/or modified sequence
atgtccgccgcttggatccctgcacttggcctgggagtttgtctgctactgttgcctgggccagccggtagcgagggtgcggcacctattgcgattacctgttttaccaggggcttggatattaggaaggaaaaggctgacgtgctgtgtcccggtggttgtccacttgaggaattttcggtgtacggaaatattgtgtatgcctctgtgtcatccatatgtggtgccgctgtgcatcgaggggtgataagcaacagtgggggacccgtccgggtgtatagcctgcctggccgtgagaactacagctctgtagacgcgaatggaatccaaagtcagatgctcagtcgttggagcgcaagcttcacagtcaccaaaggcaagtctagtactcaagaagctaccggccaagccgtctcaaccgcccatcctccgaccggaaagcgactgaagaagacccctgagaaaaagaccgggaataaggattgtaaagcggacatcgcttttctcatagatggctctttcaacatcggccagcgacgttttaacctgcaaaagaatttcgtcggaaaggtggccttaatgctggggatcggcaccgaaggccctcatgtgggcctggtccaggccagcgagcaccctaagatagaattctatctcaaaaactttacgtcagcgaaggatgttctctttgccataaaagaggtgggtttccgtgggggaaactccaacacaggcaaagctctgaagcacactgcccagaagttctttactgtggatgccggagtgcgtaagggaatccccaaggttgttgtcgtgtttattgatgggtggcccagtgatgacatcgaggaagctgggatagtggcccgagaattcggggtgaatgtattcattgtgtccgtcgccaaaccgataccagaggaactgggaatggttcaggatgttacattcgtggacaaagccgtgtgcagaaataatggcttcttctcttatcacatgccaaattggttcggaacaacaaagtacgtgaagcccctggtgcagaaactgtgtacccatgaacagatgatgtgttcaaagacgtgctataacagcgtgaacatcgctttcttaattgatggctctagcagtgtgggcgactccaactttagactgatgctcgaatttgtatcaaacattgcaaaaaccttcgagatttctgacatcggcgctaagatcgccgcagtgcagtttacttatgaccagagaaccgagtttagttttaccgattattcaaccaaagaaaatgtcctcgccgtgatcaggaacatcaggtacatgagtggcggaaccgcaacgggggacgccatttcatttaccgttcggaatgtttttgggccaatccgggaaagcccaaacaagaatttcctagtgattgtgacagacggacaatcgtacgacgatgttcaaggacccgctgcagcagctcatgacgccggtatcacaatcttctcagtaggcgtagcttgggcgcctcttgatgacttaaaagatatggctagcaagccaaaagaaagtcacgcctttttcacgagagagtttaccggcctggagcctattgtttcggatgtgattcgcggtatatgtcgtgattttttggaatcccagcagtag

SEQ ID NO: 331352 - DNA, 1206 bp, Artificial Sequence
  derived and/or modified sequence
atgcttggcattggcacggaaggacctcacgttggcctagtacaggccagtgagcaccccaagatcgaattctatctaaagaactttacatctgccaaggatgtcttattcgcgatcaaagaggtaggattcaggggcggaaatagtaatacagatataacacttgaaaaatacctattcgtgatgctcaaaaggtcagagaatcagcagacatacctcatgaacgccgatgtcgctgagcgcatgagctccacaactgtagacagcgaggagcgcctactccgagggaaggctctgaagcatacagcacaaaagttttttacagtggatgccggagtgcggaagggcattccgaaggtcgtggtggtgttcattgatggatggcctagcgacgacatagaggaagccggaatcgttgcgagagagttcggtgttaatgtgttcatcgtgtccgtggcaaagccaatccccgaggaattaggcatggtgcaagacgtcactttcgtggacaaggccgtttgccgtaataatggctttttcagttaccacatgccgaactggtttggtaccaccaagtacgttaagcctctcgtgcagaaactctgtacccacgagcagatgatgtgttcaaagacatgttataatagcgtaaatatcgcctttctcatagatgggtcctcaagcgtaggagattccaacttcaggctaatgctcgagttcgtgtcaaatatagccaagaccttcgagatcagcgatataggcgctaaaatcgctgctgtgcagtttacatacgaccagcggaccgaatttagctttacagattactccaccaaggagaacgttttagcggtcattaggaacatccgctacatgagtgggggtacagcaacaggggatgcaatcagctttactgtgcgtaacgtcttcgggccaattagagaatccccaaataaaaattttttggtcatcgtgacagatggacagtcctatgacgatgtgcaggggccagccgctgctgctcacgacgccggtatcaccattttctccgttggggtggcatgggcgcctctggacgatctcaaggacatggcttcaaaacccaaggagtctcacgccttcttcacacgcgaatttacggggttggagcccatcgttagtgacgtgatccgcggaatttgtagagacttcctcgaaagccagcagtag

SEQ ID NO: 331353 - DNA, 1653 bp, Artificial Sequence
  derived and/or modified sequence
atgtctgccgcttggatcccagctcttggactcggcgtttgccttctgctgcttcccggtcctgccggatccgaaggagctgccccaattgcaatcacctgttttaccaggggccttgatattcggaaagagaaagcagacgtgctgtgccccggtggctgcccgttggaagagttttcagtgtacggcaatatagtgtacgcttctgtctctagtatatgtggagcggctgttcatcgcggagtcatatctaattcaggtggtcccgtgcgcgtgtacagtctgccgggacgcgagaattactcaagcgtcgatgccaacgggatccagtcacaaatgctgtctcggtggagcgcctcctttaccgtcactaaggggaagtccagtacccaggaggcaacaggccaggccgtgtctacagcccatccacccacaggcaagagattaaaaaaaaccccagagaagaaaaccggcaacaaagattgtaaagccgacattgctttcctgatcgacggtagttttaatattggccagcgcaggttcaacttacagaagaacttcgttggcaaagtcgcgcttatgctaggaatcgggaccgaagggccacacgtggggctggtgcaagctagtgagcatccaaagatagagttctatcttaaaaactttaccagtgccaaggacgtactgttcgcgataaaggaagtagggtttagagggggtaattcgaataccggaaaagctttgaaacacacagcgcagaaattctttactgtggatgcaggggttaggaaggggattcccaaggtcgtcgtggtgtttatcgacggatggccaagcgatgatatcgaggaagctggcatcgtcgccagagagttcggcgtcaacgtcttcatcgtcagcgtcgctaagccaatccccgaggagctgggaatggtgcaggatgtgaccttcgtagataaggctgtgtgccggaacaacggctttttttcatatcacatgcccaactggtttgggactaccaagtatgtaaagcctctggtgcagaaactgtgtacacatgagcaaatgatgtgctctaagacgtgttacaactcggttaacattgccttccttatcgatggttcttcttcagtcggcgactcgaacttccggttaatgctggagttcgtcagcaatatcgccaagactttcgaaatctcagatataggagctaagatagccgctgttcagttcacatacgaccagagaactgaattttccttcaccgattattctacgaaagagaacgtcctagctgtcataagaaatatccggtacatgagtggcggtaccgctactggcgatgcgatttcttttacagtgagaaacgtgtttggccctatacgcgagtcaccaaacaagaatttcctggtgatcgtgaccgacggccagtcctacgacgacgtgcagggccctgccgcagcagctcacgatgccggtattacaattttttcagtcggagttgcctgggccccattggacgacttgaaggacatggcctctaagcctaaggagtcgcatgccttctttacaagggagtttaccggactcgagcctatcgtgtccgatgtgattaggggcatctgccgggatttcctcgagtcccagcagtag

SEQ ID NO: 331354 - DNA, 732 bp, Artificial Sequence
  derived and/or modified sequence
atgctcagtaggtggagcgccagtttcactgtgactaaaggcaagagttccactcaggaagctacaggccaggctgtgagcacagctcacccaccaacaggaaagaggctgaaaaagacacctgaaaagaagacaggaaacaaggattgtaaagcggacattgcctttcttatagacggttcctttaacatcggccagagacgtttcaatctacaaaagaactttgtgggcaaagttgcgctaatgttaggaatcggtactgaggggccacacgtcggcctggtccaggcctcagaacatcctaagattgagttctacctgaagaacttcaccagtgctaaggacgtgctctttgcaattaaagaagtgggcttcagggggggtaattctaacacaggaaaagcactcaaacatacagcacagaaatttttcacagtcgatgccggagtgagaaaggggattcctaaggtggttgttgtcttcattgacgggtggccttccgatgatattgaggaggcaggcattgtcgctagagagtttggagtgaatgtgtttatagtgtccgtcgcaaagcctataccagaggagctcggaatggttcaagatgtgactttcgtggacaaggccgtttgtaggaataatggcttctttagttaccatatgccaaactggttcgggactactaagtacgtcagcttgtggtaccgttcctgcgcgctcatgaataaatag

SEQ ID NO: 331355 - DNA, 2397 bp, Artificial Sequence
  derived and/or modified sequence
gggggccttgccttccgcactcgggcgcagccgggtggatctcgagcaggtgcggagccccgggcggcgggcgcgggtgcgagggatccctgacgcctctgtccctgtttctttgtcgctcccagcctgtctgtcgtcgttttggcgcccccgcctccccgcggtgcggggttgcacaccgatcctgggcttcgctcgatttgccgccgaggcgcctcccagacctagaggggcgctggcctggagcagcgggtcgtctgtgtcctctctcctctgcgccgcgcccggggatccgaagggtgcggggctctgaggaggtgacgcgcggggcctcccgcaccctggccttgcccgcattctccctctctcccaggtgtgagcagcctatcagtcaccatgtccgcagcctggatcccggctctcggcctcggtgtgtgtctgctgctgctgccggggcccgcgggcagcgagggagccgctcccattgctatcacatgttttaccagaggcttggacatcaggaaagagaaagcagatgtcctctgcccagggggctgccctcttgaggaattctctgtgtatgggaacatagtatatgcttctgtatcgagcatatgtggggctgctgtccacaggggagtaatcagcaactcagggggacctgtacgagtctatagcctacctggtcgagaaaactattcctcagtagatgccaatggcatccagtctcaaatgctttctagatggtctgcttctttcacagtaactaaaggcaaaagtagtacacaggaggccacaggacaagcagtgtccacagcacatccaccaacaggtaaacgactaaagaaaacacccgagaagaaaactggcaataaagattgtaaagcagacattgcatttctgattgatggaagctttaatattgggcagcgccgatttaatttacagaagaattttgttggaaaagtggctctaatgttgggaattggaacagaaggaccacatgtgggccttgttcaagccagtgaacatcccaaaatagaattttacttgaaaaactttacatcagccaaagatgttttgtttgccataaaggaagtaggtttcagagggggtaattccaatacaggaaaagccttgaagcatactgctcagaaattcttcacggtagatgctggagtaagaaaagggatccccaaagtggtggtggtatttattgatggttggccttctgatgacatcgaggaagcaggcattgtggccagagagtttggtgtcaatgtatttatagtttctgtggccaagcctatccctgaagaactggggatggttcaggatgtcacatttgttgacaaggctgtctgtcggaataatggcttcttctcttaccacatgcccaactggtttggcaccacaaaatacgtaaagcctctggtacagaagctgtgcactcatgaacaaatgatgtgcagcaagacctgttataactcagtgaacattgcctttctaattgatggctccagcagtgttggagatagcaatttccgcctcatgcttgaatttgtttccaacatagccaagacttttgaaatctcggacattggtgccaagatagctgctgtacagtttacttatgatcagcgcacggagttcagtttcactgactatagcaccaaagagaatgtcctagctgtcatcagaaacatccgctatatgagtggtggaacagctactggtgatgccatttccttcactgttagaaatgtgtttggccctataagggagagccccaacaagaacttcctagtaattgtcacagatgggcagtcctatgatgatgtccaaggccctgcagctgctgcacatgatgcaggaatcactatcttctctgttggtgtggcttgggcacctctggatgacctgaaagatatggcttctaaaccgaaggagtctcatgctttcttcacaagagagttcacaggattagaaccaattgtttctgatgtcatcagaggcatttgtagagatttcttagaatcccagcaataatggtaacattttgacaactgaaagaaaaagtacaaggggatccagtgtgtaaattgtattctcataatactgaaatgctttagcatactagaatcagatacaaaactattaagtatgtcaacagccatttaggcaaataagcactcctttaaagccgctgccttctggttacaatttacagtgtactttgttaaaaacactgctgaggcttcataatcatggctcttagaaactcaggaaagaggagataatgtggattaaaaccttaagagttctaaccatgcctactaaatgtacagatatgcaaattccatagctcaataaaagaatctgatacttagaccaaaa

SEQ ID NO: 331356 - DNA, 2131 bp, Artificial Sequence
  derived and/or modified sequence
agattgtaaagcagacattgcatttctgattgatggaagctttaatattgggcagcgccgatttaatttacagaagaattttgttggaaaagtggctctaatgttgggaattggaacagaaggaccacatgtgggccttgttcaagccagtgaacatcccaaaatagaattttacttgaaaaactttacatcagccaaagatgttttgtttgccataaaggaagtaggtttcagagggggtaattccaatacagatataacattggagaagtatctctttgtaatgctaaaaagaagtgaaaatcaacagacttatctaatgaatgcagatgtggcagaaagaatgagtagcactaccgttgactctgaagagagacttcttagaggaaaagccttgaagcatactgctcagaaattcttcacggtagatgctggagtaagaaaagggatccccaaagtggtggtggtatttattgatggttggccttctgatgacatcgaggaagcaggcattgtggccagagagtttggtgtcaatgtatttatagtttctgtggccaagcctatccctgaagaactggggatggttcaggatgtcacatttgttgacaaggctgtctgtcggaataatggcttcttctcttaccacatgcccaactggtttggcaccacaaaatacgtaaagcctctggtacagaagctgtgcactcatgaacaaatgatgtgcagcaagacctgttataactcagtgaacattgcctttctaattgatggctccagcagtgttggagatagcaatttccgcctcatgcttgaatttgtttccaacatagccaagacttttgaaatctcggacattggtgccaagatagctgctgtacagtttacttatgatcagcgcacggagttcagtttcactgactatagcaccaaagagaatgtcctagctgtcatcagaaacatccgctatatgagtggtggaacagctactggtgatgccatttccttcactgttagaaatgtgtttggccctataagggagagccccaacaagaacttcctagtaattgtcacagatgggcagtcctatgatgatgtccaaggccctgcagctgctgcacatgatgcaggaatcactatcttctctgttggtgtggcttgggcacctctggatgacctgaaagatatggcttctaaaccgaaggagtctcatgctttcttcacaagagagttcacaggattagaaccaattgtttctgatgtcatcagaggcatttgtagagatttcttagaatcccagcaataatggtaacattttgacaactgaaagaaaaagtacaaggggatccagtgtgtaaattgtattctcataatactgaaatgctttagcatactagaatcagatacaaaactattaagtatgtcaacagccatttaggcaaataagcactcctttaaagccgctgccttctggttacaatttacagtgtactttgttaaaaacactgctgaggcttcataatcatggctcttagaaactcaggaaagaggagataatgtggattaaaaccttaagagttctaaccatgcctactaaatgtacagatatgcaaattccatagctcaataaaagaatctgatacttagaccaaaagcaacattcgttctctaaccattctgtattgattatataagcaaaatgaaaagagaaacttaaatgaacacagctctttaacatggttcaggtacacatattttgacccaagtggatattttcttaaaaccaatcaataatagctagctattactgcagactataaaatctggatatagaaaggagacctgtatcaaactgcttttgtagtgtgttttcataacaacttatgactaaaaatatcacactgaataagagagcaggattgccaggtatttttctatttctctccttaattttatatgtatatagatatatttggcttatattctaagtcacctaagtacttaaaagttaagttggtaaagtatttactgactgcttataaacatttaaagacaaagacatttcaaataactgcagaaaaaatattgtagtttgaatatttaagcaataaaactgctagtgagttattgt

SEQ ID NO: 331357 - DNA, 2536 bp, Artificial Sequence
  derived and/or modified sequence
gcactcgggcgcagccgggtggatctcgagcaggtgtgagcagcctatcagtcaccatgtccgcagcctggatcccggctctcggcctcggtgtgtgtctgctgctgctgccggggcccgcgggcagcgagggagccgctcccattgctatcacatgttttaccagaggcttggacatcaggaaagagaaagcagatgtcctctgcccagggggctgccctcttgaggaattctctgtgtatgggaacatagtatatgcttctgtatcgagcatatgtggggctgctgtccacaggggagtaatcagcaactcagggggacctgtacgagtctatagcctacctggtcgagaaaactattcctcagtagatgccaatggcatccagtctcaaatgctttctagatggtctgcttctttcacagtaactaaaggcaaaagtagtacacaggaggccacaggacaagcagtgtccacagcacatccaccaacaggtaaacgactaaagaaaacacccgagaagaaaactggcaataaagattgtaaagcagacattgcatttctgattgatggaagctttaatattgggcagcgccgatttaatttacagaagaattttgttggaaaagtggctctaatgttgggaattggaacagaaggaccacatgtgggccttgttcaagccagtgaacatcccaaaatagaattttacttgaaaaactttacatcagccaaagatgttttgtttgccataaaggaagtaggtttcagagggggtaattccaatacaggaaaagccttgaagcatactgctcagaaattcttcacggtagatgctggagtaagaaaagggatccccaaagtggtggtggtatttattgatggttggccttctgatgacatcgaggaagcaggcattgtggccagagagtttggtgtcaatgtatttatagtttctgtggccaagcctatccctgaagaactggggatggttcaggatgtcacatttgttgacaaggctgtctgtcggaataatggcttcttctcttaccacatgcccaactggtttggcaccacaaaatacgtaaagcctctggtacagaagctgtgcactcatgaacaaatgatgtgcagcaagacctgttataactcagtgaacattgcctttctaattgatggctccagcagtgttggagatagcaatttccgcctcatgcttgaatttgtttccaacatagccaagacttttgaaatctcggacattggtgccaagatagctgctgtacagtttacttatgatcagcgcacggagttcagtttcactgactatagcaccaaagagaatgtcctagctgtcatcagaaacatccgctatatgagtggtggaacagctactggtgatgccatttccttcactgttagaaatgtgtttggccctataagggagagccccaacaagaacttcctagtaattgtcacagatgggcagtcctatgatgatgtccaaggccctgcagctgctgcacatgatgcaggaatcactatcttctctgttggtgtggcttgggcacctctggatgacctgaaagatatggcttctaaaccgaaggagtctcatgctttcttcacaagagagttcacaggattagaaccaattgtttctgatgtcatcagaggcatttgtagagatttcttagaatcccagcaataatggtaacattttgacaactgaaagaaaaagtacaaggggatccagtgtgtaaattgtattctcataatactgaaatgctttagcatactagaatcagatacaaaactattaagtatgtcaacagccatttaggcaaataagcactcctttaaagccgctgccttctggttacaatttacagtgtactttgttaaaaacactgctgaggcttcataatcatggctcttagaaactcaggaaagaggagataatgtggattaaaaccttaagagttctaaccatgcctactaaatgtacagatatgcaaattccatagctcaataaaagaatctgatacttagaccaaaagcaacattcgttctctaaccattctgtattgattatataagcaaaatgaaaagagaaacttaaatgaacacagctctttaacatggttcaggtacacatattttgacccaagtggatattttcttaaaaccaatcaataatagctagctattactgcagactataaaatctggatatagaaaggagacctgtatcaaactgcttttgtagtgtgttttcataacaacttatgactaaaaatatcacactgaataagagagcaggattgccaggtatttttctatttctctccttaattttatatgtatatagatatatttggcttatattctaagtcacctaagtacttaaaagttaagttggtaaagtatttactgactgcttataaacatttaaagacaaagacatttcaaataactgcagaaaaaatattgtagtttgaatatttaagcaataaaactgctagtgagttattgtaa

SEQ ID NO: 331358 - DNA, 2687 bp, Artificial Sequence
  derived and/or modified sequence
gacctagaggggcgctggcctggagcagcgggtcgtctgtgtcctctctcctctgcgccgcgcccggggatccgaagggtgcggggctctgaggaggtgacgcgcggggcctcccgcaccctggccttgcccgcattctccctctctcccaggtgtgagcagcctatcagtcaccatgtccgcagcctggatcccggctctcggcctcggtgggtgcgcgcccctcacgaccccggccccttgctccgctgggtggaggctggagccagccctcacgcttctctcttcgcagctcccattgctatcacatgttttaccagaggcttggacatcaggaaagagaaagcagatgtcctctgcccagggggctgccctcttgaggaattctctgtgtatgggaacatagtatatgcttctgtatcgagcatatgtggggctgctgtccacaggggagtaatcagcaactcagggggacctgtacgagtctatagcctacctggtcgagaaaactattcctcagtagatgccaatggcatccagtctcaaatgctttctagatggtctgcttctttcacagtaactaaaggcaaaagtagtacacaggaggccacaggacaagcagtgtccacagcacatccaccaacaggtaaacgactaaagaaaacacccgagaagaaaactggcaataaagattgtaaagcagacattgcatttctgattgatggaagctttaatattgggcagcgccgatttaatttacagaagaattttgttggaaaagtggctctaatgttgggaattggaacagaaggaccacatgtgggccttgttcaagccagtgaacatcccaaaatagaattttacttgaaaaactttacatcagccaaagatgttttgtttgccataaaggaagtaggtttcagagggggtaattccaatacaggaaaagccttgaagcatactgctcagaaattcttcacggtagatgctggagtaagaaaagggatccccaaagtggtggtggtatttattgatggttggccttctgatgacatcgaggaagcaggcattgtggccagagagtttggtgtcaatgtatttatagtttctgtggccaagcctatccctgaagaactggggatggttcaggatgtcacatttgttgacaaggctgtctgtcggaataatggcttcttctcttaccacatgcccaactggtttggcaccacaaaatacgtaagcctctggtacagaagctgtgcactcatgaacaaatgatgtgcagcaagacctgttataactcagtgaacattgcctttctaattgatggctccagcagtgttggagatagcaatttccgcctcatgcttgaatttgtttccaacatagccaagacttttgaaatctcggacattggtgccaagatagctgctgtacagtttacttatgatcagcgcacggagttcagtttcactgactatagcaccaaagagaatgtcctagctgtcatcagaaacatccgctatatgagtggtggaacagctactggtgatgccatttccttcactgttagaaatgtgtttggccctataagggagagccccaacaagaacttcctagtaattgtcacagatgggcagtcctatgatgatgtccaaggccctgcagctgctgcacatgatgcaggaatcactatcttctctgttggtgtggcttgggcacctctggatgacctgaaagatatggcttctaaaccgaaggagtctcatgctttcttcacaagagagttcacaggattagaaccaattgtttctgatgtcatcagaggcatttgtagagatttcttagaatcccagcaataatggtaacattttgacaactgaaagaaaaagtacaaggggatccagtgtgtaaattgtattctcataatactgaaatgctttagcatactagaatcagatacaaaactattaagtatgtcaacagccatttaggcaaataagcactcctttaaagccgctgccttctggttacaatttacagtgtactttgttaaaaacactgctgaggcttcataatcatggctcttagaaactcaggaaagaggagataatgtggattaaaaccttaagagttctaaccatgcctactaaatgtacagatatgcaaattccatagctcaataaaagaatctgatacttagaccaaaagcaacattcgttctctaaccattctgtattgattatataagcaaaatgaaaagagaaacttaaatgaacacagctctttaacatggttcaggtacacatattttgacccaagtggatattttcttaaaaccaatcaataatagctagctattactgcagactataaaatctggatatagaaaggagacctgtatcaaactgcttttgtagtgtgttttcataacaacttatgactaaaaatatcacactgaataagagagcaggattgccaggtatttttctatttctctccttaattttatatgtatatagatatatttggcttatattctaagtcacctaagtacttaaaagttaagttggtaaagtatttactgactgcttataaacatttaaagacaaagacatttcaaataactgcagaaaaaatattgtagtttgaatatttaagcaataaaactgctagtgagttattgt

SEQ ID NO: 331359 - DNA, 1653 bp, Artificial Sequence
  derived and/or modified sequence
atgagcgccgcctggatccccgccctgggcctgggcgtgtgcctgctgctgctgcccggccccgccggcagcgagggcgccgcccccatcgccatcacctgcttcaccagaggcctggacatcagaaaggagaaggccgacgtgctgtgccccggcggctgccccctggaggagttcagcgtgtacggcaacatcgtgtacgccagcgtgagcagcatctgcggcgccgccgtgcacagaggcgtgatcagcaacagcggcggccccgtgagagtgtacagcctgcccggcagagagaactacagcagcgtggacgccaacggcatccagagccagatgctgagcagatggagcgccagcttcaccgtgaccaagggcaagagcagcacccaggaggccaccggccaggccgtgagcaccgcccacccccccaccggcaagagactgaagaagacccccgagaagaagaccggcaacaaggactgcaaggccgacatcgccttcctgatcgacggcagcttcaacatcggccagagaagattcaacctgcagaagaacttcgtgggcaaggtggccctgatgctgggcatcggcaccgagggcccccacgtgggcctggtgcaggccagcgagcaccccaagatcgagttctacctgaagaacttcaccagcgccaaggacgtgctgttcgccatcaaggaggtgggcttcagaggcggcaacagcaacaccggcaaggccctgaagcacaccgcccagaagttcttcaccgtggacgccggcgtgagaaagggcatccccaaggtggtggtggtgttcatcgacggctggcccagcgacgacatcgaggaggccggcatcgtggccagagagttcggcgtgaacgtgttcatcgtgagcgtggccaagcccatccccgaggagctgggcatggtgcaggacgtgaccttcgtggacaaggccgtgtgcagaaacaacggcttcttcagctaccacatgcccaactggttcggcaccaccaagtacgtgaagcccctggtgcagaagctgtgcacccacgagcagatgatgtgcagcaagacctgctacaacagcgtgaacatcgccttcctgatcgacggcagcagcagcgtgggcgacagcaacttcagactgatgctggagttcgtgagcaacatcgccaagaccttcgagatcagcgacatcggcgccaagatcgccgccgtgcagttcacctacgaccagagaaccgagttcagcttcaccgactacagcaccaaggagaacgtgctggccgtgatcagaaacatcagatacatgagcggcggcaccgccaccggcgacgccatcagcttcaccgtgagaaacgtgttcggccccatcagagagagccccaacaagaacttcctggtgatcgtgaccgacggccagagctacgacgacgtgcagggccccgccgccgccgcccacgacgccggcatcaccatcttcagcgtgggcgtggcctgggcccccctggacgacctgaaggacatggccagcaagcccaaggagagccacgccttcttcaccagagagttcaccggcctggagcccatcgtgagcgacgtgatcagaggcatctgcagagacttcctggagagccagcagtag

SEQ ID NO: 331360 - DNA, 1206 bp, Artificial Sequence
  derived and/or modified sequence
atgctgggcatcggcaccgagggcccccacgtgggcctggtgcaggccagcgagcaccccaagatcgagttctacctgaagaacttcaccagcgccaaggacgtgctgttcgccatcaaggaggtgggcttcagaggcggcaacagcaacaccgacatcaccctggagaagtacctgttcgtgatgctgaagagaagcgagaaccagcagacctacctgatgaacgccgacgtggccgagagaatgagcagcaccaccgtggacagcgaggagagactgctgagaggcaaggccctgaagcacaccgcccagaagttcttcaccgtggacgccggcgtgagaaagggcatccccaaggtggtggtggtgttcatcgacggctggcccagcgacgacatcgaggaggccggcatcgtggccagagagttcggcgtgaacgtgttcatcgtgagcgtggccaagcccatccccgaggagctgggcatggtgcaggacgtgaccttcgtggacaaggccgtgtgcagaaacaacggcttcttcagctaccacatgcccaactggttcggcaccaccaagtacgtgaagcccctggtgcagaagctgtgcacccacgagcagatgatgtgcagcaagacctgctacaacagcgtgaacatcgccttcctgatcgacggcagcagcagcgtgggcgacagcaacttcagactgatgctggagttcgtgagcaacatcgccaagaccttcgagatcagcgacatcggcgccaagatcgccgccgtgcagttcacctacgaccagagaaccgagttcagcttcaccgactacagcaccaaggagaacgtgctggccgtgatcagaaacatcagatacatgagcggcggcaccgccaccggcgacgccatcagcttcaccgtgagaaacgtgttcggccccatcagagagagccccaacaagaacttcctggtgatcgtgaccgacggccagagctacgacgacgtgcagggccccgccgccgccgcccacgacgccggcatcaccatcttcagcgtgggcgtggcctgggcccccctggacgacctgaaggacatggccagcaagcccaaggagagccacgccttcttcaccagagagttcaccggcctggagcccatcgtgagcgacgtgatcagaggcatctgcagagacttcctggagagccagcagtag

SEQ ID NO: 331361 - DNA, 732 bp, Artificial Sequence
  derived and/or modified sequence
atgctgagcagatggagcgccagcttcaccgtgaccaagggcaagagcagcacccaggaggccaccggccaggccgtgagcaccgcccacccccccaccggcaagagactgaagaagacccccgagaagaagaccggcaacaaggactgcaaggccgacatcgccttcctgatcgacggcagcttcaacatcggccagagaagattcaacctgcagaagaacttcgtgggcaaggtggccctgatgctgggcatcggcaccgagggcccccacgtgggcctggtgcaggccagcgagcaccccaagatcgagttctacctgaagaacttcaccagcgccaaggacgtgctgttcgccatcaaggaggtgggcttcagaggcggcaacagcaacaccggcaaggccctgaagcacaccgcccagaagttcttcaccgtggacgccggcgtgagaaagggcatccccaaggtggtggtggtgttcatcgacggctggcccagcgacgacatcgaggaggccggcatcgtggccagagagttcggcgtgaacgtgttcatcgtgagcgtggccaagcccatccccgaggagctgggcatggtgcaggacgtgaccttcgtggacaaggccgtgtgcagaaacaacggcttcttcagctaccacatgcccaactggttcggcaccaccaagtacgtgagcctgtggtacagaagctgcgccctgatgaacaagtag

SEQ ID NO: 331362 - protein, 92 aa, Artificial Sequence
  derived and/or modified sequence
MSDVAIVKEGWLHKRGEYIKTWRPRYFLLKNDGTFIGYKERPQDVDQREAPLNNFSVAQCQLMKTERPRPNTFIIRCLQWTTVIERTFHVET

SEQ ID NO: 331363 - DNA, 279 bp, Artificial Sequence
  derived and/or modified sequence
atgagcgacgtggccatcgtgaaggagggctggctgcacaagagaggcgagtacatcaagacctggagacccagatacttcctgctgaagaacgacggcaccttcatcggctacaaggagagaccccaggacgtggaccagagagaggcccccctgaacaacttcagcgtggcccagtgccagctgatgaagaccgagagacccagacccaacaccttcatcatcagatgcctgcagtggaccaccgtgatcgagagaaccttccacgtggagacctag

SEQ ID NO: 331364 - DNA, 279 bp, Artificial Sequence
  derived and/or modified sequence
atgagcgacgtcgcaatcgtcaaagagggctggctgcacaaaaggggggaatatattaagacctggaggccacgatactttctattgaagaacgacggcacctttattggctataaagagcgcccccaggacgttgaccagagggaggctccattaaacaatttctctgtcgctcagtgtcagctcatgaagacagagcgccctcggcccaacacctttatcatccggtgccttcaatggacaactgtcatcgagagaaccttccatgtcgaaacctag

SEQ ID NO: 331365 - DNA, 279 bp, Artificial Sequence
  derived and/or modified sequence
atgtctgatgtggccatcgtgaaggagggctggctgcacaagagaggagagtacatcaagacctggaggccccgctacttcctgctgaagaatgatggcaccttcatcggctacaaggagcggccccaggatgtggaccagcgggaggcccccctgaacaacttctctgtggcccagtgccagctgatgaagacagagcggccccggcccaacaccttcatcatccgctgcctgcagtggaccaccgtcatcgagaggaccttccacgtggagacctag

SEQ ID NO: 331366 - DNA, 279 bp, Artificial Sequence
  derived and/or modified sequence
atgagcgacgtggccatcgtgaaggagggctggctgcacaagcggggcgagtacatcaagacctggcgaccgcgctacttcctgctgaagaacgacggaacattcattggctacaaagagcggcctcaggatgtggatcagagagaagctccactgaataacttctctgtggcccagtgccagctgatgaaaaccgaacgacccagaccaaacacttttataattcgttgtcttcagtggactaccgtcatcgagagaaccttccatgtggagacctag

SEQ ID NO: 331367 - DNA, 279 bp, Artificial Sequence
  derived and/or modified sequence
atgagcgatgtggccatcgttaaggaaggctggttgcacaaaagaggcgagtacatcaagacatggaggcctaggtatttcctactgaaaaatgatggcacgtttatcggatacaaagagcggccacaggatgtcgatcaaagagaggctcctctgaataattttagcgtggctcagtgtcagcttatgaaaaccgagcggccacgccctaatacctttattatccggtgcttacaatggaccacagtcattgagagaaccttccacgttgagacgtag

SEQ ID NO: 331368 - DNA, 553 bp, Artificial Sequence
  derived and/or modified sequence
gcgcccggacgcggcggcccgtctggggagcagggaggagccctgtgccctgtcccaggatccatgggtaggaacaccatggacagggagagcaaacggggccatctgtcaccaggggcttagggaaggccgagccagcctgggtcaaagaagtcaaaggggctgcctggaggaggcagcctgtcagctggtgcatcagaggctgtggccaggccagctgggctcggggagcgccagcctgagaggagcgcgtgagcgtcgcgggagcctcgggcaccatgagcgacgtggctattgtgaaggagggttggctgcacaaacgaggggagtacatcaagacctggcggccacgctacttcctcctcaagaatgatggcaccttcattggctacaaggagcggccgcaggatgtggaccaacgtgaggctcccctcaacaacttctctgtggcgcagtgccagctgatgaagacggagcggccccggcccaacaccttcatcatccgctgcctgcagtggaccactgtcatcgaacgcaccttccatgtggagac

SEQ ID NO: 331369 - DNA, 1542 bp, Artificial Sequence
  derived and/or modified sequence
atggacatcaagaacagccccagcagcctgaacagccccagcagctacaactgcagccagagcatcctgcccctggagcacggcagcatctacatccccagcagctacgtggacagccaccacgagtaccccgccatgaccttctacagccccgccgtgatgaactacagcatccccagcaacgtgaccaacctggagggcggccccggcagacagaccaccagccccaacgtgctgtggcccacccccggccacctgagccccctggtggtgcacagacagctgagccacctgtacgccgagccccagaagagcccctggtgcgaggccagaagcctggagcacaccctgcccgtgaacagagagaccctgaagagaaaggtgagcggcaacagatgcgccagccccgtgaccggccccggcagcaagagagacgcccacttctgcgccgtgtgcagcgactacgccagcggctaccactacggcgtgtggagctgcgagggctgcaaggccttcttcaagagaagcatccagggccacaacgactacatctgccccgccaccaaccagtgcaccatcgacaagaacagaagaaagagctgccaggcctgcagactgagaaagtgctacgaggtgggcatggtgaagtgcggcagcagaagagagagatgcggctacagactggtgagaagacagagaagcgccgacgagcagctgcactgcgccggcaaggccaagagaagcggcggccacgcccccagagtgagagagctgctgctggacgccctgagccccgagcagctggtgctgaccctgctggaggccgagcccccccacgtgctgatcagcagacccagcgcccccttcaccgaggccagcatgatgatgagcctgaccaagctggccgacaaggagctggtgcacatgatcagctgggccaagaagatccccggcttcgtggagctgagcctgttcgaccaggtgagactgctggagagctgctggatggaggtgctgatgatgggcctgatgtggagaagcatcgaccaccccggcaagctgatcttcgcccccgacctggtgctggacagagacgagggcaagtgcgtggagggcatcctggagatcttcgacatgctgctggccaccaccagcagattcagagagctgaagctgcagcacaaggagtacctgtgcgtgaaggccatgatcctgctgaacagcagcatgtaccccctggtgaccgccacccaggacgccgacagcagcagaaagctggcccacctgctgaacgccgtgaccgacgccctggtgtgggtgatcgccaagagcggcatcagcagccagcagcagagcatgagactggccaacctgctgatgctgctgagccacgtgagacacgccagcagcctgagcctgagctggagactgttcatgctgagagaggccagctgccacggcgtgagacagacccccggcggcgcccacgtgagcgtgagcagaagcagaagcttcgaggcctgccagcagcccagagagtag

SEQ ID NO: 331370 - DNA, 1542 bp, Artificial Sequence
  derived and/or modified sequence
atggacatcaagaattcgccatccagccttaactcgccgagctcttataattgcagccagtctatcctgcctctggagcacggctctatttatatcccttcaagttatgttgattcacatcatgaatatccagcaatgacattctattcaccggctgttatgaactattccatcccatcaaatgtcacgaacctcgaaggaggccctggccggcagacaactagcccaaacgtgttgtggcccactcccggtcacctgtcaccacttgtggtccataggcaactcagccatctctacgcggaaccccagaagtccccatggtgcgaagcaaggtcgctcgaacacactctgcctgtaaatcgtgagaccctcaagcggaaagtttccggcaataggtgcgcctcacccgtgaccggcccagggtctaaaagggacgcccatttctgtgcagtttgttcagactatgcgtctggttaccactacggggtgtggtcctgtgaggggtgtaaagctttcttcaagcggtcgattcaggggcacaatgactacatctgtcctgctacaaaccaatgcacgatagataaaaatcgtaggaaaagttgtcaggcatgcaggctccggaaatgttatgaggtaggcatggtgaagtgcgggtcccgtagggagcgctgtgggtataggctggtgcgtaggcagcggtcggctgacgaacagctccactgcgcaggcaaagctaagagaagtggtgggcatgcgcctcgggttcgggagcttttgctggatgcactgagccccgaacaactggtgcttacactgctagaggcagagccacctcacgtgttaatctcacgcccgtccgcgccttttacagaagcgagcatgatgatgagtcttaccaaactcgcggacaaggagctcgttcacatgatttcatgggccaaaaagattccagggtttgtcgagctctcactgttcgatcaagtccgacttttagagtcgtgttggatggaagtgttaatgatggggttgatgtggagaagcatcgatcaccccggaaagttaatcttcgcccccgacttagtacttgatcgggacgagggcaagtgtgtcgaaggaatcctggaaatatttgacatgctgctcgcaactacatcccgctttcgcgagctcaaattacagcacaaggaatacctctgtgtgaaggcaatgatactactcaattcctcaatgtaccctctcgtgactgctacacaagatgctgattcgtcaaggaaactcgcacacctgctgaatgctgtgacagacgcactcgtatgggtgattgctaagtcgggaataagttcccagcaacaaagcatgagactggctaatctgctaatgctcctgagtcacgtccggcacgcatcgtccctctcactttcttggaggctcttcatgctcagagaagcgtcttgccacggcgtgcgccaaacgcctggtggggcacacgtttccgttagccgaagtcggtcgttcgaagcctgtcaacagcctcgcgagtag

SEQ ID NO: 331371 - DNA, 2695 bp, Artificial Sequence
  derived and/or modified sequence
ctcggtctttaaaaggaagaaggggcttatcgttaagtcgcttgtgatcttttcagtttctccagctgctggctttttggacacccactcccccgccaggaggcagttgcaagcgcggaggctgcgagaaataactgcctcttgaaacttgcagggcgaagagcaggcggcgagcgctgggccggggagggaccacccgagctgcgacgggctctggggctgcggggcagggctggcgcccggagcctgagctgcaggaggtgcgctcgctttcctcaacaggtggcggcggggcgcgcgccgggagaccccccctaatgcgggaaaagcacgtgtccgcattttagagaaggcaaggccggtgtgtttatctgcaagccattatacttgcccacgaatctttgagaacattataatgacctttgtgcctcttcttgcaaggtgttttctcagctgttatctcaagacatggatataaaaaactcaccatctagccttaattctccttcctcctacaactgcagtcaatccatcttacccctggagcacggctccatatacataccttcctcctatgtagacagccaccatgaatatccagccatgacattctatagccctgctgtgatgaattacagcattcccagcaatgtcactaacttggaaggtgggcctggtcggcagaccacaagcccaaatgtgttgtggccaacacctgggcacctttctcctttagtggtccatcgccagttatcacatctgtatgcggaacctcaaaagagtccctggtgtgaagcaagatcgctagaacacaccttacctgtaaacagagagacactgaaaaggaaggttagtgggaaccgttgcgccagccctgttactggtccaggttcaaagagggatgctcacttctgcgctgtctgcagcgattacgcatcgggatatcactatggagtctggtcgtgtgaaggatgtaaggccttttttaaaagaagcattcaaggacataatgattatatttgtccagctacaaatcagtgtacaatcgataaaaaccggcgcaagagctgccaggcctgccgacttcggaagtgttacgaagtgggaatggtgaagtgtggctcccggagagagagatgtgggtaccgccttgtgcggagacagagaagtgccgacgagcagctgcactgtgccggcaaggccaagagaagtggcggccacgcgccccgagtgcgggagctgctgctggacgccctgagccccgagcagctagtgctcaccctcctggaggctgagccgccccatgtgctgatcagccgccccagtgcgcccttcaccgaggcctccatgatgatgtccctgaccaagttggccgacaaggagttggtacacatgatcagctgggccaagaagattcccggctttgtggagctcagcctgttcgaccaagtgcggctcttggagagctgttggatggaggtgttaatgatggggctgatgtggcgctcaattgaccaccccggcaagctcatctttgctccagatcttgttctggacagggatgaggggaaatgcgtagaaggaattctggaaatctttgacatgctcctggcaactacttcaaggtttcgagagttaaaactccaacacaaagaatatctctgtgtcaaggccatgatcctgctcaattccagtatgtaccctctggtcacagcgacccaggatgctgacagcagccggaagctggctcacttgctgaacgccgtgaccgatgctttggtttgggtgattgccaagagcggcatctcctcccagcagcaatccatgcgcctggctaacctcctgatgctcctgtcccacgtcaggcatgcgagctctctctcactctcttggagattgtttatgctgagggaagccagctgccatggtgtgaggcagactcctggaggagcccacgtgtctgtaagtagaagcagatcttttgaggcctgtcaacagccacgggaatgagcttggaagcagatcccacctcctccctcacacaagtcgagccttcagatgagcctgcagcctttgtcgacaccttgaccgcattctcatgagagaccttgagccagagatacttagctaagccatgcccatggactcctgacccacagaaactgtgataataagtttgttgtttcaagctgctaacttatggagtaatatgttacacaaaaatagctaatatatagctcaaaactggaagcaacccaaatatctattaactggtagataaacaaactactcatttccaaacttatttccaaaactggaacactacttggcaatcaaataattaactatgcattaagtgtaacaacctggatgaatctcaaaggcattatgttaagtgaaacaagtgagccacgtaagactacatactgtttgattccctctatatgatattctagaaaaggcaaaactatagtaataggaaacagtgagtgatcacctagggttgaagacaggtgaaaggggattgactgcaaagaggcaggaggaaacgtcttgggagatggagatgttccttatattgatggcggtggtggttacacaactgcacttttatcaaaacttacctaactgctacttaaaataggtgtattaatatttttactgtatgtaaattatacctcaataaatttgattt

SEQ ID NO: 331372 - DNA, 1542 bp, Artificial Sequence
  derived and/or modified sequence
atggacatcaagaacagccccagcagcctgaacagccccagcagctacaactgcagccagagcatcctgcccctggagcacggcagcatctacatccccagcagctatgtggacagccaccacgagtacccagccatgaccttctacagccctgctgtgatgaactacagcatccccagcaatgtgaccaacctggagggcggccctggccggcagaccaccagccccaacgtgctgtggcccaccccaggccacctgagccccctggtggtgcaccggcagctgagccacctgtatgcagagccccagaagagcccctggtgtgaggcccggagcctggagcacaccctgcctgtgaaccgggagaccctgaagaggaaggtgtctggcaacagatgtgccagccctgtgacaggccctggcagcaagagagatgcccacttctgtgctgtgtgcagcgactatgccagcggctaccactatggagtgtggagctgtgagggctgcaaggccttcttcaagaggagcatccagggccacaatgactacatctgcccagccaccaaccagtgcaccatcgacaagaacagaaggaagagctgccaggcctgccgcctgaggaagtgctatgaggtgggcatggtgaagtgtggcagccggcgggagcgctgtggctaccgcctggtgcggcggcagaggtctgcagatgagcagctgcactgtgccggcaaggccaagaggtctgggggccacgccccccgggtgcgggagctgctgctggatgccctgagccctgagcagctggtgctgaccctgctggaggccgagccccctcatgtgctgatcagccggcccagcgcccccttcacagaggcctccatgatgatgagcctgaccaagctggccgacaaggagctggtgcacatgatctcctgggccaagaagatccctggctttgtggagctgagcctgtttgaccaggtgcggctgctggagagctgctggatggaggtgctgatgatgggcctgatgtggaggagcattgaccaccctgggaagctgatctttgccccagacctggtgctggacagagatgagggcaaatgtgtggagggcatcctggagatctttgacatgctgctggccaccaccagccgcttccgggagctgaagctgcagcacaaggagtacctgtgtgtgaaggccatgatcctgctgaacagctccatgtaccccctggtgacagccacccaggatgctgacagcagcaggaagctggcccacctgctgaatgctgtgacagatgccctggtgtgggtgattgccaagagcggcatcagcagccagcagcagagcatgaggctggccaacctgctgatgctgctgagccacgtgagacatgccagcagcctgagcctgtcctggaggctcttcatgctgcgggaggccagctgccacggcgtgcggcagacccctgggggcgcccacgtgtctgtgagccgcagccgcagctttgaggcctgccagcagccccgggagtag

SEQ ID NO: 331373 - DNA, 1542 bp, Artificial Sequence
  derived and/or modified sequence
atggacatcaagaacagccccagcagcctgaacagccccagcagctacaactgttcacagtccatcctcccactcgagcacggcagcatctacatacccagcagttacgttgactcccaccatgagtatcctgctatgaccttctactcacccgcagttatgaattattccatcccctcaaatgtgaccaatcttgaaggcggccccggcagacagaccacatcccccaacgtgctgtggcctactcccggacacctgtctcccttggtggtccaccgacagctatcgcacctctatgccgagccccagaaatctccttggtgcgaggcacggtcacttgaacacactctaccggttaatagagagaccctgaagcggaaggtctctgggaatcggtgcgcttctccagtaacaggcccgggaagcaaacgggatgctcatttctgcgccgtgtgcagtgattacgcatccgggtatcactacggggtgtggagttgtgagggatgtaaagccttcttcaaaaggagcattcagggacataacgactatatttgccctgctacaaatcaatgcacgattgataagaaccgcaggaagtcatgtcaagcctgtcggctgcggaagtgctacgaggtcgggatggtgaaatgtggcagtagacgggagcgatgtggatacaggctcgtccgcagacaacgatccgccgatgagcagctgcactgcgcagggaaagcgaaacggagtggaggacacgcgccccgggtgagggagttactcttagatgctctatcacccgaacagctggtcttgactctgttagaggcagaacccccgcacgtcctgatcagtaggcctagcgcaccatttacagaagctagtatgatgatgtccctaaccaaattggctgataaagaactagtacatatgatctcctgggcgaaaaagatccctggcttcgtggagttaagcttgttcgaccaagtgcggctgcttgagtcttgttggatggaagtgctgatgatgggcctgatgtggagatcgattgaccatccggggaagctaatctttgccccggacttggtgttagatcgggacgaagggaagtgtgtggaggggatactggaaatattcgacatgctcctggctactacctctcgctttcgggaattgaagctacagcataaggaatatctgtgcgtcaaggctatgatattactaaacagctctatgtatcccctggtgaccgcgacccaggacgccgactccagtcggaagctggcacatttgttgaatgcagtaaccgacgcactggtgtgggttatcgccaagtccggaataagctcccaacagcagtccatgcgcctggcgaacctgttaatgctcctttcccatgttaggcacgcgagttccctcagcctctcttggagattgtttatgctcagggaagccagctgtcacggcgttaggcagacacctgggggagcccatgtttcagtgtcgcgaagcagaagttttgaggcctgccagcaaccaagagaatag

SEQ ID NO: 331374 - DNA, 1542 bp, Artificial Sequence
  derived and/or modified sequence
atggatatcaagaactccccgtcctcactcaattctccctcctcttataactgttcccagtccattctccctcttgaacatggctccatttacatccctagctcgtacgtggattcgcaccatgaataccctgctatgacgttttactccccagccgtgatgaactacagtatcccctccaacgtcaccaacttggagggtggtcctggaagacaaacaacgagtcctaacgtgctctggcctactcccggacacctctcgcccctagtagttcatcgccagttatcgcacctgtatgcggagccacagaagtcaccttggtgtgaggcaagatccttggaacacacgctgcccgtgaacagggaaacacttaaaaggaaagtttctgggaatagatgtgccagcccagtgacgggtcctgggagtaaaagagatgcacatttctgcgcagtttgctctgattatgccagcggctaccattatggagtgtggagctgcgagggatgcaaggctttctttaaaaggtccattcagggacataatgattacatatgtccagctactaaccaatgtacaattgataagaaccggaggaagtcctgtcaggcatgtcgcctgaggaaatgctacgaggtggggatggtgaagtgtgggtcacgtcgggagcgatgcggatacagactggtgcggaggcagcgatccgctgacgaacagctccactgtgcaggcaaagctaaaagaagtggtggtcatgccccaagagtgcgggagttactgttggatgccttgtcccctgagcagctcgtgctgactttgctggaggcagagccacctcacgtcctaatcagtaggcccagcgccccattcaccgaggcatccatgatgatgtctctcaccaagttggctgacaaagagctggtgcacatgatatcttgggcaaagaagatccccggtttcgtggaactgtctctctttgatcaggtgcgtctcctggagagctgttggatggaggtcctgatgatgggcctgatgtggaggtcaatcgatcaccccggtaagctcatcttcgcgcctgatttggtgctggaccgcgatgagggcaaatgcgtcgaaggcattcttgagatattcgacatgctgctggccaccacctctaggttccgggagctgaaactccagcacaaggaatatctgtgtgtgaaggcaatgatactgctgaatagctctatgtatccattggtgactgcgacccaggacgctgacagcagtagaaagctggcacatttgctgaatgccgtgaccgatgctcttgtctgggtcatcgctaaatcaggaatttcctcccaacaacagagtatgcggctggccaatctgctgatgttactgtcccacgtgaggcacgccagtagcctcagcctctcctggcggctgtttatgctgagagaagcctcttgtcacggggttaggcagacgccagggggagcgcatgtatctgtaagccggtcacgctcatttgaggcctgtcaacagcccagagaatag

SEQ ID NO: 331375 - protein, 530 aa, Artificial Sequence
  derived and/or modified sequence
MDIKNSPSSLNSPSSYNCSQSILPLEHGSIYIPSSYVDSHHEYPAMTFYSPAVMNYSIPSNVTNLEGGPGRQTTSPNVLWPTPGHLSPLVVHRQLSHLYAEPQKSPWCEARSLEHTLPVNRETLKRKVSGNRCASPVTGPGSKRDAHFCAVCSDYASGYHYGVWSCEGCKAFFKRSIQGHNDYICPATNQCTIDKNRRKSCQACRLRKCYEVGMVKCGSRRERCGYRLVRRQRSADEQLHCAGKAKRSGGHAPRVRELLLDALSPEQLVLTLLEAEPPHVLISRPSAPFTEASMMMSLTKLADKELVHMISWAKKIPGFVELSLFDQVRLLESCWMEVLMMGLMWRSIDHPGKLIFAPDLVLDRDEGKCVEGILEIFDMLLATTSRFRELKLQHKEYLCVKAMILLNSSMYPLVTATQDADSSRKLAHLLNAVTDALVWVIAKSGISSQQQSMRLANLLMLLSHVRHASNKGMEHLLNMKCKNVVPVYDLLLEMLNAHVLRGCKSSITGSECSPAEDSKSKEGSQNPQSQ

SEQ ID NO: 331376 - protein, 513 aa, Artificial Sequence
  derived and/or modified sequence
MDIKNSPSSLNSPSSYNCSQSILPLEHGSIYIPSSYVDSHHEYPAMTFYSPAVMNYSIPSNVTNLEGGPGRQTTSPNVLWPTPGHLSPLVVHRQLSHLYAEPQKSPWCEARSLEHTLPVNRETLKRKVSGNRCASPVTGPGSKRDAHFCAVCSDYASGYHYGVWSCEGCKAFFKRSIQGHNDYICPATNQCTIDKNRRKSCQACRLRKCYEVGMVKCGSRRERCGYRLVRRQRSADEQLHCAGKAKRSGGHAPRVRELLLDALSPEQLVLTLLEAEPPHVLISRPSAPFTEASMMMSLTKLADKELVHMISWAKKIPGFVELSLFDQVRLLESCWMEVLMMGLMWRSIDHPGKLIFAPDLVLDRDEGKCVEGILEIFDMLLATTSRFRELKLQHKEYLCVKAMILLNSSMYPLVTATQDADSSRKLAHLLNAVTDALVWVIAKSGISSQQQSMRLANLLMLLSHVRHASSLSLSWRLFMLREASCHGVRQTPGGAHVSVSRSRSFEACQQPRE

SEQ ID NO: 331377 - DNA, 2169 bp, Artificial Sequence
  derived and/or modified sequence
ctcggtctttaaaaggaagaaggggcttatcgttaagtcgcttgtgatcttttcagtttctccagctgctggctttttggacacccactcccccgccaggaggcagttgcaagcgcggaggctgcgagaaataactgcctcttgaaacttgcagggcgaagagcaggcggcgagcgctgggccggggagggaccacccgagctgcgacgggctctggggctgcggggcagggctggcgcccggagcctgagctgcaggaggtgcgctcgctttcctcaacaggtggcggcggggcgcgcgccgggagaccccccctaatgcgggaaaagcacgtgtccgcattttagagaaggcaaggccggtgtgtttatctgcaagccattatacttgcccacgaatctttgagaacattataatgacctttgtgcctcttcttgcaaggtgttttctcagctgttatctcaagacatggatataaaaaactcaccatctagccttaattctccttcctcctacaactgcagtcaatccatcttacccctggagcacggctccatatacataccttcctcctatgtagacagccaccatgaatatccagccatgacattctatagccctgctgtgatgaattacagcattcccagcaatgtcactaacttggaaggtgggcctggtcggcagaccacaagcccaaatgtgttgtggccaacacctgggcacctttctcctttagtggtccatcgccagttatcacatctgtatgcggaacctcaaaagagtccctggtgtgaagcaagatcgctagaacacaccttacctgtaaacagagagacactgaaaaggaaggttagtgggaaccgttgcgccagccctgttactggtccaggttcaaagagggatgctcacttctgcgctgtctgcagcgattacgcatcgggatatcactatggagtctggtcgtgtgaaggatgtaaggccttttttaaaagaagcattcaaggacataatgattatatttgtccagctacaaatcagtgtacaatcgataaaaaccggcgcaagagctgccaggcctgccgacttcggaagtgttacgaagtgggaatggtgaagtgtggctcccggagagagagatgtgggtaccgccttgtgcggagacagagaagtgccgacgagcagctgcactgtgccggcaaggccaagagaagtggcggccacgcgccccgagtgcgggagctgctgctggacgccctgagccccgagcagctagtgctcaccctcctggaggctgagccgccccatgtgctgatcagccgccccagtgcgcccttcaccgaggcctccatgatgatgtccctgaccaagttggccgacaaggagttggtacacatgatcagctgggccaagaagattcccggctttgtggagctcagcctgttcgaccaagtgcggctcttggagagctgttggatggaggtgttaatgatggggctgatgtggcgctcaattgaccaccccggcaagctcatctttgctccagatcttgttctggacagggatgaggggaaatgcgtagaaggaattctggaaatctttgacatgctcctggcaactacttcaaggtttcgagagttaaaactccaacacaaagaatatctctgtgtcaaggccatgatcctgctcaattccagtatgtaccctctggtcacagcgacccaggatgctgacagcagccggaagctggctcacttgctgaacgccgtgaccgatgctttggtttgggtgattgccaagagcggcatctcctcccagcagcaatccatgcgcctggctaacctcctgatgctcctgtcccacgtcaggcatgcgagtaacaagggcatggaacatctgctcaacatgaagtgcaaaaatgtggtcccagtgtatgacctgctgctggagatgctgaatgcccacgtgcttcgcgggtgcaagtcctccatcacggggtccgagtgcagcccggcagaggacagtaaaagcaaagagggctcccagaacccacagtctcagtgacgcctggccctgaggtgaactggcccacagaggtcacaggctgaagcgtgaactccagtgtgtcaggagcctgggcttcatctttctgctgtgtggtccctcatttgg

SEQ ID NO: 331378 - DNA, 1593 bp, Artificial Sequence
  derived and/or modified sequence
atggacatcaagaacagccccagcagcctgaacagccccagcagctacaactgcagccagagcatcctgcccctggagcacggcagcatctacatccccagcagctacgtggacagccaccacgagtaccccgccatgaccttctacagccccgccgtgatgaactacagcatccccagcaacgtgaccaacctggagggcggccccggcagacagaccaccagccccaacgtgctgtggcccacccccggccacctgagccccctggtggtgcacagacagctgagccacctgtacgccgagccccagaagagcccctggtgcgaggccagaagcctggagcacaccctgcccgtgaacagagagaccctgaagagaaaggtgagcggcaacagatgcgccagccccgtgaccggccccggcagcaagagagacgcccacttctgcgccgtgtgcagcgactacgccagcggctaccactacggcgtgtggagctgcgagggctgcaaggccttcttcaagagaagcatccagggccacaacgactacatctgccccgccaccaaccagtgcaccatcgacaagaacagaagaaagagctgccaggcctgcagactgagaaagtgctacgaggtgggcatggtgaagtgcggcagcagaagagagagatgcggctacagactggtgagaagacagagaagcgccgacgagcagctgcactgcgccggcaaggccaagagaagcggcggccacgcccccagagtgagagagctgctgctggacgccctgagccccgagcagctggtgctgaccctgctggaggccgagcccccccacgtgctgatcagcagacccagcgcccccttcaccgaggccagcatgatgatgagcctgaccaagctggccgacaaggagctggtgcacatgatcagctgggccaagaagatccccggcttcgtggagctgagcctgttcgaccaggtgagactgctggagagctgctggatggaggtgctgatgatgggcctgatgtggagaagcatcgaccaccccggcaagctgatcttcgcccccgacctggtgctggacagagacgagggcaagtgcgtggagggcatcctggagatcttcgacatgctgctggccaccaccagcagattcagagagctgaagctgcagcacaaggagtacctgtgcgtgaaggccatgatcctgctgaacagcagcatgtaccccctggtgaccgccacccaggacgccgacagcagcagaaagctggcccacctgctgaacgccgtgaccgacgccctggtgtgggtgatcgccaagagcggcatcagcagccagcagcagagcatgagactggccaacctgctgatgctgctgagccacgtgagacacgccagcaacaagggcatggagcacctgctgaacatgaagtgcaagaacgtggtgcccgtgtacgacctgctgctggagatgctgaacgcccacgtgctgagaggctgcaagagcagcatcaccggcagcgagtgcagccccgccgaggacagcaagagcaaggagggcagccagaacccccagagccagtag

SEQ ID NO: 331379 - DNA, 1593 bp, Artificial Sequence
  derived and/or modified sequence
atggacatcaaaaactctccatccagcttgaactccccaagtagctataactgcagccaatccatcttgcccttagaacacggcagtatttatattccttcctcatacgtggacagtcaccacgagtatcctgccatgaccttctactctcctgccgtgatgaactactctattcctagcaacgtgaccaatctggagggcggccctgggcgacagaccacttcacctaacgttctttggccaacacccggtcacctgagcccacttgtggttcaccggcagctttcccatctgtatgcggaaccgcagaagtccccctggtgcgaagcaagatccttggaacacactctgcctgtgaaccgtgagacgctgaaacgcaaggtatccgggaaccgatgcgcgagccctgtcaccgggcctggttctaagcgggacgcgcacttctgcgcagtgtgctcagactacgcatccggataccactatggcgtgtggtcttgcgagggttgcaaggctttctttaagcggagcatccaggggcataacgactacatctgtccagcaaccaaccaatgtaccattgacaagaatcgacgcaagtcatgccaggcgtgtagactccgcaagtgttatgaagtgggaatggtaaagtgtggctcccggcgcgaaaggtgtggctataggctggtccgacgccagagaagcgccgatgagcagttgcactgtgctggcaaagctaaacggagcggtgggcacgctccaagggttcgagagctgcttctcgatgcgctgagtccagagcagcttgtactgaccctgctggaggccgagcctccccacgtgctgatatcgagaccaagcgctccatttacagaggcatcaatgatgatgtccttaactaaattggccgacaaggagctggtccacatgatttcttgggctaaaaagatacctggttttgtggagctgagtctgttcgatcaggtgcgattgctcgagtcttgttggatggaagttctgatgatggggctgatgtggcgaagtatagatcacccgggcaagctaatttttgcccctgatctcgtcttagatcgggatgagggcaagtgcgtggaaggcatcctggagatctttgacatgctgctcgcaactacttcccgattcagggagctgaaactgcaacacaaggaatatctctgcgtgaaggctatgattctcttaaactcatccatgtatccccttgtgacggcaacccaggacgcggacagctcaaggaaacttgcccacctgctgaacgctgttaccgacgcactcgtgtgggtgatagccaaaagcggtatcagcagccagcagcagtccatgcggctggccaacctcctgatgcttctcagccacgtacgtcacgcgagtaataaagggatggagcaccttttgaatatgaagtgcaaaaatgtggtgcctgtgtatgatctccttcttgagatgcttaatgcccatgtgcttagaggctgcaaatcctccattaccggcagtgagtgtagcccggccgaagactctaagagcaaggaagggtcacagaacccacagtcacagtag

SEQ ID NO: 331380 - DNA, 2060 bp, Artificial Sequence
  derived and/or modified sequence
tttcagtttctccagctgctggctttttggacacccactcccccgccaggaggcagttgcaagcgcggaggctgcgagaaataactgcctcttgaaacttgcagggcgaagagcaggcggcgagcgctgggccggggagggaccacccgagctgcgacgggctctggggctgcggggcagggctggcgcccggagcctgagctgcaggaggtgcgctcgctttcctcaacaggtggcggcggggcgcgcgccgggagaccccccctaatgcgggaaaagcacgtgtccgcattttagagaaggcaaggccggtgtgtttatctgcaagccattatacttgcccacgaatctttgagaacattataatgacctttgtgcctcttcttgcaaggtgttttctcagctgttatctcaagacatggatataaaaaactcaccatctagccttaattctccttcctcctacaactgcagtcaatccatcttacccctggagcacggctccatatacataccttcctcctatgtagacagccaccatgaatatccagccatgacattctatagccctgctgtgatgaattacagcattcccagcaatgtcactaacttggaaggtgggcctggtcggcagaccacaagcccaaatgtgttgtggccaacacctgggcacctttctcctttagtggtccatcgccagttatcacatctgtatgcggaacctcaaaagagtccctggtgtgaagcaagatcgctagaacacaccttacctgtaaacagagagacactgaaaaggaaggttagtgggaaccgttgcgccagccctgttactggtccaggttcaaagagggatgctcacttctgcgctgtctgcagcgattacgcatcgggatatcactatggagtctggtcgtgtgaaggatgtaaggccttttttaaaagaagcattcaaggacataatgattatatttgtccagctacaaatcagtgtacaatcgataaaaaccggcgcaagagctgccaggcctgccgacttcggaagtgttacgaagtgggaatggtgaagtgtggctcccggagagagagatgtgggtaccgccttgtgcggagacagagaagtgccgacgagcagctgcactgtgccggcaaggccaagagaagtggcggccacgcgccccgagtgcgggagctgctgctggacgccctgagccccgagcagctagtgctcaccctcctggaggctgagccgccccatgtgctgatcagccgccccagtgcgcccttcaccgaggcctccatgatgatgtccctgaccaagttggccgacaaggagttggtacacatgatcagctgggccaagaagattcccggctttgtggagctcagcctgttcgaccaagtgcggctcttggagagctgttggatggaggtgttaatgatggggctgatgtggcgctcaattgaccaccccggcaagctcatctttgctccagatcttgttctggacagggatgaggggaaatgcgtagaaggaattctggaaatctttgacatgctcctggcaactacttcaaggtttcgagagttaaaactccaacacaaagaatatctctgtgtcaaggccatgatcctgctcaattccagtatgtaccctctggtcacagcgacccaggatgctgacagcagccggaagctggctcacttgctgaacgccgtgaccgatgctttggtttgggtgattgccaagagcggcatctcctcccagcagcaatccatgcgcctggctaacctcctgatgctcctgtcccacgtcaggcatgcgagtaacaagggcatggaacatctgctcaacatgaagtgcaaaaatgtggtcccagtgtatgacctgctgctggagatgctgaatgcccacgtgcttcgcgggtgcaagtcctccatcacggggtccgagtgcagcccggcagaggacagtaaaagcaaagagggctcccagaacccacagtctcagtgacgcctggccctgaggtgaactggcccacagaggtcacaggctgaagcgt

SEQ ID NO: 331381 - DNA, 1593 bp, Artificial Sequence
  derived and/or modified sequence
atggacatcaagaacagccccagcagcctgaacagccccagcagctacaactgcagccagagcatcctgcccctggagcacggcagcatctacatccccagcagctatgtggacagccaccacgagtacccagccatgaccttctacagccctgctgtgatgaactacagcatccccagcaatgtgaccaacctggagggcggccctggccggcagaccaccagccccaacgtgctgtggcccaccccaggccacctgagccccctggtggtgcaccggcagctgagccacctgtatgcagagccccagaagagcccctggtgtgaggcccggagcctggagcacaccctgcctgtgaaccgggagaccctgaagaggaaggtgtctggcaacagatgtgccagccctgtgacaggccctggcagcaagagagatgcccacttctgtgctgtgtgcagcgactatgccagcggctaccactatggagtgtggagctgtgagggctgcaaggccttcttcaagaggagcatccagggccacaatgactacatctgcccagccaccaaccagtgcaccatcgacaagaacagaaggaagagctgccaggcctgccgcctgaggaagtgctatgaggtgggcatggtgaagtgtggcagccggcgggagcgctgtggctaccgcctggtgcggcggcagaggtctgcagatgagcagctgcactgtgccggcaaggccaagaggtctgggggccacgccccccgggtgcgggagctgctgctggatgccctgagccctgagcagctggtgctgaccctgctggaggccgagccccctcatgtgctgatcagccggcccagcgcccccttcacagaggcctccatgatgatgagcctgaccaagctggccgacaaggagctggtgcacatgatctcctgggccaagaagatccctggctttgtggagctgagcctgtttgaccaggtgcggctgctggagagctgctggatggaggtgctgatgatgggcctgatgtggaggagcattgaccaccctgggaagctgatctttgccccagacctggtgctggacagagatgagggcaaatgtgtggagggcatcctggagatctttgacatgctgctggccaccaccagccgcttccgggagctgaagctgcagcacaaggagtacctgtgtgtgaaggccatgatcctgctgaacagctccatgtaccccctggtgacagccacccaggatgctgacagcagcaggaagctggcccacctgctgaatgctgtgacagatgccctggtgtgggtgattgccaagagcggcatcagcagccagcagcagagcatgaggctggccaacctgctgatgctgctgagccacgtgagacatgccagcaacaagggcatggagcacctgctgaacatgaagtgcaagaatgtggtgcctgtgtatgacctgctgctggagatgctgaatgcccacgtgctgcggggctgcaagagcagcatcaccggctctgaatgttctccagctgaggacagcaagagcaaggagggcagccagaacccccagagccagtag

SEQ ID NO: 331382 - DNA, 1593 bp, Artificial Sequence
  derived and/or modified sequence
atggacatcaagaacagccccagcagcctgaacagccccagcagctacaattgctcccaatccattctaccactcgagcacggatccatttatatcccttcttcctatgttgactcacaccatgagtacccagccatgacattttattccccagccgtaatgaattactctatcccctctaatgttacaaacttggagggagggcccggaaggcagacaactagccctaatgttctttggccgactcccggtcatctaagtcctctagtggtgcataggcaactgtcccatttgtatgccgaaccacagaaaagtccgtggtgtgaggcgcgcagcctggagcataccctgccagtgaatagggagacactgaagagaaaggtgtccgggaatcgctgcgccagtcccgtgaccggccccggcagtaaacgcgacgctcatttttgtgctgtctgttctgactacgcctctggttatcattatggagtgtggagctgtgaagggtgcaaagccttttttaagcgttccatccaagggcacaacgactacatttgtcctgctaccaatcaatgcaccattgataagaatcggcgcaagagctgccaagcatgtaggctgaggaagtgttatgaggtgggaatggttaagtgtgggtccaggcgggagagatgcgggtatcggcttgtgagaagacagcgatctgcggacgaacagctacactgtgcaggcaaggccaagcgctccggcgggcatgccccacgggtgagagagttgcttcttgatgcgctgagtcccgagcagcttgtgttgactttgctcgaagcggagcccccccatgtcctgatctctagacctagcgcaccctttacagaggcgtccatgatgatgagccttaccaaattggccgacaaggagctggtacacatgattagttgggccaagaaaatcccaggattcgtggaactgtctctgtttgaccaggtgcgcctcctggaaagttgctggatggaggtgctcatgatgggactcatgtggcggtctatcgaccatccgggcaagcttatctttgctcccgacctggtcctggatagggatgaaggtaaatgtgtggagggtatcctcgagatttttgacatgctcttggcaacgacctcccggttccgggagctgaagctgcagcataaggagtatctgtgcgtgaaggctatgatcctgttgaactcctctatgtaccctttggtcacagccacccaggacgcggattcaagcagaaagctcgctcacctgctgaacgccgttaccgatgctttggtttgggtgatcgctaagagcggtatcagttctcaacagcaatcgatgcggttagcgaacttattaatgttactctctcatgttaggcacgcatcaaacaaaggcatggaacatttgctcaacatgaagtgtaaaaacgtagtccctgtgtacgatctgctgctggaaatgctgaatgctcatgttctgcggggctgtaaaagctctattacgggaagtgagtgcagtccagcagaggactcaaaatctaaggagggctctcagaaccctcagagccaatag

SEQ ID NO: 331383 - DNA, 1593 bp, Artificial Sequence
  derived and/or modified sequence
atggacataaaaaacagtccatcgtctttaaactctccttctagctataactgctcccagtcgattctcccgctggaacatgggagcatctacattcccagtagctacgttgacagccatcacgagtatcccgctatgacattttattctcccgctgttatgaattatagcatcccttccaacgtaaccaacctggaaggtggaccaggtcggcagaccacctctccaaacgttttatggcctacaccaggacacttgtctccgctagtcgtccaccgccagctgagccacctgtatgctgaacctcaaaagtccccatggtgtgaagcaagatcgctcgagcacacacttccagtgaaccgcgagacactcaaacgcaaggtgtcaggtaatagatgcgcctcacccgtgactgggccaggttccaagcgcgacgcccacttttgcgcagtttgcagtgactatgccagtggttaccactacggcgtgtggtcctgcgaagggtgtaaggctttcttcaagcgttcaattcagggccacaatgactacatttgccccgcaaccaaccaatgcacaatcgataagaatcgaagaaagagctgtcaggcttgcagattgagaaagtgttacgaagttgggatggtaaaatgcggttcacggagggagagatgtgggtacagactcgtgcgccgtcaaaggtccgcggacgagcagctgcattgcgcagggaaggctaaacggtcaggagggcatgctccaagggtgcgcgagctgttgctcgatgccctcagcccagaacagttggtgctgactttgctcgaagccgagcctccacacgtactgatatccagacctagcgctccgtttaccgaggcctcgatgatgatgagtcttaccaagctcgcggacaaggagctggttcatatgatttcatgggctaagaagattccaggatttgtcgagctgtcactgttcgatcaggtccggttgctcgagagttgttggatggaagttctgatgatggggctcatgtggagaagtatcgaccaccctggcaagctgatctttgcccctgacttggtcttggatcgtgacgaaggtaaatgtgttgaagggatactcgaaatttttgacatgctcctggctacaacgagcagatttcgtgagctgaaattgcaacataaagaatatttatgtgtgaaagctatgatcctcctgaacagctctatgtatcccttggtgactgccactcaagacgccgacagctcccgcaaactcgctcacctgttgaacgccgtgacggacgccctggtttgggtgatcgctaaatccggaattagctctcagcaacaatccatgagattagcaaacctgttaatgcttctatctcacgtaagacatgcctctaacaagggtatggagcaccttctgaacatgaagtgtaagaatgtggtgcccgtctatgacttactgctggagatgttaaacgcgcatgttctaagagggtgcaagagttcaattactggatccgagtgttcccccgctgaagattcaaaatctaaggaagggtcccagaacccacagagccagtag

SEQ ID NO: 331384 - protein, 500 aa, Artificial Sequence
  derived and/or modified sequence
MSSDDRHLGSSCGSFIKTEPSSPSSGIDALSHHSPSGSSDASGGFGLALGTHANGLDSPPMFAGAGLGGTPCRKSYEDCASGIMEDSAIKCEYMLNAIPKRLCLVCGDIASGYHYGVASCEACKAFFKRTIQGNIEYSCPATNECEITKRRRKSCQACRFMKCLKVGMLKEGVRLDRVRGGRQKYKRRLDSESSPYLSLQISPPAKKPLTKIVSYLLVAEPDKLYAMPPPGMPEGDIKALTTLCDLADRELVVIIGWAKHIPGFSSLSLGDQMSLLQSAWMEILILGIVYRSLPYDDKLVYAEDYIMDEEHSRLAGLLELYRAILQLVRRYKKLKVEKEEFVTLKALALANSDSMYIEDLEAVQKLQDLLHEALQDYELSQRHEEPWRTGKLLLTLPLLRQTAAKAVQHFYSVKLQGKVPMHKLFLEMLEAKAWARADSLQEWRPLEQVPSPLHRATKRQHVHFLTPLPPPPSVAWVGTAQAGYHLEVFLPQRAGWPRAA

SEQ ID NO: 331385 - DNA, 1503 bp, Artificial Sequence
  derived and/or modified sequence
atgtccagcgatgacagacacctgggctccagctgtggaagcttcatcaaaacagagccatcaagtccatccagtgggattgacgccctgagtcaccactcaccaagcggttcgagcgacgccagtggaggttttggattagccctgggcacccatgccaacggcctggacagcccacctatgtttgccggagccggcctgggcgggactccttgtcgaaaatcctacgaggactgtgccagcgggataatggaagacagcgctattaagtgcgagtatatgctgaacgcaatacccaaacgcctttgtcttgtgtgcggggacatcgcctccggatatcattacggcgtcgcctcttgtgaggcttgcaaagccttttttaagagaaccatccagggaaacatcgaatactcttgcccagcaactaacgagtgcgaaatcaccaaacgccgacgtaaaagctgccaggcctgtcgctttatgaagtgccttaaggttgggatgcttaaggaaggcgtaaggctcgatagagttcgcggggggcggcagaaatataagcggcggctcgattccgagtcttctccatatttgtcgttacagatctctccacctgccaagaaacccctcactaagatagtgtcttacctgctggtagctgaacccgacaagctgtacgctatgccccctccagggatgcctgagggtgatatcaaagctctgactactctttgtgaccttgccgatagagagcttgtcgtgatcattggctgggccaaacacattcccggcttttccagccttagtctgggcgatcagatgagcctactccagtctgcctggatggagatcctgattctcggaatcgtctatcggtccctgccctatgatgacaaactggtctatgcagaggactatatcatggatgaagagcacagccgtctggccggactcctagagctctatcgagcaatcctgcagcttgtgcgaagatataaaaagctgaaggtcgaaaaggaagagttcgtcaccctgaaagccctggcactcgcaaacagtgactccatgtatattgaagatcttgaggctgttcagaagctgcaagatttgctgcatgaggcgctccaggactacgaattatcccagaggcacgaagaaccctggaggacgggaaaattactgctcacgctcccgctcctccgacagaccgcggctaaggccgttcaacatttctatagcgtaaagctacaggggaaagtcccaatgcacaagctgtttctcgagatgctggaagctaaggcgtgggcccgcgccgactctctccaggaatggaggccactggaacaagtcccatctcctctgcacagggccacaaaacgccaacacgtacattttttgacccccttaccaccccctccctcagttgcatgggtggggactgcacaggccgggtatcatctggaagtgttcctgccgcagcgagccggatggcctcgagccgcctag

SEQ ID NO: 331386 - DNA, 1503 bp, Artificial Sequence
  derived and/or modified sequence
atgtcttctgatgaccggcatctaggctcatcctgcggatcttttattaagacagagccctcttctccctcttccgggatcgatgccctgagtcaccactctccctccggaagttccgatgcttccggcggattcgggttggcgcttggaactcatgctaatggcctggacagcccgcccatgttcgccggagccgggttgggaggaaccccgtgcagaaagtcatatgaggattgcgcctccgggattatggaggattctgccattaaatgtgagtatatgctgaacgctatcccaaaaaggctgtgtcttgtgtgtggggacatagcatcgggttaccattatggtgtagcgtcgtgcgaagcatgcaaagccttctttaagcggaccatccaagggaacatagaatactcctgcccggctacaaatgaatgcgaaataacaaagaggaggcgtaagtcctgccaagcgtgtaggtttatgaagtgtcttaaagtgggaatgctgaaagaaggcgtgcggcttgacagagtgagagggggccgtcaaaagtataagaggcgccttgattctgagagcagtccgtacctgagtctgcagatcagcccgccagccaagaaacccctcactaagattgtctcctacttgcttgtggcagagcctgataaactgtacgctatgcctcctcctggaatgcctgaaggagatattaaagcactgacaactctgtgtgacttggcggatcgcgaactggtggtgattatcggctgggctaaacacatccccggcttctcttcattgtctctgggcgaccagatgtccctgctgcagtctgcttggatggagatcctaattctcgggatagtgtatcgctccttgccctacgacgataagctggtgtacgccgaggactacatcatggacgaagagcattcacgactggcgggtcttctagagttgtaccgggctatactgcagttagtgcgtaggtacaagaagctaaaggtcgagaaggaagagtttgtgacactgaaagcgctcgccctcgccaatagcgatagtatgtatatcgaagatctggaggccgtccaaaaattgcaagatcttttacacgaagcgctgcaagattatgagctcagccaaaggcacgaggagccttggcggaccggaaagctcctgctgactctgcctttactacgacaaaccgcggccaaagctgtgcagcatttttattcggtcaagcttcaggggaaagttcccatgcacaaactgttcctcgagatgttggaggcgaaggcatgggcgcgggccgattccctgcaggagtggcgaccacttgagcaagttccctcacctctccacagagctaccaaaagacagcacgtccactttctgactccactgcccccccctcctagcgtcgcctgggtgggcacggcccaggcaggataccatctggaagtcttcctgcctcagagggccggctggccaagggctgcatag

SEQ ID NO: 331387 - DNA, 1503 bp, Artificial Sequence
  derived and/or modified sequence
atgagcagtgatgacagacacctgggcagcagctgtggcagcttcatcaagacagagcccagcagccccagcagcggcattgatgccctgagccaccacagccccagcggcagcagtgatgccagcggcggcttcggcctggccctgggcacccacgccaacggcctggacagcccccccatgtttgctggagctggcctgggcggcaccccctgcaggaagagctatgaggactgtgccagcggcatcatggaggacagcgccatcaagtgtgagtacatgctgaatgccatccccaagaggctgtgcctggtgtgtggggacatcgccagcggctaccactatggagtggccagctgtgaggcctgcaaggccttcttcaagaggaccatccagggcaacatcgagtacagctgcccagccaccaatgaatgtgagatcaccaagagaagaaggaagagctgccaggcctgccgcttcatgaagtgcctgaaggtgggcatgctgaaggagggcgtgcggctggacagagtgcggggcggccggcagaagtacaagaggcggctggacagcgagagcagcccctacctgagcctgcagatcagccccccagccaagaagcccctgaccaagatcgtgtcctacctgctggtggccgagccagacaagctgtatgccatgcctcctcctggcatgcctgagggggacatcaaggccctgaccaccctgtgtgacctggccgaccgggagctggtggtgatcatcggctgggccaagcacatccctggcttcagcagcctgagcctgggggaccagatgagcctgctgcagagcgcctggatggagatcctgatcctgggcatcgtgtaccgcagcctgccctatgatgacaagctggtgtatgcagaggactacatcatggatgaggagcacagccggctggccggcctgctggagctgtaccgggccatcctgcagctggtgcggcgctacaagaagctgaaggtggagaaggaggagtttgtgaccctgaaggccctggccctggccaacagcgacagcatgtacatcgaggacctggaggccgtgcagaagctgcaggacctgctgcacgaggccctgcaggactatgagctgagccagagacatgaggagccctggaggacaggcaagctgctgctgaccctgcccctgctgcggcagacagctgccaaggctgtgcagcacttctacagcgtgaagctgcagggcaaggtgcccatgcacaagctgttcctggagatgctggaggccaaggcctgggcccgggctgacagcctgcaggagtggaggcccctggagcaggtgcccagccccctgcaccgggccaccaagaggcagcacgtgcacttcctgacccccctgcccccacctccttctgtggcctgggtgggcacagcccaggccggctaccacctggaggtgttcctgccccagagagctggctggcccagggctgcctag

SEQ ID NO: 331388 - DNA, 1503 bp, Artificial Sequence
  derived and/or modified sequence
atgagcagcgacgaccggcacctgggcagcagctgcggcagcttcatcaaaaccgaacccagttcacctagctcaggcatcgatgccctgagtcaccactctccatcaggtagctccgacgcatcagggggatttggtctagccctgggaactcacgccaacggtctggattccccacccatgttcgccggcgctggactcggtgggacgccatgccggaagagctacgaggattgcgccagcgggattatggaggactccgccattaagtgcgagtatatgctgaacgctattccaaaacgcctctgtttggtgtgcggtgacatagctagtggctaccactacggcgtggcgtcgtgtgaggcctgcaaggctttcttcaagcggacaatccagggcaatatcgaatattcatgcccagcgaccaacgagtgtgagatcaccaagaggcggcggaaatcctgccaagcctgtcgcttcatgaagtgcctgaaggtggggatgctcaaagagggcgtaaggctggaccgggtcaggggtggaaggcagaagtacaaacgacgactagactctgaatctagcccatacctcagtcttcagatctcacctcctgcaaaaaaaccactcacgaagattgtcagctacctcctggtggcagagccagataaactttacgccatgccaccgcccggaatgcctgagggagatattaaggcattgacaaccttatgcgacctagccgaccgggaactggtggttatcatcgggtgggcgaagcatattccgggtttctcctcactcagcttgggggaccaaatgtctctccttcaaagcgcatggatggagattctgatcctcggaatcgtctataggtctctgccctatgacgacaaattggtgtacgcagaggactacattatggatgaagagcactcccggttggcgggactgcttgagctgtatcgcgccatcctgcagctggtgagaagatacaagaagctcaaggttgagaaggaagagttcgttacgctgaaggccctcgctctcgccaatagtgattccatgtatatcgaagatctcgaggcagtgcagaagctccaggatttgctgcacgaggctttacaggattacgaactaagtcagcgccatgaagagccttggagaaccggaaagcttctcttgaccctcccgctcttgagacagaccgcagcaaaagccgtgcagcatttttactcagtcaagctccaggggaaggtgccaatgcacaaactctttcttgagatgctagaagccaaagcctgggcacgcgccgactctttgcaggaatggcgccccttggaacaagtgccttcaccccttcacagagccactaaaaggcaacacgtgcactttcttaccccattgcccccacccccctcagtggcttgggtgggaacagctcaggcaggctaccacctggaagtgtttcttccacaacgcgccggctggcccagagctgcatag

SEQ ID NO: 331389 - DNA, 1503 bp, Artificial Sequence
  derived and/or modified sequence
atgagcagcgacgaccggcacctgggcagcagctgcggcagcttcatcaaaactgagccctcttccccatcgtctgggatcgacgccttatcccatcacagtccctccgggagtagcgatgcttcagggggtttcggtctcgctctgggcacccatgccaacggcctcgacagtcccccaatgtttgctggagctggtttgggcggcaccccctgccggaaatcctacgaagattgtgcctccggtataatggaggactccgccataaagtgtgagtacatgctcaatgcgatccccaagagactgtgcttagtgtgcggcgatatagccagtggctatcattatggggtcgccagctgcgaggcctgcaaggcctttttcaagcgaacaatacaggggaacatcgagtattcatgccccgccactaatgagtgcgaaattacaaaacgccgcaggaaatcatgtcaggcctgcagatttatgaaatgtctaaaagtaggtatgctgaaggagggcgtgcgcctcgatcgcgtgcgcggaggaagacagaaatataaaaggcggctggattcagagtcttccccttacctgtcgctgcaaataagccctcccgccaagaaacccctgaccaagatagtttcctacttgctggtagctgaacccgacaagctgtacgccatgcctccaccaggcatgcctgaaggtgacatcaaggctctgaccaccctttgcgacctggcagacagagagctcgtggtaattatcgggtgggctaaacacatcccagggttttcgagcttgtctctgggcgatcaaatgagcttgctacagtccgcttggatggagattctcatcctgggaattgtgtacaggtcccttccttacgacgacaagttggtctacgctgaagactatattatggacgaggaacactctaggctggcgggactgctcgagctgtaccgagccattctacagctagtgaggagatacaagaaactgaaggtggaaaaggaagagttcgtgacccttaaagccctggcattagccaattccgactcgatgtatatagaggacctggaagcagtgcagaagctgcaggacctcctgcacgaagccctccaggactacgagctctcgcaacgacacgaggagccgtggagaactggcaaactgctgttgacattacctctgttaaggcagaccgcagcgaaagccgtacaacatttctactctgtcaagttgcagggtaaggtgccaatgcacaagttgttcttagagatgctggaggctaaagcctgggccagggccgatagcctgcaggagtggcgacccctggagcaggtgccttcacctctgcatcgggcaacgaagcggcagcatgtacatttcctcacacctttgccaccccctcctagcgtggcatgggtcggaaccgctcaggctggctaccacctggaggtattcctgcctcaacgcgctggctggccgagagccgcctag

SEQ ID NO: 331390 - DNA, 1503 bp, Artificial Sequence
  derived and/or modified sequence
atgtctagtgatgatcgtcacttaggtagttcttgtggcagcttcatcaaaacagaaccatcttcacccagctccgggattgacgccctgtcacaccactcaccctccggctcctccgatgccagcggcggtttcgggctggccctgggtacccacgccaacgggctcgattctccaccaatgtttgcaggggctgggctcggtgggactccttgccgtaaatcatacgaagactgcgcaagcggaatcatggaggactccgcaataaaatgcgagtacatgctgaatgccattcccaaacggctctgtctggtctgcggggacatagcctctggctatcactatggtgtagcctcgtgcgaggcttgtaaggccttctttaagcgaacgatccagggaaacatcgagtatagctgtccagcaaccaacgagtgcgaaatcactaagcgccgacgcaagtcgtgtcaggcatgccgattcatgaagtgtctgaaggtgggtatgctgaaggaaggcgtgcggcttgaccgtgtccgaggcggacgccagaagtataaaagaagattagattccgaatcctcaccatacctgagtcttcagatcagcccccctgccaagaagcctttaaccaagattgtgtcctatctgctggtcgctgagcccgataagctgtacgccatgccgccacccggaatgcccgagggggatatcaaggcattaacgacactctgcgacctcgccgatcgtgagttggtggtgattatcggttgggctaagcacatccccggtttcagttccctgtccttgggcgatcaaatgtcactacttcaatctgcctggatggagatccttatccttggcattgtctatcggagtctgccctatgacgataaactggtttatgctgaagactatataatggatgaagagcactcacgacttgccggtctccttgagctctaccgggctatacttcagctggtacgtcggtataagaagctcaaggtagaaaaagaggagtttgtaaccctgaaggccctggctctagcgaattctgattctatgtatattgaagatctggaggcggtccagaaattgcaagatctgcttcacgaagccctgcaggattatgagttatcccagcgtcatgaggagccttggagaacaggcaaacttctgcttacattgcctctgctgaggcagactgcagccaaagcagtgcagcacttctatagcgtcaagctgcaagggaaggttccaatgcataaactgtttctcgagatgctagaggccaaagcgtgggcccgagcggatagcctccaagagtggcggcctttggagcaggtccccagcccacttcaccgagccaccaaacggcagcatgtgcactttctaacccctctgcctccacccccttccgtggcctgggtgggcacagcccaagcgggttaccacttggaggtgttcctgccacagcgcgcaggttggccaagggcggcatag

SEQ ID NO: 331391 - DNA, 1503 bp, Artificial Sequence
  derived and/or modified sequence
atgtcatcagatgacagacacctcggatcctcttgcgggagcttcatcaaaaccgagccatcttcccccagcagtggaatagatgcactgagccaccactctccttccggaagttctgatgccagtggcggattcgggttggctctggggacccacgcaaacggcctcgatagccccccaatgtttgccggagctgggctaggagggacgccttgccgcaagtcgtacgaggattgtgcctctggaattatggaggacagcgctataaagtgcgagtatatgttaaatgctattcctaagcgactgtgccttgtgtgtggagatatcgccagcggctaccattatggcgtggcctcatgtgaagcctgcaaagcctttttcaaacgcacgatacagggaaacatcgagtacagctgtccggcaacaaacgagtgtgaaattaccaagaggcggaggaagtcctgccaagcctgccggttcatgaaatgtctcaaagtgggcatgctcaaagagggcgttagattggatcgagtcagaggcggacgacaaaagtacaagaggaggctagatagtgagtcgagcccctacctgtcactgcagatctcacctcctgcgaagaagccccttaccaaaatcgtctcttacttattggtcgcagaaccagataagttatatgctatgccccctcccggtatgcctgaaggagatatcaaagccctgacaactttgtgcgatctggctgatagggagctcgtagtaattataggttgggctaaacatattcctggcttcagttccttgtcactaggtgaccagatgtctttgctccagtcagcctggatggaaattcttatactgggcattgtctataggtcactgccgtacgacgacaagctagtttacgccgaggactacattatggacgaggagcacagccgcctggcgggtcttctggagctctaccgagccattctgcaactcgtcaggcgatacaaaaaacttaaggtcgaaaaagaagagttcgtcaccctaaaagctctggccctagcaaacagtgatagtatgtacatagaggacctcgaggccgtccagaagctgcaggacttactgcacgaggctctgcaggattatgaattgtcccaaagacacgaggaaccgtggcggacaggcaaactactgctgactttgcccctcctgaggcaaaccgccgctaaagcagtgcagcatttttacagtgtcaagctgcagggtaaagtacctatgcacaaacttttcctggagatgctagaggcaaaagcttgggccagggctgacagcttgcaggaatggaggccccttgaacaggtgccctccccgctgcatagagctaccaagaggcagcacgtgcatttcttaactcccctccctcctcctccatccgtcgcttgggttggtactgcacaagccggttatcatttagaggtctttttgccacagcgcgctggatggcccagagccgcttag

SEQ ID NO: 331392 - DNA, 1503 bp, Artificial Sequence
  derived and/or modified sequence
atgagcagcgacgacagacacctgggcagcagctgcggcagcttcatcaagaccgagcccagcagccccagcagcggcatcgacgccctgagccaccacagccccagcggcagcagcgacgccagcggcggcttcggcctggccctgggcacccacgccaacggcctggacagcccccccatgttcgccggcgccggcctgggcggcaccccctgcagaaagagctacgaggactgcgccagcggcatcatggaggacagcgccatcaagtgcgagtacatgctgaacgccatccccaagagactgtgcctggtgtgcggcgacatcgccagcggctaccactacggcgtggccagctgcgaggcctgcaaggccttcttcaagagaaccatccagggcaacatcgagtacagctgccccgccaccaacgagtgcgagatcaccaagagaagaagaaagagctgccaggcctgcagattcatgaagtgcctgaaggtgggcatgctgaaggagggcgtgagactggacagagtgagaggcggcagacagaagtacaagagaagactggacagcgagagcagcccctacctgagcctgcagatcagcccccccgccaagaagcccctgaccaagatcgtgagctacctgctggtggccgagcccgacaagctgtacgccatgcccccccccggcatgcccgagggcgacatcaaggccctgaccaccctgtgcgacctggccgacagagagctggtggtgatcatcggctgggccaagcacatccccggcttcagcagcctgagcctgggcgaccagatgagcctgctgcagagcgcctggatggagatcctgatcctgggcatcgtgtacagaagcctgccctacgacgacaagctggtgtacgccgaggactacatcatggacgaggagcacagcagactggccggcctgctggagctgtacagagccatcctgcagctggtgagaagatacaagaagctgaaggtggagaaggaggagttcgtgaccctgaaggccctggccctggccaacagcgacagcatgtacatcgaggacctggaggccgtgcagaagctgcaggacctgctgcacgaggccctgcaggactacgagctgagccagagacacgaggagccctggagaaccggcaagctgctgctgaccctgcccctgctgagacagaccgccgccaaggccgtgcagcacttctacagcgtgaagctgcagggcaaggtgcccatgcacaagctgttcctggagatgctggaggccaaggcctgggccagagccgacagcctgcaggagtggagacccctggagcaggtgcccagccccctgcacagagccaccaagagacagcacgtgcacttcctgacccccctgccccccccccccagcgtggcctgggtgggcaccgcccaggccggctaccacctggaggtgttcctgccccagagagccggctggcccagagccgcctag

SEQ ID NO: 331393 - DNA, 1794 bp, Artificial Sequence
  derived and/or modified sequence
tttaggccagaggtgatccagtgatttgggagctgcaggtcacacaggctgctcagagggctgctgaacaggatgtcctcggacgacaggcacctgggctccagctgcggctccttcatcaagactgagccgtccagcccgtcctcgggcatcgatgccctcagccaccacagccccagtggctcgtccgacgccagcggcggctttggcctggccctgggcacccacgccaacggtctggactcgccacccatgtttgcaggcgccgggctgggaggcaccccatgccgcaagagctacgaggactgtgccagcggcatcatggaggactcggccatcaagtgcgagtacatgctcaacgccatccccaagcgcctgtgcctcgtgtgcggggacattgcctctggctaccactacggcgtggcctcctgcgaggcttgcaaggccttcttcaagaggactatccaagggaacattgagtacagctgcccggccaccaacgagtgcgagatcaccaaacggaggcgcaagtcctgccaggcctgccgcttcatgaaatgcctcaaagtggggatgctgaaggaaggtgtgcgccttgatcgagtgcgtggaggccgtcagaaatacaagcgacggctggactcagagagcagcccatacctgagcttacaaatttctccacctgctaaaaagccattgaccaagattgtctcatacctactggtggctgagccggacaagctctatgccatgcctccccctggtatgcctgagggggacatcaaggccctgaccactctctgtgacctggcagaccgagagcttgtggtcatcattggctgggccaagcacatcccaggcttctcaagcctctccctgggggaccagatgagcctgctgcagagtgcctggatggaaatcctcatcctgggcatcgtgtaccgctcgctgccctatgacgacaagctggtgtacgctgaggactacatcatggatgaggagcactcccgcctcgcggggctgctggagctctaccgggccatcctgcagctggtacgcaggtacaagaagctcaaggtggagaaggaggagtttgtgacgctcaaggccctggccctcgccaactccgattccatgtacatcgaggatctagaggctgtccagaagctgcaggacctgctgcacgaggcactgcaggactacgagctgagccagcgccatgaggagccctggaggacgggcaagctgctgctgacactgccgctgctgcggcagacggccgccaaggccgtgcagcacttctatagcgtcaaactgcagggcaaagtgcccatgcacaaactcttcctggagatgctggaggccaaggcctgggccagggctgactcccttcaggagtggaggccactggagcaagtgccctctcccctccaccgagccaccaagaggcagcatgtgcatttcctaactcccttgccccctcccccatctgtggcctgggtgggcactgctcaggctggataccacctggaggttttccttccgcagagggcaggttggccaagagcagcttagaggatctcccaaggatgaaagaatgtcaagccatgatggaaaatgccccttccaatcagctgccttcacaagcagggatcagagcaactccccggggatccccaatccacgcccttctagtccaacccccctcaatgagagaggcaggcagatctcacccagcactaggacaccaggaggccagggaaagcatctctggctcaccatgtaacatctggc

SEQ ID NO: 331394 - DNA, 2432 bp, Artificial Sequence
  derived and/or modified sequence
ttcaggaaaagccatcatgtttccgcagcatttatctgtcagcaggagactattatgagagcacaaactcacattgtattagcgttatcagttaattatgatccttgggaccagtgccagccaatgggctagcagtctgctgaccatcactcagggatataactccacacccccaaattcaagcatgtaagaagacagcaggtccgcagagaggtgtggtcagggacatttcccctggccgggagcccatggagcactgtcctcagagatgcgcaggttaggctcactgtctaggccaggcccaccttagtcactgtggactggcaatggaagctcttcctggacacacctgccctagccctcaccctggggtggaagagaaatgagcttggcttgcaactcagaccattccacggaggcatcctccccttcctgggctggtgaataaaagtttcctgaggtcaaggacttccttttccctgccaaaatggtgtccagaactttgaggccagaggtgatccagtgatttgggagctgcaggtcacacaggctgctcagagggctgctgaacaggatgtcctcggacgacaggcacctgggctccagctgcggctccttcatcaagactgagccgtccagcccgtcctcgggcatcgatgccctcagccaccacagccccagtggctcgtccgacgccagcggcggctttggcctggccctgggcacccacgccaacggtctggactcgccacccatgtttgcaggcgccgggctgggaggcaccccatgccgcaagagctacgaggactgtgccagcggcatcatggaggactcggccatcaagtgcgagtacatgctcaacgccatccccaagcgcctgtgcctcgtgtgcggggacattgcctctggctaccactacggcgtggcctcctgcgaggcttgcaaggccttcttcaagaggactatccaagggaacattgagtacagctgcccggccaccaacgagtgcgagatcaccaaacggaggcgcaagtcctgccaggcctgccgcttcatgaaatgcctcaaagtggggatgctgaaggaaggtgtgcgccttgatcgagtgcgtggaggccgtcagaaatacaagcgacggctggactcagagagcagcccatacctgagcttacaaatttctccacctgctaaaaagccattgaccaagattgtctcatacctactggtggctgagccggacaagctctatgccatgcctccccctggtatgcctgagggggacatcaaggccctgaccactctctgtgacctggcagaccgagagcttgtggtcatcattggctgggccaagcacatcccaggcttctcaagcctctccctgggggaccagatgagcctgctgcagagtgcctggatggaaatcctcatcctgggcatcgtgtaccgctcgctgccctatgacgacaagctggtgtacgctgaggactacatcatggatgaggagcactcccgcctcgcggggctgctggagctctaccgggccatcctgcagctggtacgcaggtacaagaagctcaaggtggagaaggaggagtttgtgacgctcaaggccctggccctcgccaactccgattccatgtacatcgaggatctagaggctgtccagaagctgcaggacctgctgcacgaggcactgcaggactacgagctgagccagcgccatgaggagccctggaggacgggcaagctgctgctgacactgccgctgctgcggcagacggccgccaaggccgtgcagcacttctatagcgtcaaactgcagggcaaagtgcccatgcacaaactcttcctggagatgctggaggccaaggcctgggccagggctgactcccttcaggagtggaggccactggagcaagtgccctctcccctccaccgagccaccaagaggcagcatgtgcatttcctaactcccttgccccctcccccatctgtggcctgggtgggcactgctcaggctggataccacctggaggttttccttccgcagagggcaggttggccaagagcagcttagaggatctcccaaggatgaaagaatgtcaagccatgatggaaaatgccccttccaatcagctgccttcacaagcagggatcagagcaactccccggggatccccaatccacgcccttctagtccaacccccctcaatgagagaggcaggcagatctcacccagcactaggacaccaggaggccagggaaagcatctctggctcaccatgtaacatctggcttggagcaagtgggtgttctgcacaccaggcagctgcacctcactggatctagtgttgctgcgagtgacctcacttcagagcccctctagcagagtggggcggaagtcctgatggttggtgtccatgaggtggaag

SEQ ID NO: 331395 - protein, 508 aa, Artificial Sequence
  derived and/or modified sequence
MLLNRMSSDDRHLGSSCGSFIKTEPSSPSSGIDALSHHSPSGSSDASGGFGLALGTHANGLDSPPMFAGAGLGGTPCRKSYEDCASGIMEDSAIKCEYMLNAIPKRLCLVCGDIASGYHYGVASCEACKAFFKRTIQGNIEYSCPATNECEITKRRRKSCQACRFMKCLKVGMLKEGVRLDRVRGGRQKYKRRLDSESSPYLSLQISPPAKKPLTKIVSYLLVAEPDKLYAMPPPGMPEGDIKALTTLCDLADRELVVIIGWAKHIPGFSSLSLGDQMSLLQSAWMEILILGIVYRSLPYDDKLVYAEDYIMDEEHSRLAGLLELYRAILQLVRRYKKLKVEKEEFVTLKALALANSDSMYIEDLEAVQKLQDLLHEALQDYELSQRHEEPWRTGKLLLTLPLLRQTAAKAVQHFYSVKLQGKVPMHKLFLEMLEAKVGQEQLRGSPKDERMSSHDGKCPFQSAAFTSRDQSNSPGIPNPRPSSPTPLNERGRQISPSTRTPGGQGKH

SEQ ID NO: 331396 - DNA, 3029 bp, Artificial Sequence
  derived and/or modified sequence
ccgcagagaggtgtggtcagggacatttcccctggccgggagcccatggagcactgtcctcagagatgcgcaggttaggctcactgtctaggccaggcccaccttagtcactgtggactggcaatggaagctcttcctggacacacctgccctagccctcaccctggggtggaagagaaatgagcttggcttgcaactcagaccattccacggaggcatcctccccttcctgggctggtgaataaaagtttcctgaggtcaaggacttccttttccctgccaaaatggtgtccagaactttgaggccagaggtgatccagtgatttgggagctgcaggtcacacaggctgctcagagggctgctgaacaggatgtcctcggacgacaggcacctgggctccagctgcggctccttcatcaagactgagccgtccagcccgtcctcgggcatcgatgccctcagccaccacagccccagtggctcgtccgacgccagcggcggctttggcctggccctgggcacccacgccaacggtctggactcgccacccatgtttgcaggcgccgggctgggaggcaccccatgccgcaagagctacgaggactgtgccagcggcatcatggaggactcggccatcaagtgcgagtacatgctcaacgccatccccaagcgcctgtgcctcgtgtgcggggacattgcctctggctaccactacggcgtggcctcctgcgaggcttgcaaggccttcttcaagaggactatccaagggaacattgagtacagctgcccggccaccaacgagtgcgagatcaccaaacggaggcgcaagtcctgccaggcctgccgcttcatgaaatgcctcaaagtggggatgctgaaggaaggtgtgcgccttgatcgagtgcgtggaggccgtcagaaatacaagcgacggctggactcagagagcagcccatacctgagcttacaaatttctccacctgctaaaaagccattgaccaagattgtctcatacctactggtggctgagccggacaagctctatgccatgcctccccctggtatgcctgagggggacatcaaggccctgaccactctctgtgacctggcagaccgagagcttgtggtcatcattggctgggccaagcacatcccaggcttctcaagcctctccctgggggaccagatgagcctgctgcagagtgcctggatggaaatcctcatcctgggcatcgtgtaccgctcgctgccctatgacgacaagctggtgtacgctgaggactacatcatggatgaggagcactcccgcctcgcggggctgctggagctctaccgggccatcctgcagctggtacgcaggtacaagaagctcaaggtggagaaggaggagtttgtgacgctcaaggccctggccctcgccaactccgattccatgtacatcgaggatctagaggctgtccagaagctgcaggacctgctgcacgaggcactgcaggactacgagctgagccagcgccatgaggagccctggaggacgggcaagctgctgctgacactgccgctgctgcggcagacggccgccaaggccgtgcagcacttctatagcgtcaaactgcagggcaaagtgcccatgcacaaactcttcctggagatgctggaggccaaggttggccaagagcagcttagaggatctcccaaggatgaaagaatgtcaagccatgatggaaaatgccccttccaatcagctgccttcacaagcagggatcagagcaactccccggggatccccaatccacgcccttctagtccaacccccctcaatgagagaggcaggcagatctcacccagcactaggacaccaggaggccagggaaagcatctctggctcaccatgtaacatctggcttggagcaagtgggtgttctgcacaccaggcagctgcacctcactggatctagtgttgctgcgagtgacctcacttcagagcccctctagcagagtggggcggaagtcctgatggttggtgtccatgaggtggaagctgcttttatacttaaaactcagatcacaacaggaaatgtgtcagtaacaatggaactccatccaatgggaaagttcctggtactgaaggggtccattggacactcagaaaagaagttcaggggccaacttcttagctggaatcctggccagatgaggaccctctccggggaagggagaggactgacttagtggaaggtggtgaagtgaggagagtttaggggaaccttcccccagtggaacagatctcaagtttaccctaaacctgccatttctggaaaatctgtaaagaggaaacagcctgtctcagctgtactctcatgatacaggtcatttgaaatgaaccaagaaataaaacatgaaaatccaaccatggagaaggtggtatggctgggttttgtttggtccccttgtccttatacgttctaaagtttccagactggctttgtcactttgtgaactcgtcatgtgtgaaaaccaatctttgcatatagggaacttcctcgggccacactttaagaaccaagtaagaggctctcaagactccagcagagtcgggaggccatggcagcgccttagaggagctggaacctgcacccacctgtgtcggtggggggggcctcctttccccatagactctgccctccctctgtgcagatggaagtggcaggggagggtgaccagcttgtgacaagaagactgaagggtccagagtccatgctcacggaacagcaccaaagaaaagcactatgtggaaagattgttttattttctaataatgataatatggctggaatggcttcttaagatgtatatattttttaaaatggcagttccccattgcagcatcacctacttgtatgtctttctgcctctgtatatgttctcccagaaacccccatgtaaatcaaatgccctaggatgcttccatcctggtcccatgtatctggaatctaataaataaggaaaggaaaaaaaaaaaaaaaaa

SEQ ID NO: 331397 - DNA, 1527 bp, Artificial Sequence
  derived and/or modified sequence
atgtctagtgatgacaggcatctgggcagttcctgcggaagtttcattaagactgaaccttcatcaccttccagcggcatagatgccctttcacaccacagtccgagcgggagcagtgacgccagtgggggatttgggctcgctctgggaacacacgcaaacgggctggatagtcccccgatgttcgcaggggctggacttggcggaacaccctgcaggaagtcatatgaagattgcgcatctgggattatggaagattctgctatcaaatgcgagtacatgctgaatgctatccccaaaagactgtgtctggtgtgcggggatatagcaagcggataccattatggcgtggcatcttgcgaagcctgtaaggcgttttttaagcgcacaattcagggaaatattgaatatagttgccccgcgaccaatgaatgcgagattaccaaaaggcgcagaaaatcttgccaggcatgtcgtttcatgaaatgtctgaaagtgggaatgttgaaagagggagtgcgactggatcgagtgagaggggggagacagaagtataagcgccgacttgactcagagtcatccccatatctttcactgcagatctcaccccccgctaagaaacccctgaccaaaatcgtcagttacctcctagtcgctgagccagataaactatatgccatgcccccccccggaatgcctgaaggagatattaaagccctcacaaccctttgtgaccttgccgaccgcgaattagtggtgattatcggatgggctaagcatatccctggtttctcgagcctctccctgggagatcagatgtccctcttgcagtccgcttggatggaaatcctcatattaggcatcgtttatcgaagtctcccatacgacgataaattggtatatgcggaagactatattatggacgaggagcactctagattggccggattactggagctgtacagggcgatcttgcagttagtgagaagatataaaaagctgaaggttgaaaaagaggagtttgtaacactcaaggccctggctctggccaacagtgacagcatgtacattgaagatttggaggcagtgcagaaactccaggacctactgcacgaggccttgcaagattatgagttgtctcagcgacacgaggagccttggcgcaccggcaaactgctgctcacactgcccctcttacggcagaccgccgcaaaagccgtgcagcacttctattcagtgaagttgcagggtaaagtgccaatgcacaagctatttctggagatgctggaggcaaaagtggggcaggagcaactgcggggtagtccaaaggatgagaggatgagctcacatgacgggaagtgcccatttcagagcgctgcttttacctcccgtgaccagagtaacagcccgggaatcccaaatccgaggccctcaagtccgacaccactaaacgagcgagggaggcagatttcacctagtactaggaccccaggaggccaaggcaagcacctgtggctgacaatgtag

SEQ ID NO: 331398 - DNA, 1527 bp, Artificial Sequence
  derived and/or modified sequence
atgtcctccgatgataggcacttgggcagctcctgcggcagctttataaagacagagccctctagcccgtcttctggcatagacgccttgtcacatcactctccaagcggctccagcgatgcatccggaggatttggtctggccctgggtactcacgccaacgggcttgactccccgcctatgttcgctggtgccggattggggggaacaccttgcaggaagtcatatgaggattgcgcgtctggcattatggaagactccgccataaaatgcgagtacatgctcaatgcaatcccgaagcgtctctgcttagtctgcggtgacattgcctccggataccactacggtgtggcatcctgcgaggcttgtaaggctttcttcaagcgcacgattcagggcaacatagaatactcctgtcctgctaccaacgagtgcgagattacaaaaagacgccggaagagttgccaagcctgtcggttcatgaaatgcctaaaagtgggtatgctaaaggaaggcgttcgattagatcgtgtccgcgggggacgccagaaatataagcgaagactggactctgaaagctcaccctatctttccctccagatatcaccgcccgcaaagaaaccactcactaaaattgtttcataccttttggtggcggagccggataaactctatgccatgcctcctcctggtatgcccgaaggcgacatcaaggccctcacaaccttatgcgaccttgcggatcgtgagctagtggtaattatcggttgggccaaacacataccagggttttccagcttgagcctgggagatcagatgagcttacttcagtctgcatggatggagattttaatcctaggcatcgtctaccggagcctaccatatgatgataagctggtttacgcagaggactacataatggatgaagaacacagtcggttagctggcctgctggagctctacagagccatactgcagctggttcgccgctacaaaaaactgaaagtcgagaaggaggagttcgtgaccctcaaagcactggctttggcaaattcagactcgatgtatattgaggatctggaagccgtgcagaagctgcaggacttactgcatgaggctttgcaggattatgagttgtcacagcggcatgaggaaccctggcggactggcaagctcctcctcacacttcccctgctgcgccagacagcagccaaggcagtccaacatttctactctgtaaagcttcaggggaaggttccaatgcataagctgttcttggaaatgttagaggcaaaggtggggcaggaacagcttagaggctcccccaaggatgagcgcatgtcaagtcatgatggcaaatgcccatttcagagcgccgcattcacgagccgcgaccagagtaactctcccggcataccaaaccccaggccctcctctccaaccccactgaacgagcgtggacggcagatttctccctctacccgcacgccgggcggacagggaaaacacctgtggcttacaatgtag

SEQ ID NO: 331399 - DNA, 1527 bp, Artificial Sequence
  derived and/or modified sequence
atgctcctcaacaggatgagttcagacgacagacacctgggcagtagttgtggatcgtttattaagaccgaaccaagctcaccttcatccggcattgatgctctgagtcaccattctccgtctggtagctctgacgcttctggcggttttggacttgcattgggaacccacgccaacggcctggacagcccacccatgtttgctggcgccggcctggggggcaccccttgccggaagagttacgaggactgtgcctcgggtataatggaggactccgcgatcaagtgcgaatacatgctcaacgcaatcccaaagaggctgtgcttggtgtgcggcgatatcgcctccggttaccactacggcgtagcttcttgtgaagcctgcaaggcttttttcaagagaaccattcagggtaacatcgagtactcttgcccggctaccaacgagtgcgagataaccaagcggcggcgaaagagttgtcaagcctgccggttcatgaagtgtttgaaagttgggatgctaaaggagggggttcgactggaccgggttcgaggagggaggcagaagtataaaaggagactcgatagcgaatcttctccctatttgagtttgcagattagtcctcccgctaagaagcccttaaccaagatcgtctcgtacctcctggtcgccgagcccgataagctgtacgctatgccccctcctggtatgcctgaaggggatattaaggcattaacaactctgtgcgacttagcggatagggagctcgtggtgattattgggtgggctaagcatattccaggattctccagcttgtccctgggagatcaaatgagcctgcttcagagcgcttggatggagatcctcatcctcggaattgtctataggagtttgccttacgatgacaagcttgtgtatgccgaggactacatcatggatgaagaacactccaggctggcagggttactggagttatatcgtgctattcttcaactcgtgcgcagatataagaagttaaaggttgaaaaggaggaattcgtcaccctaaaggcgctagcgctcgcaaacagcgattcaatgtacatagaggatttggaggccgtgcagaagctccaagacctgcttcacgaggctctccaagattatgagctttcgcagaggcacgaagagccctggcggactggcaaactgctacttaccctgccgttgctaaggcagaccgctgcaaaggcagtgcaacatttctactctgttaagctccaaggtaaagtaccaatgcacaagctcttcctcgagatgctggaagcaaaggtcggacaagaacagcttagaggttcaccaaaggatgagagaatgtctagccatgatggaaagtgcccctttcagagtgccgcttttacctctcgggatcaaagtaactcgcccggcatccccaatcctagacccagctctccgacccccctgaacgagaggggacgccagatcagcccctccacgcggacacccggaggacagggtaagcactag

SEQ ID NO: 331400 - DNA, 1527 bp, Artificial Sequence
  derived and/or modified sequence
atgagcagtgatgacagacacctgggcagcagctgtggcagcttcatcaagacagagcccagcagccccagcagcggcattgatgccctgagccaccacagccccagcggcagcagtgatgccagcggcggcttcggcctggccctgggcacccacgccaacggcctggacagcccccccatgtttgctggagctggcctgggcggcaccccctgcaggaagagctatgaggactgtgccagcggcatcatggaggacagcgccatcaagtgtgagtacatgctgaatgccatccccaagaggctgtgcctggtgtgtggggacatcgccagcggctaccactatggagtggccagctgtgaggcctgcaaggccttcttcaagaggaccatccagggcaacatcgagtacagctgcccagccaccaatgaatgtgagatcaccaagagaagaaggaagagctgccaggcctgccgcttcatgaagtgcctgaaggtgggcatgctgaaggagggcgtgcggctggacagagtgcggggcggccggcagaagtacaagaggcggctggacagcgagagcagcccctacctgagcctgcagatcagccccccagccaagaagcccctgaccaagatcgtgtcctacctgctggtggccgagccagacaagctgtatgccatgcctcctcctggcatgcctgagggggacatcaaggccctgaccaccctgtgtgacctggccgaccgggagctggtggtgatcatcggctgggccaagcacatccctggcttcagcagcctgagcctgggggaccagatgagcctgctgcagagcgcctggatggagatcctgatcctgggcatcgtgtaccgcagcctgccctatgatgacaagctggtgtatgcagaggactacatcatggatgaggagcacagccggctggccggcctgctggagctgtaccgggccatcctgcagctggtgcggcgctacaagaagctgaaggtggagaaggaggagtttgtgaccctgaaggccctggccctggccaacagcgacagcatgtacatcgaggacctggaggccgtgcagaagctgcaggacctgctgcacgaggccctgcaggactatgagctgagccagagacatgaggagccctggaggacaggcaagctgctgctgaccctgcccctgctgcggcagacagctgccaaggctgtgcagcacttctacagcgtgaagctgcagggcaaggtgcccatgcacaagctgttcctggagatgctggaggccaaggtgggccaggagcagctgcggggcagccccaaggatgagaggatgagcagccatgatggaaaatgtcccttccagagcgctgccttcaccagccgggaccagagcaacagccctggcatccccaacccccggcccagcagccccacccccctgaatgaaagaggccggcagatcagccccagcaccaggaccccaggcggccagggcaagcacctgtggctgaccatgtag

SEQ ID NO: 331401 - DNA, 1527 bp, Artificial Sequence
  derived and/or modified sequence
atgctgctgaacaggatgagcagtgatgacagacacctgggcagcagctgtggcagcttcatcaagacagagcccagcagccccagcagcggcattgatgccctgagccaccacagccccagcggcagcagtgatgccagcggcggcttcggcctggccctgggcacccacgccaacggcctggacagcccccccatgtttgctggggccggcctgggcggcaccccctgcaggaagagctatgaggactgtgccagcggcatcatggaggacagcgccatcaagtgtgagtacatgctgaatgccatccccaagaggctgtgcctggtgtgtggggacatcgccagcggctaccactacggcgtggccagctgtgaggcctgcaaggccttcttcaagaggaccatccagggcaacatcgagtacagctgcccagccaccaatgaatgtgagatcaccaagagaagaaggaagagctgccaggcctgccgcttcatgaagtgcctgaaggtgggcatgctgaaggagggcgtgcggctggacagagtgcggggcggccggcagaagtacaagaggcggctggacagcgagagcagcccctacctgagcctgcagatcagccccccagccaagaagcccctgaccaagatcgtgtcctacctgctggtggccgagccagacaagctgtatgccatgcctcctcctggcatgcctgagggggacatcaaggccctgaccaccctgtgtgacctggccgaccgggagctggtggtgatcatcggctgggccaagcacatccctggcttcagcagcctgagcctgggggaccagatgagcctgctgcagagcgcctggatggagatcctgatcctgggcatcgtgtaccgcagcctgccctatgatgacaagctggtgtatgcagaggactacatcatggatgaggagcacagccggctggccggcctgctggagctgtaccgggccatcctgcagctggtgcggcgctacaagaagctgaaggtggagaaggaggagtttgtgaccctgaaggccctggccctggccaacagcgacagcatgtacatcgaggacctggaggccgtgcagaagctgcaggacctgctgcacgaggccctgcaggactatgagctgagccagagacatgaggagccctggaggacaggcaagctgctgctgaccctgcccctgctgcggcagacagctgccaaggctgtgcagcacttctacagcgtgaagctgcagggcaaggtgcccatgcacaagctgttcctggagatgctggaggccaaggtgggccaggagcagctgcggggcagccccaaggatgagaggatgagcagccatgatggcaagtgccccttccagagcgctgccttcaccagccgggaccagagcaacagccctggcatccccaacccccggcccagcagccccacccccctgaatgaaagaggccggcagatcagccccagcaccaggacccctgggggccagggcaagcactag

SEQ ID NO: 331402 - DNA, 1527 bp, Artificial Sequence
  derived and/or modified sequence
atgagcagcgacgaccggcacctgggcagcagctgcggcagcttcattaagaccgaaccatcatcaccgagcagcggcatcgacgctttatctcatcatagtccctcaggctcctcagatgcttcaggggggttcggtctcgcattgggcactcatgcaaacggcctcgattcccctcccatgtttgcaggagcaggccttggggggacgccttgtcgtaaaagttacgaggactgtgccagcggcattatggaagacagtgcaataaagtgtgaatacatgttgaacgccatccctaaaaggctctgtttggtgtgcggtgacatcgcgtccggctatcactacggcgttgcttcgtgcgaagcttgtaaagctttctttaaacggacaatacaaggcaatattgagtactcctgccccgccacgaacgaatgcgaaattaccaagcgcaggagaaagtcatgtcaggcctgtcgatttatgaagtgcctaaaggtggggatgctgaaggagggagtgcgtctggatcgtgttaggggcggcagacagaagtataagcgtagattggactctgagagtagtccatacctgtcacttcagattagtccccccgccaagaaacccctgacgaagattgtctcatatctcctagtcgcagaacccgataagctatacgcaatgcctcctccaggaatgcctgaaggcgacattaaggccttgactactctgtgtgatctcgccgatcgggagctggtggtgatcatcggatgggcgaaacacattccgggattcagctcgttgagccttggggaccaaatgagcctcctgcagagcgcttggatggagatcctcatacttggcatagtatatagatctctcccgtatgacgacaaacttgtgtatgctgaagattacattatggatgaagaacacagcagactggctggcctcctggagctctatcgcgcgattttacaactggtcagaagatacaaaaaactgaaagttgaaaaagaagagtttgtgacacttaaagctctcgcacttgcgaacagcgatagtatgtatatcgaagatttagaggcagtgcagaaactacaggacctgctgcacgaggctctgcaagattatgaactctcccagaggcatgaagagccctggagaacaggcaaactgctccttactctccctctgctccgacagacagcagccaaggcagtccagcatttttactcggtgaagctccaggggaaagtgcccatgcacaaacttttcctggaaatgttggaggctaaggttggtcaggaacaactgcgtggctctcctaaggacgagaggatgtccagccatgatggcaagtgtcccttccaatcagccgcgttcacctcgagagaccagtccaatagccctgggatccctaaccctaggccaagtagccccacacccctcaatgaacgagggcggcaaatctctccctctaccagaacaccaggcgggcagggaaagcacctgtggttaacaatgtag

SEQ ID NO: 331403 - DNA, 1527 bp, Artificial Sequence
  derived and/or modified sequence
atgagcagcgacgaccggcacctgggcagcagctgcggcagcttcatcaagacagaaccaagcagcccctcctccgggatcgatgcgctgagccaccactccccctcaggctcctcagatgcctctggcggctttggcctggcattgggtactcacgccaacgggcttgactctccgccaatgttcgctggggccggactggggggaaccccgtgcagaaaatcttacgaagactgcgcatcgggcatcatggaggacagcgccatcaagtgtgagtatatgttgaacgctattccgaaacggttgtgtctggtatgtggagacatcgcatcaggatatcactatggcgtggctagttgtgaagcctgtaaagcctttttcaagagaaccatccaaggaaacattgaatactcctgtcctgccacaaatgagtgtgaaatcactaagcggcggcgcaagtcctgccaagcttgccgatttatgaagtgtttgaaggtcgggatgctaaaggaaggagtccggctcgaccgggttcgcggaggtcgccagaaatataagagacgattagactccgaatcctctccctatctaagtctgcagatcagtccaccggccaaaaaacccctgaccaagatagtgtcctatcttctggtggctgagccggacaagttgtatgctatgccccctcctggcatgccagaaggagatataaaggccctgactacattatgtgacttagctgaccgggagctggtggtaatcataggctgggctaaacacatcccggggttcagttccctgtcactgggagatcagatgtcattgctccagtccgcgtggatggagatattgatccttggcattgtctaccgctccctgccctatgacgataaactagtgtacgcagaggattacattatggacgaagagcacagccgcctcgccggtttattggagttgtacagagcaattttgcaactggttcggcgatataagaagctcaaagtggaaaaagaagagttcgtcaccctgaaagcgctcgccctggctaatagcgattccatgtacatcgaagatttggaagctgtgcagaagctccaggatcttctgcacgaggcgcttcaggactatgagttgtctcagcggcacgaggaaccctggaggaccggaaaactgctgttgacactgcctctgctgcggcagaccgccgctaaggcagtacagcacttctatagtgtgaaattacagggcaaagttccaatgcacaagctgtttctggaaatgcttgaagcaaaggtaggacaggaacagctgcgcgggtcacctaaggacgagagaatgagcagtcacgatggcaaatgccctttccaatctgccgccttcacttctagagaccaatccaactctcccggtatccctaaccccaggcctagctcacccaccccacttaacgagcgaggtcggcagatcagccctagcactcggactcctgggggccaggggaagcatctctggctcaccatgtag

SEQ ID NO: 331404 - DNA, 1527 bp, Artificial Sequence
  derived and/or modified sequence
atgctgctgaaccggatgagcagcgacgaccggcacctgggcagctcttgcggttcattcatcaagaccgaaccaagttctccatcctcgggaatcgacgccttatcacaccattcaccaagcggctctagcgacgcgtcaggaggatttgggctggctctgggaacacatgccaacgggcttgattcccccccaatgtttgcaggcgccggtcttggcggaacaccctgtcgcaagtcctatgaggattgcgccagcggcattatggaggattcggctattaagtgtgaatacatgctaaatgcaatccccaaacggctgtgcttggtgtgtggcgacattgccagcggttaccactacggcgtagcttcatgtgaggcctgtaaggctttcttcaagcggactatccaggggaacatcgaatacagctgtcctgccactaatgaatgcgaaatcaccaagagacggcggaagagctgtcaggcttgtcgctttatgaagtgtctcaaggtaggaatgttgaaagaaggtgtacgtttggatcgggtccgggggggtcgtcagaagtacaagaggagactggattccgagtcatccccctacctgtctctccagatttcccccccagccaaaaaaccactgacaaaaatcgtctcatacctgctggtggccgaacctgacaagctgtacgccatgccacccccaggcatgccagagggcgatatcaaggcacttaccactctgtgcgacctagccgatagggaattagtcgttattattggttgggccaagcatatcccaggcttttcctctctgagtctaggagatcaaatgagcctcttacagtcggcttggatggagattttaatccttgggattgtgtataggagcctgccctacgacgacaagctggtctatgcagaagattacattatggacgaggagcattctagactcgccggactgttggaactgtatagagctattctgcagttggtgaggagatataaaaagttaaaagtcgagaaagaggaattcgtgacccttaaggccctagccttggcaaatagtgattcgatgtacattgaggacctcgaggccgtgcaaaaattacaagatctccttcacgaagccctgcaggattacgagctctctcagagacatgaagagccatggagaaccggtaagctgctactcacgttaccactgcttcgccagacagccgctaaagccgtgcagcacttttacagcgtgaagctccaggggaaagtgcctatgcacaagcttttcctggagatgttggaggccaaagtggggcaagagcagctgagagggagcccgaaggacgaacggatgtcctcccatgacggcaagtgtccctttcaaagcgcggctttcactagcagagaccagtccaattcaccaggaatcccgaaccccaggcccagttccccaacaccgctcaacgagcgcggccgtcaaatctcaccgagtactcgaacacccggcgggcagggcaaacactag

SEQ ID NO: 331405 - DNA, 1527 bp, Artificial Sequence
  derived and/or modified sequence
atgagcagtgacgaccgccatctgggttccagctgtggaagtttcattaaaacagagccctctagcccctcctccggcattgatgctctgagtcaccatagtccatctggcagctcagatgcctccgggggtttcgggctggctctgggcacacatgcaaacggcctagatagcccaccaatgttcgcgggtgccggactcggcggaacaccttgccggaagtcatacgaggattgcgcctctggcattatggaggattccgcaattaaatgtgagtacatgctgaacgctatcccaaaacggctctgccttgtgtgtggcgacattgcatcaggataccactacggggttgcttcctgtgaggcttgcaaagctttcttcaagcggaccattcaggggaacattgagtattcgtgtcctgctaccaacgaatgcgagattactaaaaggagaagaaaaagctgccaggcctgcagattcatgaagtgcctgaaggttggaatgctcaaagagggagtgcgattagatagagtgcgcggagggagacagaaatacaaaaggcggctggattcagaatcttcaccttacttatccctgcaaatctccccccctgcaaagaaaccacttaccaagatcgttagctacctattagtcgctgagcctgacaaactttacgcgatgcctccaccaggtatgcccgaaggagacatcaaggctcttacaacactgtgtgacctcgccgaccgggaattggttgtgatcataggttgggcgaaacacatacccggattttcatctctgagcctgggagatcagatgtcactgctgcagagcgcttggatggagatcctcattctcggcatcgtgtatcgttctctcccttatgatgacaagctggtgtacgccgaagactacattatggatgaagaacattctcgcctcgccggtcttctggagttgtaccgcgctatactccaactggtcagacggtataagaaactgaaagtagaaaaggaagaatttgtcaccttaaaggccctggcccttgccaattccgactcaatgtatatcgaggaccttgaggctgtccagaagctgcaggaccttctgcacgaggcattgcaggactatgaactttcccagagacacgaagaaccgtggagaaccgggaaactacttctaacactgccactgcttagacagacggccgctaaggccgttcagcatttctattccgttaagcttcaaggcaaggtgcctatgcacaaactcttcctggagatgttggaggctaaagtgggtcaagagcagttacgaggtagtccgaaagatgagaggatgagtagtcatgatggaaagtgtccatttcagtcagctgctttcaccagccgcgaccaatcgaacagtcccggtatccccaaccctcggccatcatctcccaccccactgaacgagcgcggtagacagatctcaccaagcaccaggacccctgggggtcagggtaagcacctctggctcaccatgtag

SEQ ID NO: 331406 - DNA, 1527 bp, Artificial Sequence
  derived and/or modified sequence
atgtctagcgacgatcgccatctcgggtcttcttgtgggtctttcatcaagaccgagcctagtagtccctcttctgggattgatgctctttcacaccactcccccagcggcagctcagacgctagcggtggattcggactggctcttgggacccacgccaacggtttagattctccgcctatgttcgccggagcaggattgggaggcaccccctgccgtaaatcctacgaggattgcgcctcaggcatcatggaagatagcgctatcaaatgcgagtacatgctcaacgctatccccaaaaggctgtgtttggtgtgcggcgatatcgcctcagggtatcattacggcgttgcatcatgcgaagcctgtaaagctttctttaagagaaccatccagggtaacatcgagtattcctgcccagcaaccaatgagtgcgagataaccaaacggagacggaagtcttgccaggcctgtcgcttcatgaagtgcctgaaagtaggcatgttgaaggagggagtgaggttggatagagtcagaggaggacgccagaagtacaagagacggctggactcagaaagctcaccatatttaagcttgcagatcagcccccctgcaaagaaacctcttaccaagatcgtgagttatctgcttgttgctgagcccgataaactgtatgctatgcccccacccggaatgcctgaaggggatatcaaagccctgacaaccctgtgtgatctggccgacagagagctcgtagtcattattggctgggcgaaacacattcctgggttctcatccttgtcactgggggaccagatgtccctgcttcagtccgcttggatggagatattaatacttggcatcgtgtacagaagcttgccatacgatgacaagctggtatatgccgaagattatattatggatgaagaacactctaggctcgccggactccttgagctatatagggcaatattgcagctggttcgacgttacaagaagctcaaggtggaaaaagaggaatttgtcactcttaaggctctggcactggcgaactccgatagtatgtacatcgaggaccttgaagccgtacaaaaactgcaggatctcctgcatgaagccctgcaggattacgagttgagccagcgccatgaagaaccttggcgtaccggcaagctcctgctgacgctgccattgcttcggcagactgctgctaaagccgtgcaacatttttactcagtgaagttgcaggggaaggtccccatgcacaaactctttctcgagatgctggaggctaaggtgggccaggagcagttgcggggatccccaaaggatgaacgaatgtctagccacgacgggaaatgtccatttcaatctgccgcttttacctctagggatcagtccaattcccctggaatcccgaatccgagacctagctctcccacccctttaaacgaaagaggcaggcaaatcagcccctccacaagaactcctggaggacaggggaaacacctgtggttgacaatgtag

SEQ ID NO: 331407 - DNA, 1527 bp, Artificial Sequence
  derived and/or modified sequence
atgctgctcaacaggatgtcgtcagacgaccgccatctcgggtcaagttgtggaagcttcatcaaaactgaaccctcctcaccttcgagcggcattgacgcattatcccaccactccccgagtgggtcctccgacgcctcaggcggttttgggctggcactgggaacccatgctaatggattagacagtccacccatgttcgcgggagccggactgggaggaacaccctgtcgcaagagctacgaagactgtgcctctgggatcatggaagatagcgcgataaaatgcgagtatatgctcaatgccattcccaagcgcctctgccttgtctgcggggacatcgcctctgggtatcactatggagtggctagttgtgaggcctgtaaagctttcttcaaacggacgattcagggaaacatcgaatattcctgtcctgccacaaacgaatgtgagatcaccaaacgcaggcgaaaatcctgccaagcgtgcaggttcatgaagtgcttgaaagttggcatgctcaaggaaggagtccgactcgacagagtgcgtggaggaaggcagaaatataagcgacgtcttgatagcgagtccagtccttacctatccctccaaataagccctccagctaaaaagccactgaccaagatcgtgtcctatctgctggtggcagaaccagacaagttgtatgcaatgccacctcctgggatgccagaaggggatattaaggcgctgaccacactgtgcgacttggcagatcgggagttggtcgtcataatcggatgggccaaacatattccaggcttctcttccctgagtctcggggatcaaatgagcctgcttcagtcagcatggatggagatcttgatccttggcatagtgtaccggtccctgccatacgatgacaagctggtctacgccgaagattacattatggatgaggagcattcgcgtctcgcaggactgctcgaactctaccgggctattctgcagctggtccgcagatataaaaagctgaaggtggagaaagaggagttcgtgacgctgaaagccctggccctggccaattcagattcgatgtatatagaggacttggaagctgtacagaaacttcaggatttactgcacgaggctctacaggactatgaactgtctcagcggcacgaggaaccttggcgaactgggaagttgctgctcaccttgcctctgctccggcagacagcagcaaaagcagtccagcacttttacagtgtcaaattacagggaaaggtgcccatgcataagctttttctggaaatgctggaagctaaggtcggccaggaacagctgagaggctctcctaaggatgaaagaatgtcaagccacgacggcaaatgtccttttcagagcgctgccttcacttccagggaccagtccaatagcccaggcattcctaaccctagacccagttcacccactcctcttaacgagaggggtcgccagataagtcctagtactaggactccgggaggccagggcaaacactag

SEQ ID NO: 331408 - DNA, 1527 bp, Artificial Sequence
  derived and/or modified sequence
atgagcagcgacgacagacacctgggcagcagctgcggcagcttcatcaagaccgagcccagcagccccagcagcggcatcgacgccctgagccaccacagccccagcggcagcagcgacgccagcggcggcttcggcctggccctgggcacccacgccaacggcctggacagcccccccatgttcgccggcgccggcctgggcggcaccccctgcagaaagagctacgaggactgcgccagcggcatcatggaggacagcgccatcaagtgcgagtacatgctgaacgccatccccaagagactgtgcctggtgtgcggcgacatcgccagcggctaccactacggcgtggccagctgcgaggcctgcaaggccttcttcaagagaaccatccagggcaacatcgagtacagctgccccgccaccaacgagtgcgagatcaccaagagaagaagaaagagctgccaggcctgcagattcatgaagtgcctgaaggtgggcatgctgaaggagggcgtgagactggacagagtgagaggcggcagacagaagtacaagagaagactggacagcgagagcagcccctacctgagcctgcagatcagcccccccgccaagaagcccctgaccaagatcgtgagctacctgctggtggccgagcccgacaagctgtacgccatgcccccccccggcatgcccgagggcgacatcaaggccctgaccaccctgtgcgacctggccgacagagagctggtggtgatcatcggctgggccaagcacatccccggcttcagcagcctgagcctgggcgaccagatgagcctgctgcagagcgcctggatggagatcctgatcctgggcatcgtgtacagaagcctgccctacgacgacaagctggtgtacgccgaggactacatcatggacgaggagcacagcagactggccggcctgctggagctgtacagagccatcctgcagctggtgagaagatacaagaagctgaaggtggagaaggaggagttcgtgaccctgaaggccctggccctggccaacagcgacagcatgtacatcgaggacctggaggccgtgcagaagctgcaggacctgctgcacgaggccctgcaggactacgagctgagccagagacacgaggagccctggagaaccggcaagctgctgctgaccctgcccctgctgagacagaccgccgccaaggccgtgcagcacttctacagcgtgaagctgcagggcaaggtgcccatgcacaagctgttcctggagatgctggaggccaaggtgggccaggagcagctgagaggcagccccaaggacgagagaatgagcagccacgacggcaagtgccccttccagagcgccgccttcaccagcagagaccagagcaacagccccggcatccccaaccccagacccagcagccccacccccctgaacgagagaggcagacagatcagccccagcaccagaacccccggcggccagggcaagcacctgtggctgaccatgtag

SEQ ID NO: 331409 - DNA, 1527 bp, Artificial Sequence
  derived and/or modified sequence
atgctgctgaacagaatgagcagcgacgacagacacctgggcagcagctgcggcagcttcatcaagaccgagcccagcagccccagcagcggcatcgacgccctgagccaccacagccccagcggcagcagcgacgccagcggcggcttcggcctggccctgggcacccacgccaacggcctggacagcccccccatgttcgccggcgccggcctgggcggcaccccctgcagaaagagctacgaggactgcgccagcggcatcatggaggacagcgccatcaagtgcgagtacatgctgaacgccatccccaagagactgtgcctggtgtgcggcgacatcgccagcggctaccactacggcgtggccagctgcgaggcctgcaaggccttcttcaagagaaccatccagggcaacatcgagtacagctgccccgccaccaacgagtgcgagatcaccaagagaagaagaaagagctgccaggcctgcagattcatgaagtgcctgaaggtgggcatgctgaaggagggcgtgagactggacagagtgagaggcggcagacagaagtacaagagaagactggacagcgagagcagcccctacctgagcctgcagatcagcccccccgccaagaagcccctgaccaagatcgtgagctacctgctggtggccgagcccgacaagctgtacgccatgcccccccccggcatgcccgagggcgacatcaaggccctgaccaccctgtgcgacctggccgacagagagctggtggtgatcatcggctgggccaagcacatccccggcttcagcagcctgagcctgggcgaccagatgagcctgctgcagagcgcctggatggagatcctgatcctgggcatcgtgtacagaagcctgccctacgacgacaagctggtgtacgccgaggactacatcatggacgaggagcacagcagactggccggcctgctggagctgtacagagccatcctgcagctggtgagaagatacaagaagctgaaggtggagaaggaggagttcgtgaccctgaaggccctggccctggccaacagcgacagcatgtacatcgaggacctggaggccgtgcagaagctgcaggacctgctgcacgaggccctgcaggactacgagctgagccagagacacgaggagccctggagaaccggcaagctgctgctgaccctgcccctgctgagacagaccgccgccaaggccgtgcagcacttctacagcgtgaagctgcagggcaaggtgcccatgcacaagctgttcctggagatgctggaggccaaggtgggccaggagcagctgagaggcagccccaaggacgagagaatgagcagccacgacggcaagtgccccttccagagcgccgccttcaccagcagagaccagagcaacagccccggcatccccaaccccagacccagcagccccacccccctgaacgagagaggcagacagatcagccccagcaccagaacccccggcggccagggcaagcactag

SEQ ID NO: 331410 - DNA, 2713 bp, Artificial Sequence
  derived and/or modified sequence
tttaggccagaggtgatccagtgatttgggagctgcaggtcacacaggctgctcagagggctgctgaacaggatgtcctcggacgacaggcacctgggctccagctgcggctccttcatcaagactgagccgtccagcccgtcctcgggcatcgatgccctcagccaccacagccccagtggctcgtccgacgccagcggcggctttggcctggccctgggcacccacgccaacggtctggactcgccacccatgtttgcaggcgccgggctgggaggcaccccatgccgcaagagctacgaggactgtgccagcggcatcatggaggactcggccatcaagtgcgagtacatgctcaacgccatccccaagcgcctgtgcctcgtgtgcggggacattgcctctggctaccactacggcgtggcctcctgcgaggcttgcaaggccttcttcaagaggactatccaagggaacattgagtacagctgcccggccaccaacgagtgcgagatcaccaaacggaggcgcaagtcctgccaggcctgccgcttcatgaaatgcctcaaagtggggatgctgaaggaaggtgtgcgccttgatcgagtgcgtggaggccgtcagaaatacaagcgacggctggactcagagagcagcccatacctgagcttacaaatttctccacctgctaaaaagccattgaccaagattgtctcatacctactggtggctgagccggacaagctctatgccatgcctccccctggtatgcctgagggggacatcaaggccctgaccactctctgtgacctggcagaccgagagcttgtggtcatcattggctgggccaagcacatcccaggcttctcaagcctctccctgggggaccagatgagcctgctgcagagtgcctggatggaaatcctcatcctgggcatcgtgtaccgctcgctgccctatgacgacaagctggtgtacgctgaggactacatcatggatgaggagcactcccgcctcgcggggctgctggagctctaccgggccatcctgcagctggtacgcaggtacaagaagctcaaggtggagaaggaggagtttgtgacgctcaaggccctggccctcgccaactccgattccatgtacatcgaggatctagaggctgtccagaagctgcaggacctgctgcacgaggcactgcaggactacgagctgagccagcgccatgaggagccctggaggacgggcaagctgctgctgacactgccgctgctgcggcagacggccgccaaggccgtgcagcacttctatagcgtcaaactgcagggcaaagtgcccatgcacaaactcttcctggagatgctggaggccaaggttggccaagagcagcttagaggatctcccaaggatgaaagaatgtcaagccatgatggaaaatgccccttccaatcagctgccttcacaagcagggatcagagcaactccccggggatccccaatccacgcccttctagtccaacccccctcaatgagagaggcaggcagatctcacccagcactaggacaccaggaggccagggaaagcatctctggctcaccatgtaacatctggcttggagcaagtgggtgttctgcacaccaggcagctgcacctcactggatctagtgttgctgcgagtgacctcacttcagagcccctctagcagagtggggcggaagtcctgatggttggtgtccatgaggtggaagctgcttttatacttaaaactcagatcacaacaggaaatgtgtcagtaacaatggaactccatccaatgggaaagttcctggtactgaaggggtccattggacactcagaaaagaagttcaggggccaacttcttagctggaatcctggccagatgaggaccctctccggggaagggagaggactgacttagtggaaggtggtgaagtgaggagagtttaggggaaccttcccccagtggaacagatctcaagtttaccctaaacctgccatttctggaaaatctgtaaagaggaaacagcctgtctcagctgtactctcatgatacaggtcatttgaaatgaaccaagaaataaaacatgaaaatccaaccatggagaaggtggtatggctgggttttgtttggtccccttgtccttatacgttctaaagtttccagactggctttgtcactttgtgaactcgtcatgtgtgaaaaccaatctttgcatatagggaacttcctcgggccacactttaagaaccaagtaagaggctctcaagactccagcagagtcgggaggccatggcagcgccttagaggagctggaacctgcacccacctgtgtcggtggggggggcctcctttccccatagactctgccctccctctgtgcagatggaagtggcaggggagggtgaccagcttgtgacaagaagactgaagggtccagagtccatgctcacggaacagcaccaaagaaaagcactatgtggaaagattgttttattttctaataatgataatatggctggaatggcttcttaagatgtatatattttttaaaatggcagttccccattgcagcatcacctacttgtatgtctttctgcctctgtatatgttctcccagaaacccccatgtaaatcaaatgccctaggatgcttccatcctggtcccatgtatctggaatctaataaataaggaaagg

SEQ ID NO: 331411 - DNA, 2144 bp, Artificial Sequence
  derived and/or modified sequence
tccctgccaaaatggtgtccagaactttgaggccagaggtgatccagtgatttgggagctgcaggtcacacaggctgctcagagggctgctgaacaggatgtcctcggacgacaggcacctgggctccagctgcggctccttcatcaagactgagccgtccagcccgtcctcgggcatcgatgccctcagccaccacagccccagtggctcgtccgacgccagcggcggctttggcctggccctgggcacccacgccaacggtctggactcgccacccatgtttgcaggcgccgggctgggaggcaccccatgccgcaagagctacgaggactgtgccagcggcatcatggaggactcggccatcaagtgcgagtacatgctcaacgccatccccaagcgcctgtgcctcgtgtgcggggacattgcctctggctaccactacggcgtggcctcctgcgaggcttgcaaggccttcttcaagaggactatccaagggaacattgagtacagctgcccggccaccaacgagtgcgagatcaccaaacggaggcgcaagtcctgccaggcctgccgcttcatgaaatgcctcaaagtggggatgctgaaggaaggtgtgcgccttgatcgagtgcgtggaggccgtcagaaatacaagcgacggctggactcagagagcagcccatacctgagcttacaaatttctccacctgctaaaaagccattgaccaagattgtctcatacctactggtggctgagccggacaagctctatgccatgcctccccctggtatgcctgagggggacatcaaggccctgaccactctctgtgacctggcagaccgagagcttgtggtcatcattggctgggccaagcacatcccaggcttctcaagcctctccctgggggaccagatgagcctgctgcagagtgcctggatggaaatcctcatcctgggcatcgtgtaccgctcgctgccctatgacgacaagctggtgtacgctgaggactacatcatggatgaggagcactcccgcctcgcggggctgctggagctctaccgggccatcctgcagctggtacgcaggtacaagaagctcaaggtggagaaggaggagtttgtgacgctcaaggccctggccctcgccaactccgattccatgtacatcgaggatctagaggctgtccagaagctgcaggacctgctgcacgaggcactgcaggactacgagctgagccagcgccatgaggagccctggaggacgggcaagctgctgctgacactgccgctgctgcggcagacggccgccaaggccgtgcagcacttctatagcgtcaaactgcagggcaaagtgcccatgcacaaactcttcctggagatgctggaggccaaggttggccaagagcagcttagaggatctcccaaggatgaaagaatgtcaagccatgatggaaaatgccccttccaatcagctgccttcacaagcagggatcagagcaactccccggggatccccaatccacgcccttctagtccaacccccctcaatgagagaggcaggcagatctcacccagcactaggacaccaggaggccagggaaagcatctctggctcaccatgtaacatctggcttggagcaagtgggtgttctgcacaccaggcagctgcacctcactggatctagtgttgctgcgagtgacctcacttcagagcccctctagcagagtggggcggaagtcctgatggttggtgtccatgaggtggaagctgcttttatacttaaaactcagatcacaacaggaaatgtgtcagtaacaatggaactccatccaatgggaaagttcctggtactgaaggggtccattggacactcagaaaagaagttcaggggccaacttcttagctggaatcctggccagatgaggaccctctccggggaagggagaggactgacttagtggaaggtggtgaagtgaggagagtttaggggaaccttcccccagtggaacagatctcaagtttaccctaaacctgccatttctggaaaatctgtaaagaggaaacagcctgtctcagctgtactctcatgatacaggtcatttgaaatgaaccaagaaataaaacatgaaaatccaaccatgg

SEQ ID NO: 331412 - DNA, 1826 bp, Artificial Sequence
  derived and/or modified sequence
catggggctgggtggagttggaagtctagagctttttgctgttttgtttaagacctggttatggttgtgagacttttttttttttttttttttttttgtcagctgcctgttatatcaatcacggagtcgggatctatttataggttgggagtactgtgtccttagtcacaaagagacacagacaggggactgtcagctggtaccggaggagcggagcaacgagttatcagcaactgaaagcacctgaggggccgcacattccaccccagcccagtcctcgtcctccacgccagccccaagcatgctgctgaacaggatgtcctcggacgacaggcacctgggctccagctgcggctccttcatcaagactgagccgtccagcccgtcctcgggcatcgatgccctcagccaccacagccccagtggctcgtccgacgccagcggcggctttggcctggccctgggcacccacgccaacggtctggactcgccacccatgtttgcaggcgccgggctgggaggcaccccatgccgcaagagctacgaggactgtgccagcggcatcatggaggactcggccatcaagtgcgagtacatgctcaacgccatccccaagcgcctgtgcctcgtgtgcggggacattgcctctggctaccactacggcgtggcctcctgcgaggcttgcaaggccttcttcaagaggactatccaagggaacattgagtacagctgcccggccaccaacgagtgcgagatcaccaaacggaggcgcaagtcctgccaggcctgccgcttcatgaaatgcctcaaagtggggatgctgaaggaaggtgtgcgccttgatcgagtgcgtggaggccgtcagaaatacaagcgacggctggactcagagagcagcccatacctgagcttacaaatttctccacctgctaaaaagccattgaccaagattgtctcatacctactggtggctgagccggacaagctctatgccatgcctccccctggtatgcctgagggggacatcaaggccctgaccactctctgtgacctggcagaccgagagcttgtggtcatcattggctgggccaagcacatcccaggcttctcaagcctctccctgggggaccagatgagcctgctgcagagtgcctggatggaaatcctcatcctgggcatcgtgtaccgctcgctgccctatgacgacaagctggtgtacgctgaggactacatcatggatgaggagcactcccgcctcgcggggctgctggagctctaccgggccatcctgcagctggtacgcaggtacaagaagctcaaggtggagaaggaggagtttgtgacgctcaaggccctggccctcgccaactccgattccatgtacatcgaggatctagaggctgtccagaagctgcaggacctgctgcacgaggcactgcaggactacgagctgagccagcgccatgaggagccctggaggacgggcaagctgctgctgacactgccgctgctgcggcagacggccgccaaggccgtgcagcacttctatagcgtcaaactgcagggcaaagtgcccatgcacaaactcttcctggagatgctggaggccaaggttggccaagagcagcttagaggatctcccaaggatgaaagaatgtcaagccatgatggaaaatgccccttccaatcagctgccttcacaagcagggatcagagcaactccccggggatccccaatccacgcccttctagtccaacccccctcaatgagagaggcaggcagatctcacccagcactaggacaccaggaggccagggaaagcatc

SEQ ID NO: 331413 - protein, 995 aa, Artificial Sequence
  derived and/or modified sequence
MAAAPSALLLLPPFPVLSTYRLQSRSRPSAPETDDSRVGGIMRGEKNYYFRGAAGDHGSCPTTTSPLASALLMPSEAVSSSWSESGGGLSGGDEEDTRLLQLLRTARDPSEAFQALQAALPRRGGRLGFPRRKEALYRALGRVLVEGGSDEKRLCLQLLSDVLRGQGEAGQLEEAFSLALLPQLVVSLREENPALRKDALQILHICLKRSPGEVLRTLIQQGLESTDARLRASTALLLPILLTTEDLLLGLDLTEVIISLARKLGDQETEEESETAFSALQQIGERLGQDRFQSYISRLPSALRRHYNRRLESQFGSQVPYYLELEASGFPEDPLPCAVTLSNSNLKFGIIPQELHSRLLDQEDYKNRTQAVEELKQVLGKFNPSSTPHSSLVGFISLLYNLLDDSNFKVVHGTLEVLHLLVIRLGEQVQQFLGPVIAASVKVLADNKLVIKQEYMKIFLKLMKEVGPQQVLCLLLEHLKHKHSRVREEVVNICICSLLTYPSEDFDLPKLSFDLAPALVDSKRRVRQAALEAFAVLASSMGSGKTSILFKAVDTVELQDNGDGVMNAVQARLARKTLPRLTEQGFVEYAVLMPSSAGGRSNHLAHGADTDWLLAGNRTQSAHCHCGDHVRDSMHIYGSYSPTICTRRVLSAGKGKNKLPWENEQPGIMGENQTSTSKDIEQFSTYDFIPSAKLKLSQGMPVNDDLCFSRKRVSRNLFQNSRDFNPDCLPLCAAGTTGTHQTNLSGKCAQLGFSQICGKTGSVGSDLQFLGTTSSHQEKVYASLNFGSKTQQTFGSQTECTSSNGQNPSPGAYILPSYPVSSPRTSPKHTSPLIISPKKSQDNSVNFSNSWPLKSFEGLSKPSPQKKLVSQKSSDPTGRNHGENSQEKPPVQLTPALVRSPSSRRGLNGTKPVPPIPRGISLLPDKADLSTVGHKKKEPDDIWKCEKDSLPIDLSELNFKDKDLDQEEVRHISNIWVKTLSNKTFFCKEKNFSYC

SEQ ID NO: 331414 - DNA, 804 bp, Artificial Sequence
  derived and/or modified sequence
atggccagcagccccgagctgcccaccgaggacgagcagggcagctggggcatcgacgacctgcacatcagcctgcaggccgagcaggaggacacccagaagaaggccttcacctgctggatcaacagccagctggccagacacaccagccccagcgtgatcagcgacctgttcaccgacatcaagaagggccacgtgctgctggacctgctggaggtgctgagcggccagcagctgcccagagacaagggcagcaacaccttccagtgcagaatcaacatcgagcacgccctgaccttcctgagaaacagaagcatcaagctgatcaacatccacgtgaccgacatcatcgacggcaaccccagcatcatcctgggcctgatctggaccatcatcctgcacttccacatcgagaagctggcccagaccctgagctgcaactacaaccagcccagcctggacgacgtgagcgtggtggacagcagccccgccagcagcccccccgccaagaagtgcagcaaggtgcaggccagatggcagatgagcgccagaaaggccctgctgctgtgggcccaggagcagtgcgccacctacgagagcgtgaacgtgaccgacttcaagagcagctggagaaacggcatggccttcctggccatcatccacgccctgagacccgacctgatcgacatgaagagcgtgaagcacagaagcaacaaggacaacctgagagaggccttcagaatcgccgagcaggagctgaagatccccagactgctggagcccgaggcctacaagaacttctag

SEQ ID NO: 331415 - DNA, 804 bp, Artificial Sequence
  derived and/or modified sequence
atggcttcttctccagaacttcctacggaagacgaacagggctcgtggggtatcgacgatcttcacataagcctccaggcagagcaggaggacacccagaagaaggcatttacgtgctggatcaactcccagctggcacggcatacatccccttctgtaatctccgatctatttactgacatcaagaaaggtcacgttttgctggacttgctggaggtgctgagcggccagcagctgccacgcgataagggctcgaataccttccagtgtcggataaacatcgaacacgcactaaccttcctgcgaaatcgctcgatcaaacttatcaatatccacgtgacagacatcatcgatgggaacccaagcatcatcctcggcctcatatggacgataatactccacttccatatcgagaagctggctcaaacactatcttgcaactacaaccagcccagcctggacgacgtgtctgtcgtggacagcagcccggcgtcgagtccaccagcaaaaaagtgttccaaagttcaggccagatggcagatgtccgcgaggaaggccctgctcctatgggcccaggaacaatgtgctacttatgaatctgtgaacgtcacggattttaagtcctcatggcggaacggaatggcgttcctggccatcatccacgcgctccgcccagatctcattgacatgaaaagcgttaaacatcgttccaacaaggataacctcagagaggcgtttaggatcgccgagcaggagctaaaaatcccaagactgttggaacccgaggcatacaagaacttttag

SEQ ID NO: 331416 - DNA, 804 bp, Artificial Sequence
  derived and/or modified sequence
atggccagcagccctgagctgcccacagaagatgagcagggctcctggggcattgatgacctgcacatcagcctgcaggccgagcaggaggacacccagaagaaggccttcacctgctggatcaacagccagctggcccggcacaccagccccagcgtcatcagtgacctcttcacagacatcaagaagggccacgtgctgctggacctgctggaggtgctgagcggccagcagctgccccgggacaagggcagcaacaccttccagtgccgcatcaacatcgagcacgccctgaccttcctgaggaacagaagcatcaagctgatcaacatccacgtgacagacatcattgatggcaaccccagcatcatcctgggcctcatctggaccatcatcctgcacttccacatcgagaagctggcccagaccctgagctgcaactacaaccagcccagcctggatgatgtgtctgtggtggacagcagccctgccagcagccccccagccaagaagtgcagcaaggtgcaggcccgctggcagatgtctgccaggaaggccctgctgctgtgggcccaggagcagtgtgccacctatgagagcgtgaatgtgacagacttcaagagctcctggagaaatggcatggccttcctggccatcatccacgccctgcggccagacctgattgacatgaagtctgtgaagcacaggagcaacaaggacaacctgcgggaggccttcagaattgctgagcaggagctgaagatcccccggctgctggagcctgaggcctacaagaacttctag

SEQ ID NO: 331417 - DNA, 804 bp, Artificial Sequence
  derived and/or modified sequence
atggccagcagccccgagctgcccaccgaggacgagcagggcagctggggcatcgatgaccttcacatttccctgcaggccgagcaggaggacactcagaaaaaggccttcacatgttggatcaacagccagctcgctcgccacacatccccctccgtcatctcagatctgttcactgacattaagaagggccatgtattgctcgatcttctggaggtgctgtctggacagcagcttcccagagataaagggtctaatacatttcaatgccggatcaacatcgagcacgccttgaccttcttgagaaacaggtcgattaagcttattaacattcatgtgactgacataatagacggcaatcccagtatcatccttggtctgatctggactattatacttcatttccacattgagaagctcgctcagaccctttcttgcaattataaccagccaagtcttgacgatgtctcagttgtggatagttcaccagcatcctctcctcctgccaagaaatgctccaaggttcaggcccggtggcagatgagcgcaaggaaagctcttctgctttgggcccaggagcagtgcgcaacctacgaaagtgtgaatgtgaccgacttcaagtcatcttggaggaacggaatggcctttttagcaatcatccacgctctacggccagacctgattgacatgaaatctgtcaagcacaggtcaaataaagataacttacgcgaggctttcagaattgctgagcaggagctgaaaatccccagactgctcgaaccagaagcctacaaaaatttctag

SEQ ID NO: 331418 - DNA, 804 bp, Artificial Sequence
  derived and/or modified sequence
atggcctcatcgcctgaattacccaccgaggatgaacagggttcgtgggggattgatgacctccatatctctttgcaggctgaacaggaagatacacagaagaaggcctttacgtgctggataaattctcagttagcaagacacacatcgcccagtgtcatctcagacttgtttaccgacattaagaagggccatgtgctactcgacctccttgaggtcctatctggacagcagctgccccgagataaggggtcaaacacatttcagtgcaggatcaatatcgaacatgcactaacatttctgcgcaacagatccatcaagttgatcaacatccatgtgactgacatcattgatggaaacccaagcatcatcctgggtttgatctggactataatactccacttccatattgagaagctcgcccagactttgtcttgcaactataatcaaccttctctggatgatgtgtccgttgtcgatagttcgccagccagctcccctcctgccaagaaatgttctaaggtccaggccaggtggcaaatgtcagccaggaaggctctgctactctgggcccaggagcagtgcgcaacttatgaatctgtcaacgttactgatttcaagagcagttggaggaatggcatggcatttttagccattatacatgcactcagacccgatctaatcgatatgaagtcagtcaaacaccggtctaacaaggataacttacgcgaggccttccggatagccgagcaagagttaaagattcctagactgttagaacccgaagcctacaagaatttttag

SEQ ID NO: 331419 - DNA, 985 bp, Artificial Sequence
  derived and/or modified sequence
agagccttcggccggacctgaaaaagcgagagggagagcgagcaaaaggcgcgatccagagagccaggcaagcggggcgccgacctcgggcggccccggcccgcgcccttgcccctcggccgggcggacgttcacttcttcaactgagatggacatgatataatctccattgagtcaaagaatggcatctagtcctgagcttcccaccgaagatgaacagggttcctggggcatcgacgatctccatatttcattgcaagctgaacaggaagacacccagaagaaagccttcacgtgctggataaactcacagttggccaggcacacttctccctcagttatatccgacctattcacagacattaaaaaggggcatgtcctcctggatctgctagaagtactttctgggcaacagttgcctcgggataaaggatctaataccttccagtgtagaatcaatatagaacatgccttgacattcctaagaaaccgatcaattaagctaataaatattcatgttactgatatcattgatggaaacccatccattatccttggcctaatttggacaattatcctgcactttcatattgagaagcttgcccagactctttcttgcaattacaatcagccttccctggatgatgtgagtgtggttgactcatctcctgcctcaagtcctccagctaagaaatgctctaaagtgcaagcaagatggcaaatgtctgcaagaaaggcccttcttttgtgggctcaggaacaatgcgccacctatgagtctgtcaatgtgaccgattttaagtcaagttggagaaatgggatggcttttttggccatcattcatgccttgcgaccagacctaattgacatgaagagtgtgaagcatagatccaacaaagacaatctgagagaggccttcagaattgcagaacaagaattaaaaatccccagattgctggaaccagaagcttacaaaaacttctga

SEQ ID NO: 331420 - protein, 267 aa, Artificial Sequence
  derived and/or modified sequence
MASSPELPTEDEQGSWGIDDLHISLQAEQEDTQKKAFTCWINSQLARHTSPSVISDLFTDIKKGHVLLDLLEVLSGQQLPRDKGSNTFQCRINIEHALTFLRNRSIKLINIHVTDIIDGNPSIILGLIWTIILHFHIEKLAQTLSCNYNQPSLDDVSVVDSSPASSPPAKKCSKVQARWQMSARKALLLWAQEQCATYESVNVTDFKSSWRNGMAFLAIIHALRPDLIDMKSVKHRSNKDNLREAFRIAEQELKIPRLLEPEAYKNF

SEQ ID NO: 331421 - DNA, 108 bp, Artificial Sequence
  derived and/or modified sequence
tgcaagataacacattttagttgacaccattgaaaacagttttaaccaagaatattagaaccaatgaagcagagaaatcaaaagggtggatggaactgccaaaggatg

SEQ ID NO: 331422 - DNA, 1197 bp, Artificial Sequence
  derived and/or modified sequence
atgtacctgcagcaggccaccccccccaagaactaccagcccgccgcccacagcgccctgaacaagagcgtgaaggccgtgtacggcaagcccgtgctgcccagcggcagcaccagccccagccccctgcccttcctgcacggcagcctgagcaccggcaccccccagccccagccccccagcgagagcaccgagaaggagcccgagcaggacggccccgccgcccccgccgacggcagcaccgtggagagcctgcccagacccctgagccccaccaagctgacccccatcgtgcacagccccctgagataccagagcgacgccgacctggaggccctgagaagaaagctggccaacgcccccagacccctgaagaagagaagcagcatcaccgagcccgagggccccggcggccccaacatccagaagctgctgtaccagagattcaacaccctggccggcggcatggagggcacccccttctaccagcccagccccagccaggacttcatgggcaccctggccgacgtggacaacggcaacaccaacgccaacggcaacctggaggagctgccccccgcccagcccaccgcccccctgcccgccgagcccgcccccagcagcgacgccaacgacaacgagctgcccagccccgagcccgaggagctgatctgcccccagaccacccaccagaccgccgagcccgccgaggacaacaacaacaacgtggccaccgtgcccaccaccgagcagatccccagccccgtggccgaggcccccagccccggcgaggagcaggtgccccccgcccccctgccccccgccagccacccccccgccaccagcaccaacaagagaaccaacctgaagaagcccaacagcgagagaaccggccacggcctgagagtgagattcaaccccctggccctgctgctggacgccagcctggagggcgagttcgacctggtgcagagaatcatctacgaggtggaggaccccagcaagcccaacgacgagggcatcacccccctgcacaacgccgtgtgcgccggccaccaccacatcgtgaagttcctgctggacttcggcgtgaacgtgaacgccgccgacagcgacggctggggcgccggcaaggccggctgcgacgagcagagatgcggcgtgtgcagcgtgggcctgagaggccccgagcagtag

SEQ ID NO: 331423 - DNA, 1197 bp, Artificial Sequence
  derived and/or modified sequence
atgtaccttcagcaggccacacccccaaagaactatcagcccgcagcgcactcggccctgaataagtccgtcaaagcagtgtatggaaagccggtgctcccttccggcagcacatccccatctcccctgccttttttacatggctccctaagtaccggaactccccagccccagcccccaagtgagagcaccgagaaggaacccgaacaggacgggccagccgcaccagctgatggcagcactgtggagagtctccctagacctctcagcccaacaaagctgacgcccattgttcactctccgctgaggtatcagtcagatgcagatctggaagctcttaggcggaaactcgcgaacgcacctagacctctgaagaaaaggagctcaattactgagccggaaggccccggtggcccaaatatccagaaattgctctatcaacgctttaacacactggccggcgggatggagggcacacctttctaccaaccctccccttcccaggacttcatgggcacattggctgacgtcgacaatgggaacaccaacgctaacggtaatcttgaggaattgccaccggctcagcccacagcaccactgccggctgaacctgccccgagttccgatgccaacgataacgagctgccaagtcctgagcccgaggaacttatttgccctcaaacaacgcaccaaactgctgaacccgcagaggataacaataataatgtcgccaccgtcccaacaaccgagcagatcccaagccccgtcgccgaggctcctagccctggtgaggagcaggtcccaccagcaccactgccacctgcctctcatccgccagccaccagtactaacaagcggaccaacctgaaaaaaccaaatagcgagagaactggtcacggattgagggttcggttcaaccccctggctctgctcttggacgccagcttagagggcgagtttgaccttgtgcagaggatcatttacgaggtagaagacccatctaagccaaacgacgagggcatcacacctttgcacaatgcggtttgtgctggacaccaccacatcgtgaaattcctgcttgattttggtgttaacgtgaacgccgccgactcagatggctggggggctgggaaagccggatgtgatgagcagcgatgcggggtttgttctgtcggcttgcgcggccctgagcagtag

SEQ ID NO: 331424 - DNA, 1197 bp, Artificial Sequence
  derived and/or modified sequence
atgtacctgcagcaggccaccccacccaagaactaccagcctgctgcccacagcgccctgaacaagtctgtgaaggctgtgtatggcaagcctgtgctgcccagcggcagcaccagccccagccccctgcccttcctgcacggcagcctgagcacaggcaccccccagccccagcccccatctgagagcacagagaaggagcctgagcaggacggccctgctgccccagcagatggcagcacagtggagagcctgccccggcccctgagccccaccaagctgacccccatcgtgcacagccccctgcgctaccagagtgatgctgacctggaggccctgcggaggaagctggccaatgccccccggcccctgaagaagaggagcagcatcacagagcctgagggccctgggggccccaacatccagaagctgctgtaccagcgcttcaacaccctggccggcggcatggagggcacccccttctaccagcccagccccagccaggacttcatgggcaccctggctgatgtggacaatggaaacaccaatgccaatggaaacctggaggagctgcccccagcccagcccacagcccccctgcctgctgagcccgcccccagcagtgatgccaatgacaatgagctgcccagccctgagcctgaggagctgatctgcccccagaccacccaccagacagctgagcctgctgaggacaacaacaacaacgtggccaccgtgcccaccacagagcagatccccagccctgtggccgaggcccccagccctggagaggagcaggtgcccccagcccccctgcccccagccagccaccccccagccaccagcaccaacaagaggaccaacctgaagaagcccaacagcgagaggactggacatggcctgcgggtgcgcttcaaccccctggccctgctgctggatgccagcctggagggggagtttgacctggtgcagaggatcatctatgaggtggaggaccccagcaagcccaatgatgagggcatcacccccctgcacaatgctgtgtgtgccggccaccaccacatcgtgaagttcctgctggactttggagtgaatgtgaatgctgctgacagtgatggctggggcgctgggaaggccggctgtgatgagcagagatgtggggtgtgcagcgtgggcctgcggggccctgagcagtag

SEQ ID NO: 331425 - DNA, 1197 bp, Artificial Sequence
  derived and/or modified sequence
atgtacctgcagcaggccaccccccccaagaactaccagcccgccgcccatagcgccctgaataagtccgtcaaggcagtgtatggcaaacccgtgctgccctccggaagtacttcccccagtccactgcccttcctacacggctcactgagcaccggtaccccacaaccccagcctccttccgagtcaactgaaaaagaacccgaacaggatggccccgcggcacccgccgacggatctaccgtggaaagcctgcctaggccgctctcacctacgaagttgacgcctatcgtgcacagtcccttaagataccagagtgatgctgacctggaagccttgcggaggaagctggcaaatgccccccgacctcttaagaaacgatcttcaataacagaaccagaaggcccaggagggcctaatattcagaaactgctgtaccagcggtttaatactctcgccgggggaatggagggcacgccgttctaccagccaagtccatctcaggactttatggggacgctcgccgatgtcgataacggcaatactaacgctaacgggaatttggaggagcttccccctgctcagcctacggcccctctaccagccgagcccgccccatcctccgatgcaaatgacaatgagctgccgtcccctgagccagaggagctgatttgcccgcagacaacacaccaaacagccgagcccgctgaagataacaacaacaatgtggccaccgtgcccacaactgagcagatccctagccccgttgccgaggccccatcccctggggaggagcaagtccctccagcccccttgcccccggcatcccacccccccgcaactagcaccaacaaacgtaccaacttaaagaaacctaactccgagcggaccggccacggactccgcgtgcgctttaaccctctggccctgttgctagacgcttctctcgagggagagttcgatctggtacagcggatcatctacgaggtcgaggatcccagcaagccaaatgacgagggaatcacccctctacacaatgctgtctgcgcaggtcaccaccacattgtcaaatttctcctcgatttcggagtgaatgtcaatgctgccgactccgacggctggggggcagggaaggctggatgtgatgaacaacggtgtggggtttgctccgtaggactccgcggacccgagcagtag

SEQ ID NO: 331426 - DNA, 1197 bp, Artificial Sequence
  derived and/or modified sequence
atgtacctgcaacaggccacacctcctaaaaactaccagcccgctgcccattccgcgctcaacaagagtgtcaaagccgtgtacggaaagcccgtgcttccgtctggctctacttccccctcccccctgccatttctgcacgggtccctgagcactggaactccccagccccagccacccagtgagtcaaccgagaaggagcccgaacaggacgggccagctgcgcctgccgatggcagtaccgtggagtctttgccgagacctctctcacctacgaaattaacacccatagtgcattcaccgcttagataccagtcggacgcagatctggaagcgctccgcagaaaactcgcgaacgcccctcgccctttgaagaagcgatcctcaataactgagccagaaggcccaggcggaccaaatatccagaagcttctatatcagcggtttaataccttggcaggtggcatggagggaacaccattttaccagccatcacccagccaggatttcatgggaactctggcagacgttgataacggcaatacgaatgcaaacgggaatttagaagaactccctcctgcccagccgacagctcccctgccagccgaaccggctccctctagtgacgcaaacgacaacgagctcccctctccggagcctgaggagttgatctgtcctcaaactacccaccaaacagctgaaccagccgaagacaacaataataatgtcgctactgttccgacaactgagcagatcccctctccagtggcagaagccccaagccccggtgaagaacaggtgccccctgccccattacccccagcaagccatcccccagccactagcactaacaaacgcacaaacctgaaaaaaccaaactccgagagaacaggccatggattacgggtccgcttcaatcctctggccctgctcctcgacgcatcactggaaggcgagttcgacctcgtgcaaaggataatctatgaagttgaggacccttccaagcccaatgacgaggggatcaccccccttcataatgctgtgtgtgctggtcaccatcacattgtcaagtttttgctggatttcggggtcaacgtcaacgctgcagatagtgacggttggggggctggcaaagctgggtgtgatgagcagcggtgtggggtgtgctctgtgggcctccggggtccagaacagtag

SEQ ID NO: 331427 - protein, 820 aa, Artificial Sequence
  derived and/or modified sequence
MLAWESDHFLRILAENDNYCKHSTIVPENAAHQGANRTSSLENHDQMSVNCRTLLSESPGKLHVEVSADLTAINGLSYNQNLANGSYDLANRDFCQGNQLNYYKQEIPVQPTTSYSIQNLYSYENQPQPSDECTLLSNKYLDGNANKSTSDGSPVMAVMPGTTDTIQVLKGRMDSEQSPSIGYSSRTLGPNPGLILQALTLSNASDGFNLERLEMLGDSFLKHAITTYLFCTYPDAHEGRLSYMRSKKVSNCNLYRLGKKKGLPSRMVVSIFDPPVNWLPPGYVVNQDKSNTDKWEKDEMTKDCMLANGKLDEDYEEEDEEEESLMWRAPKEEADYEDDFLEYDQEHIRFIDNMLMGSGAFVKKISLSPFSTTDSAYEWKMPKKSSLGSMPFSSDFEDFDYSSWDAMCYLDPSKAVEEDDFVVGFWNPSEENCGVDTGKQSISYDLHTEQCIADKSIADCVEALLGCYLTSCGERAAQLFLCSLGLKVLPVIKRTDREKALCPTRENFNSQQKNLSVSCAAASVASSRSSVLKDSEYGCLKIPPRCMFDHPDADKTLNHLISGFENFEKKINYRFKNKAYLLQAFTHASYHYNTITDCYQRLEFLGDAILDYLITKHLYEDPRQHSPGVLTDLRSALVNNTIFASLAVKYDYHKYFKAVSPELFHVIDDFVQFQLEKNEMQGMDSELRRSEEDEEKEEDIEVPKAMGDIFESLAGAIYMDSGMSLETVWQVYYPMMRPLIEKFSANVPRSPVRELLEMEPETAKFSPAERTYDGKVRVTVEVVGKGKFKGVGRSYRIAKSAAARRALRSLKANQPQVPNS

SEQ ID NO: 331428 - protein, 575 aa, Artificial Sequence
  derived and/or modified sequence
MRPWTGSWRWIMLILFAWGTLLFYIGGHLVRDNDHPDHSSRELSKILAKLERLKQQNEDLRRMAESLRIPEGPIDQGPAIGRVRVLEEQLVKAKEQIENYKKQTRNGLGKDHEILRRRIENGAKELWFFLQSELKKLKNLEGNELQRHADEFLLDLGHHERSIMTDLYYLSQTDGAGDWREKEAKDLTELVQRRITYLQNPKDCSKAKKLVCNINKGCGYGCQLHHVVYCFMIAYGTQRTLILESQNWRYATGGWETVFRPVSETCTDRSGISTGHWSGEVKDKNVQVVELPIVDSLHPRPPYLPLAVPEDLADRLVRVHGDPAVWWVSQFVKYLIRPQPWLEKEIEEATKKLGFKHPVIGVHVRRTDKVGTEAAFHPIEEYMVHVEEHFQLLARRMQVDKKRVYLATDDPSLLKEAKTKYPNYEFISDNSISWSAGLHNRYTENSLRGVILDIHFLSQADFLVCTFSSQVCRVAYEIMQTLHPDASANFHSLDDIYYFGGQNAHNQIAIYAHQPRTADEIPMEPGDIIGVAGNHWDGYSKGVNRKLGRTGLYPSYKVREKIETVKYPTYPEAEK

SEQ ID NO: 331429 - protein, 169 aa, Artificial Sequence
  derived and/or modified sequence
MHRQIWHLHWTLVRYPNYEFISDNSISWSAGLHNRYTENSLRGVILDIHFLSQADFLVCTFSSQVCRVAYEIMQTLHPDASANFHSLDDIYYFGGQNAHNQIAIYAHQPRTADEIPMEPGDIIGVAGNHWDGYSKGVNRKLGRTGLYPSYKVREKIETVKYPTYPEAEK

SEQ ID NO: 331430 - protein, 15 aa, Artificial Sequence
  derived and/or modified sequence
MRPWTGSWRWIMLIL

SEQ ID NO: 331431 - protein, 44 aa, Artificial Sequence
  derived and/or modified sequence
MRPWTGSWRWIMLILFAWGTLLFYIGGHLVRDNDHPDHSSRELS

SEQ ID NO: 331432 - protein, 46 aa, Artificial Sequence
  derived and/or modified sequence
MRPWTGSWRWIMLILFAWGTLLFYIGGHLVRDNDHPDHSSRELSKI

SEQ ID NO: 331433 - protein, 41 aa, Artificial Sequence
  derived and/or modified sequence
MRPWTGSWRWIMLILFAWGTLLFYIGGHLVRDNDHPDHSSR

SEQ ID NO: 331434 - protein, 30 aa, Artificial Sequence
  derived and/or modified sequence
MRPWTGSWRWIMLILFAWGTLLFYIGGHLV

SEQ ID NO: 331435 - protein, 412 aa, Artificial Sequence
  derived and/or modified sequence
MTDLYYLSQTDGAGDWREKEAKDLTELVQRRITYLQNPKDCSKAKKLVCNINKGCGYGCQLHHVVYCFMIAYGTQRTLILESQNWRYATGGWETVFRPVSETCTDRSGISTGHWSGEVKDKNVQVVELPIVDSLHPRPPYLPLAVPEDLADRLVRVHGDPAVWWVSQFVKYLIRPQPWLEKEIEEATKKLGFKHPVIGVHVRRTDKVGTEAAFHPIEEYMVHVEEHFQLLARRMQVDKKRVYLATDDPSLLKEAKTKYPNYEFISDNSISWSAGLHNRYTENSLRGVILDIHFLSQADFLVCTFSSQVCRVAYEIMQTLHPDASANFHSLDDIYYFGGQNAHNQIAIYAHQPRTADEIPMEPGDIIGVAGNHWDGYSKGVNRKLGRTGLYPSYKVREKIETVKYPTYPEAEK

SEQ ID NO: 331436 - protein, 50 aa, Artificial Sequence
  derived and/or modified sequence
MRPWTGSWRWIMLILFAWGTLLFYIGGHLVRDNDHPDHSSRELSKILAKL

SEQ ID NO: 331437 - DNA, 5166 bp, Artificial Sequence
  derived and/or modified sequence
tttcagttggaaggaggtagggaaaataagtgctttaattcctaggattttggaagtaaaaatggaacaccagacaaaaatggaatttttaggcaaatgtaaagctttgtacttgggtatctcaaagtattatacagtgtaaactatcatgattattaaccaactagaagtagttcttttttttaaattttatttttaattttagacatgagggtcttgctatgttgcccaggctgaagtggctactgacaggcacgatgtggcactgcagcctggaactcttgggcttaagtgatccttcctgcttcttctatcttaaaaaaaaaaagttacgcttgcttgttaaaatatttttaaaatgctgtgtttaaactaagaagtaaatatccaccccacctctgacttctaaaaattatctaaagtatgactggtaagatttttacctttaatcccacataagtctaaaatttgtgttcatttccaacaaccaaagtgtgtcacttttataccagaattttgtcctgcttatacgtttagtacagaaatctcatgggagagagcatccatgcatttacaaattgttattgaattattttattgaatgatgacacccaaactgagctagaacataattctggctctgctagtacatcttctgtgtgatcttggacaagtcactctactttcctttcaattttcttttctcacagggagataatcataaaaacgactgtaaagtacagcacttcatagagtgctttttgtttaaagagctgacaataaatacgagtctcaaggtctaggaaagcctccctcacaacctgagctgcttgaggacaagggattttcttttgaatcagcagtaccttatttgtgtatctgtgatagagttcctggtacataagaaggtctcaataaatatgtgaatttatgaatattaggcagattgcaaccttgacaggccactgcctcttaaatctcctttctgtgatcttttaatatttaacatctaaaaggccgccgctacttgctttgggataagtatccccggtatgtactttaaaatgcccaagcctagagaaatgattcttgtcttaagggcaccatttcgctctcccaccgtaaagcgccccaggcttgggatctgggtcccaaggctacagggaagagtttggaacgggaagctcatcttccggccctctgattggccggctcgcactccactcacgcggcgcgcagctctgattggcctcggcggcacccctcgtcccgcgactactttgtgtgctggggcggcgcgctccggtcctcccgctcagctggcggtctgggctgctctggggcagcccttcggtccactgctctgcatcgcgggcgccgggaattttccgagtccgagcgggttgctgcttttgctcagaggacatccatgaccctaatggtctttttgttcaagataaagtgattttttgcctttgttgattaactggacaaattcagcatgtagagcgcatgaagtacaggacaataaagcttcctacacatatcaccaggaggatctctttgaaagattcactgcaggactaccagagagaataatttgtctgaagcatcatgtgttgaaacaacagaagtctattcacctgtgcactaactagaaacagagttacaatgttttcaattctttgagctccaggactccagggaagtgagttgaaaatctgaaaatgcggccatggactggttcctggcgttggattatgctcattctttttgcctgggggaccttgctgttttatataggtggtcacttggtacgagataatgaccatcctgatcactctagccgagaactgtccaagattctggcaaagcttgaacgcttaaaacaacagaatgaagacttgaggcgaatggccgaatctctccggataccagaaggccctattgatcaggggccagctataggaagagtacgcgttttagaagagcagcttgttaaggccaaagaacagattgaaaattacaagaaacagaccagaaatggtctggggaaggatcatgaaatcctgaggaggaggattgaaaatggagctaaagagctctggtttttcctacagagtgaattgaagaaattaaagaacttagaaggaaatgaactccaaagacatgcagatgaatttcttttggatttaggacatcatgaaaggtctataatgacggatctatactacctcagtcagacagatggagcaggtgattggcgggaaaaagaggccaaagatctgacagaactggttcagcggagaataacatatcttcagaatcccaaggactgcagcaaagccaaaaagctggtgtgtaatatcaacaaaggctgtggctatggctgtcagctccatcatgtggtctactgcttcatgattgcatatggcacccagcgaacactcatcttggaatctcagaattggcgctatgctactggtggatgggagactgtatttaggcctgtaagtgagacatgcacagacagatctggcatctccactggacactggtcaggtgaagtgaaggacaaaaatgttcaagtggtcgagcttcccattgtagacagtcttcatccccgtcctccatatttacccttggctgtaccagaagacctcgcagatcgacttgtacgagtgcatggtgaccctgcagtgtggtgggtgtctcagtttgtcaaatacttgatccgcccacagccttggctagaaaaagaaatagaagaagccaccaagaagcttggcttcaaacatccagttattggagtccatgtcagacgcacagacaaagtgggaacagaagctgccttccatcccattgaagagtacatggtgcatgttgaagaacattttcagcttcttgcacgcagaatgcaagtggacaaaaaaagagtgtatttggccacagatgacccttctttattaaaggaggcaaaaacaaagtaccccaattatgaatttattagtgataactctatttcctggtcagctggactgcacaatcgatacacagaaaattcacttcgtggagtgatcctggatatacattttctctctcaggcagacttcctagtgtgtactttttcatcccaggtctgtcgagttgcttatgaaattatgcaaacactacatcctgatgcctctgcaaacttccattctttagatgacatctactattttgggggccagaatgcccacaatcaaattgccatttatgctcaccaaccccgaactgcagatgaaattcccatggaacctggagatatcattggtgtggctggaaatcattgggatggctattctaaaggtgtcaacaggaaattgggaaggacgggcctatatccctcctacaaagttcgagagaagatagaaacggtcaagtaccccacatatcctgaggctgagaaataaagctcagatggaagagataaacgaccaaactcagttcgaccaaactcagttcaaaccatttcagccaaactgtagatgaagagggctctgatctaacaaaataaggttatatgagtagatactctcagcaccaagagcagctgggaactgacataggcttcaattggtggaattcctctttaacaagggctgcaatgccctcatacccatgcacagtacaataatgtactcacatataacatgcaaacaggttgttttctactttgcccctttcagtatgtccccataagacaaacactgccatattgtgtaatttaagtgacacagacattttgtgtgagacttaaaacatggtgcctatatctgagagacctgtgtgaactattgagaagatcggaacagctccttactctgaggaagttgattcttatttgatggtggtattgtgaccactgaattcactccagtcaacagattcagaatgagaatggacgtttggtttttttttgtttttgtttttgttttttcctttataaggttgtctgtttttttttttttaaataattgcatcagttcattgacctcatcattaataagtgaagaatacatcagaaaataaaatattcactctccattagaaaattttgtaaaacaatgccatgaacaaattctttagtactcaatgtttctggacattctctttgataacaaaaaataaattttaaaaaggaattttgtaaagtttctagaattttatatcattggatgatatgttgatcagccttatgtggaagaactgtgataaaaagaggagctttttagtttttcagcttatttactttgttttttttcctgtttctgatatagtaactaattcttaactcagagacattggtccattttaatactgaaaaccaattttcattggtacacattacaaaattgctaagaacactgtttgggagctttcattctcatattttggacattgttttaattgagtgaaataatcataactccttgctcccagagaagctatcacctccatttctaaaaccatttcaggtttgtttggtagtctttcttaatgtatttattatcgctttttgtgagtagggtcctgttttatccaggaaccaatttctgccctagcctatcatgccctgcttttgagagtaccaggtatctttgggattgggaagctggctgtttcagaagtatatgtctcatagtgtgcagaacttggtgaccaagtgagaagcgggaccaatgggagactcacaatggactgagtcttgggattatcttttccaaattcttccatgttagaatcacttcagaaaataagactttgatgctttgtctctgagcatcatttttctcctcataaaaacacttccttattgtatgtagcctgcctcctacagaggcctggtaggtgttactgcattctaaaagaaaaatgtcatctctgtaggagcgactatcaggcctagtgtgaaatattagggatcctaggcagaagagctattagtcctggccttcatatcttcaccaaatgaaaatactgtatataaaatttcaccaccaaacttaactaaattctttttctcaagtcaagcctcccaaagaaaaaagaaattaacttcctacagtgtcagcaagcaattttccatttagttttggtacaaataaaagtcatttgaaacaa

SEQ ID NO: 331438 - DNA, 3284 bp, Artificial Sequence
  derived and/or modified sequence
ggccgacccgagcagccggttccctcctctccaggccccctccccatcccacccccgccgcctggccccagccgacccgtcccttcgtctccccgcggaatggggccggcactgctcagggtcgcgcgccctggacccagctcgctctcggtctcgcgctgtcagcgactgcccggctcgcgccgcctcgcgctctgcctcagtcagtggcgccgaaggctccgttaagcggcggcggcggttcctgtttccgtttcttcctctccgttcggtcgggagtagcatcctccactcagccacccttcccactcccccatcgtggggcagctgcggctgagggctgtggctttggcagctgcgacggggagcggcggagaccgcctctgctcccgcctggggttgctgcttttgctcagaggacatccatgaccctaatggtctttttgttcaagataaagtgattttttgcctttgttgattaactggacaaattcagcatgtagagcgcatgaagtacaggacaataaagcttcctacacatatcaccaggaggatctctttgaaagattcactgcaggactaccagagagaataatttgtctgaagcatcatgtgttgaaacaacagaagtctattcacctgtgcactaactagaaacagagttacaatgttttcaattctttgagctccaggactccagggaagtgagttgaaaatctgaaaatgcggccatggactggttcctggcgttggattatgctcattctttttgcctgggggaccttgctgttttatataggtggtcacttggtacgagataatgaccatcctgatcactctagccgagaactgtccaagattctggcaaagcttgaacgcttaaaacaacagaatgaagacttgaggcgaatggccgaatctctccggataccagaaggccctattgatcaggggccagctataggaagagtacgcgttttagaagagcagcttgttaaggccaaagaacagattgaaaattacaagaaacagaccagaaatggtctggggaaggatcatgaaatcctgaggaggaggattgaaaatggagctaaagagctctggtttttcctacagagtgaattgaagaaattaaagaacttagaaggaaatgaactccaaagacatgcagatgaatttcttttggatttaggacatcatgaaaggtctataatgacggatctatactacctcagtcagacagatggagcaggtgattggcgggaaaaagaggccaaagatctgacagaactggttcagcggagaataacatatcttcagaatcccaaggactgcagcaaagccaaaaagctggtgtgtaatatcaacaaaggctgtggctatggctgtcagctccatcatgtggtctactgcttcatgattgcatatggcacccagcgaacactcatcttggaatctcagaattggcgctatgctactggtggatgggagactgtatttaggcctgtaagtgagacatgcacagacagatctggcatctccactggacactggtcaggtgaagtgaaggacaaaaatgttcaagtggtcgagcttcccattgtagacagtcttcatccccgtcctccatatttacccttggctgtaccagaagacctcgcagatcgacttgtacgagtgcatggtgaccctgcagtgtggtgggtgtctcagtttgtcaaatacttgatccgcccacagccttggctagaaaaagaaatagaagaagccaccaagaagcttggcttcaaacatccagttattggagtccatgtcagacgcacagacaaagtgggaacagaagctgccttccatcccattgaagagtacatggtgcatgttgaagaacattttcagcttcttgcacgcagaatgcaagtggacaaaaaaagagtgtatttggccacagatgacccttctttattaaaggaggcaaaaacaaagtaccccaattatgaatttattagtgataactctatttcctggtcagctggactgcacaatcgatacacagaaaattcacttcgtggagtgatcctggatatacattttctctctcaggcagacttcctagtgtgtactttttcatcccaggtctgtcgagttgcttatgaaattatgcaaacactacatcctgatgcctctgcaaacttccattctttagatgacatctactattttgggggccagaatgcccacaatcaaattgccatttatgctcaccaaccccgaactgcagatgaaattcccatggaacctggagatatcattggtgtggctggaaatcattgggatggctattctaaaggtgtcaacaggaaattgggaaggacgggcctatatccctcctacaaagttcgagagaagatagaaacggtcaagtaccccacatatcctgaggctgagaaataaagctcagatggaagagataaacgaccaaactcagttcgaccaaactcagttcaaaccatttcagccaaactgtagatgaagagggctctgatctaacaaaataaggttatatgagtagatactctcagcaccaagagcagctgggaactgacataggcttcaattggtggaattcctctttaacaagggctgcaatgccctcatacccatgcacagtacaataatgtactcacatataacatgcaaacaggttgttttctactttgcccctttcagtatgtccccataagacaaacactgccatattgtgtaatttaagtgacacagacattttgtgtgagacttaaaacatggtgcctatatctgagagacctgtgtgaactattgagaagatcggaacagctccttactctgaggaagttgattcttatttgatggtggtattgtgaccactgaattcactccagtcaacagattcagaatgagaatggacgtttggtttttttttgtttttgtttttgttttttcctttataaggttgtctgtttttttttttttaaataattgcatcagttcattgacctcatcattaataagtgaagaatacatcagaaaataaaatattcactctccattagaaaattttgtaaaacaatgccatgaacaaattctttagtactcaatgtttctggacattctctttgataacaaaaaataaattttaaaaaggaattttgtaaagtttctagaattttatatcattggatgatatgttgatcagccttatgtggaagaactgtgataaaaagaggagctttttagtttttcagctt

SEQ ID NO: 331439 - DNA, 3559 bp, Artificial Sequence
  derived and/or modified sequence
cgtttagtacagaaatctcatgggagagagcatccatgcatttacaaattgttattgaattattttattgaatgatgacacccaaactgagctagaacataattctggctctgctagtacatcttctgtgtgatcttggacaagtcactctactttcctttcaattttcttttctcacagggagataatcataaaaacgactgtaaagtacagcacttcatagagtgctttttgtttaaagagctgacaataaatacgagtctcaaggtctaggaaagcctccctcacaacctgagctgcttgaggacaagggattttcttttgaatcagcagtaccttatttgtgtatctgtgatagagttcctggtacataagaaggtctcaataaatatgtgaatttatgaatattaggcagattgcaaccttgacaggccactgcctcttaaatctcctttctgtgatcttttaatatttaacatctaaaaggccgccgctacttgctttgggataagtatccccggtatgtactttaaaatgcccaagcctagagaaatgattcttgtcttaagggcaccatttcgctctcccaccgtaaagcgccccaggcttgggatctgggtcccaaggctacagggaagagtttggaacgggaagctcatcttccggccctctgattggccggctcgcactccactcacgcggcgcgcagctctgattggcctcggcggcacccctcgtcccgcgactactttgtgtgctggggcggcgcgctccggtcctcccgctcagctggcggtctgggctgctctggggcagcccttcggtccactgctctgcatcgcgggcgccgggaattttccgagtccgagcggcatgtagagcgcatgaagtacaggacaataaagcttcctacacatatcaccaggaggatctctttgaaagattcactgcaggactaccagagagaataatttgtctgaagcatcatgtgttgaaacaacagaagtctattcacctgtgcactaactagaaacagagttacaatgttttcaattctttgagctccaggactccagggaagtgagttgaaaatctgaaaatgcggccatggactggttcctggcgttggattatgctcattctttttgcctgggggaccttgctgttttatataggtggtcacttggtacgagataatgaccatcctgatcactctagccgagaactgtccaagattctggcaaagcttgaacgcttaaaacaacagaatgaagacttgaggcgaatggccgaatctctccggataccagaaggccctattgatcaggggccagctataggaagagtacgcgttttagaagagcagcttgttaaggccaaagaacagattgaaaattacaagaaacagaccagaaatggtctggggaaggatcatgaaatcctgaggaggaggattgaaaatggagctaaagagctctggtttttcctacagagtgaattgaagaaattaaagaacttagaaggaaatgaactccaaagacatgcagatgaatttcttttggatttaggacatcatgaaaggtctataatgacggatctatactacctcagtcagacagatggagcaggtgattggcgggaaaaagaggccaaagatctgacagaactggttcagcggagaataacatatcttcagaatcccaaggactgcagcaaagccaaaaagctggtgtgtaatatcaacaaaggctgtggctatggctgtcagctccatcatgtggtctactgcttcatgattgcatatggcacccagcgaacactcatcttggaatctcagaattggcgctatgctactggtggatgggagactgtatttaggcctgtaagtgagacatgcacagacagatctggcatctccactggacactggtcaggtgaagtgaaggacaaaaatgttcaagtggtcgagcttcccattgtagacagtcttcatccccgtcctccatatttacccttggctgtaccagaagacctcgcagatcgacttgtacgagtgcatggtgaccctgcagtgtggtgggtgtctcagtttgtcaaatacttgatccgcccacagccttggctagaaaaagaaatagaagaagccaccaagaagcttggcttcaaacatccagttattggagtccatgtcagacgcacagacaaagtgggaacagaagctgccttccatcccattgaagagtacatggtgcatgttgaagaacattttcagcttcttgcacgcagaatgcaagtggacaaaaaaagagtgtatttggccacagatgacccttctttattaaaggaggcaaaaacaaagtaccccaattatgaatttattagtgataactctatttcctggtcagctggactgcacaatcgatacacagaaaattcacttcgtggagtgatcctggatatacattttctctctcaggcagacttcctagtgtgtactttttcatcccaggtctgtcgagttgcttatgaaattatgcaaacactacatcctgatgcctctgcaaacttccattctttagatgacatctactattttgggggccagaatgcccacaatcaaattgccatttatgctcaccaaccccgaactgcagatgaaattcccatggaacctggagatatcattggtgtggctggaaatcattgggatggctattctaaaggtgtcaacaggaaattgggaaggacgggcctatatccctcctacaaagttcgagagaagatagaaacggtcaagtaccccacatatcctgaggctgagaaataaagctcagatggaagagataaacgaccaaactcagttcgaccaaactcagttcaaaccatttcagccaaactgtagatgaagagggctctgatctaacaaaataaggttatatgagtagatactctcagcaccaagagcagctgggaactgacataggcttcaattggtggaattcctctttaacaagggctgcaatgccctcatacccatgcacagtacaataatgtactcacatataacatgcaaacaggttgttttctactttgcccctttcagtatgtccccataagacaaacactgccatattgtgtaatttaagtgacacagacattttgtgtgagacttaaaacatggtgcctatatctgagagacctgtgtgaactattgagaagatcggaacagctccttactctgaggaagttgattcttatttgatggtggtattgtgaccactgaattcactccagtcaacagattcagaatgagaatggacgtttggtttttttttgtttttgtttttgttttttcctttataaggttgtctgtttttttttttttaaataattgcatcagttcattgacctcatcattaataagtgaagaatacatcagaaaataaaatattcactctccattagaaaattttgtaaaacaatgccatgaacaaattctttagtactcaatgtttctggacattctctttgataacaaaaaataaattttaaaaaggaa

SEQ ID NO: 331440 - DNA, 727 bp, Artificial Sequence
  derived and/or modified sequence
gcgctctgcctcagtcagtggcgccgaaggctccgttaagcggcggcggcggttcctgtttccgtttcttcctctccgttcggtcgggagtagcatcctccactcagccacccttcccactcccccatcgtggggcagctgcggctgagggctgtggctttggcagctgcgacggggagcggcggagaccgcctctgctcccgcctggggttgctgcttttgctcagaggacatccatgaccctaatggtctttttgttcaagataaagtgattttttgcctttgttgattaactggacaaattcagctccttatttgaccctgaaaatgttgcagtgagaatagcctttgcatgcatagtccttaaccctgaagaaaaggataaaagaaaataaaatcaaaacttagttgaaaatcaggaagtgcggacaagcttctgtcgagaaaatggagcatgtagagcgcatgaagtacaggacaataaagcttcctacacatatcaccaggaggatctctttgaaagattcactgcaggactaccagagagaataatttgtctgaagcatcatgtgttgaaacaacagaagtctattcacctgtgcactaactagaaacagagttacaatgttttcaattctttgagctccaggactccagggaagtgagttgaaaatctgaaaatgcggccatggactggttcctggcgttggattatgctcattctttt

SEQ ID NO: 331441 - DNA, 554 bp, Artificial Sequence
  derived and/or modified sequence
agtggcgccgaaggctccgttaagcggcggcggcggttcctgtttccgtttcttcctctccgttcggtcgggagtagcatcctccactcagccacccttcccactcccccatcgtggggcagctgcggctgagggctgtggctttggcagctgcgacggggagcggcggagaccgcctctgctcccgcctgggcatgtagagcgcatgaagtacaggacaataaagcttcctacacatatcaccaggaggatctctttgaaagattcactgcaggactaccagagagaataatttgtctgaagcatcatgtgttgaaacaacagaagtctattcacctgtgcactaactagaaacagagttacaatgttttcaattctttgagctccaggactccagggaagtgagttgaaaatctgaaaatgcggccatggactggttcctggcgttggattatgctcattctttttgcctgggggaccttgctgttttatataggtggtcacttggtacgagataatgaccatcctgatcactctagccgagaactgtccaa

SEQ ID NO: 331442 - DNA, 632 bp, Artificial Sequence
  derived and/or modified sequence
gatgatcctagtagaagtcaaatgagatcatttttgatagttggtttgcaggcttcggtgtatgcacccaacctttcaaagactgcctgtgcttttcagggagctcagttttgtgactgaaaggatcagctattctcttctacctttttaatgcactactggtttctagcagctgctgcttaacgctgttcattcttgagtttggtgaattgttttctgtgctccatgtgatttctttgtctttatgaggtacattttgactacagcatgtagagcgcatgaagtacaggacaataaagcttcctacacatatcaccaggaggatctctttgaaagattcactgcaggactaccagagagaataatttgtctgaagcatcatgtgttgaaacaacagaagtctattcacctgtgcactaactagaaacagagttacaatgttttcaattctttgagctccaggactccagggaagtgagttgaaaatctgaaaatgcggccatggactggttcctggcgttggattatgctcattctttttgcctgggggaccttgctgttttatataggtggtcacttggtacgagataatgaccatcctgatcactctagccgagaactgtccaagattc

SEQ ID NO: 331443 - DNA, 583 bp, Artificial Sequence
  derived and/or modified sequence
agcccttcggtccactgctctgcatcgcgggcgccgggaattttccgagtccgagcgggttgctgcttttgctcagaggacatccatgaccctaatggtctttttgttcaagataaagtgattttttgcctttgttgattaactggacaaattcagattctattttgaccagcaataagttgaattatggggctagaagataaggactaaaaacaagaattggtgtccagaaagcatgtagagcgcatgaagtacaggacaataaagcttcctacacatatcaccaggaggatctctttgaaagattcactgcaggactaccagagagaataatttgtctgaagcatcatgtgttgaaacaacagaagtctattcacctgtgcactaactagaaacagagttacaatgttttcaattctttgagctccaggactccagggaagtgagttgaaaatctgaaaatgcggccatggactggttcctggcgttggattatgctcattctttttgcctgggggaccttgctgttttatataggtggtcacttggtacgagataatgaccatcctgatcactctagccg

SEQ ID NO: 331444 - DNA, 639 bp, Artificial Sequence
  derived and/or modified sequence
gcgactactttgtgtgctggggcggcgcgctccggtcctcccgctcagctggcggtctgggctgctctggggcagcccttcggtccactgctctgcatcgcgggcgccgggaattttccgagtccgagcggagacagggtttctctgtgttgcccaggctggtctcgaactctgagctcaagcgacctgcccacctcggccacccaaaatgttgggattacaggggttgctgcttttgctcagaggacatccatgaccctaatggtctttttgttcaagataaagtgattttttgcctttgttgattaactggacaaattcagcatgtagagcgcatgaagtacaggacaataaagcttcctacacatatcaccaggaggatctctttgaaagattcactgcaggactaccagagagaataatttgtctgaagcatcatgtgttgaaacaacagaagtctattcacctgtgcactaactagaaacagagttacaatgttttcaattctttgagctccaggactccagggaagtgagttgaaaatctgaaaatgcggccatggactggttcctggcgttggattatgctcattctttttgcctgggggaccttgctgttttatataggtggtcacttggt

SEQ ID NO: 331445 - DNA, 2269 bp, Artificial Sequence
  derived and/or modified sequence
gtgtgctggggcggcgcgctccggtcctcccgctcagctggcggtctgggctgctctggggcagcccttcggtccactgctctgcatcgcgggcgccgggaattttccgagtccgagcgggttgctgcttttgctcagaggacatccatgaccctaatggtctttttgttcaagataaagtgattttttgcctttgttgattaactggacaaattcaggataccagaaggccctattgatcaggggccagctataggaagagtacgcgttttagaagagcagcttgttaaggccaaagaacagattgaaaattacaagaaacagaccagaaatggtctggggaaggatcatgaaatcctgaggaggaggattgaaaatggagctaaagagctctggtttttcctacagagtgaattgaagaaattaaagaacttagaaggaaatgaactccaaagacatgcagatgaatttcttttggatttaggacatcatgaaaggtctataatgacggatctatactacctcagtcagacagatggagcaggtgattggcgggaaaaagaggccaaagatctgacagaactggttcagcggagaataacatatcttcagaatcccaaggactgcagcaaagccaaaaagctggtgtgtaatatcaacaaaggctgtggctatggctgtcagctccatcatgtggtctactgcttcatgattgcatatggcacccagcgaacactcatcttggaatctcagaattggcgctatgctactggtggatgggagactgtatttaggcctgtaagtgagacatgcacagacagatctggcatctccactggacactggtcaggtgaagtgaaggacaaaaatgttcaagtggtcgagcttcccattgtagacagtcttcatccccgtcctccatatttacccttggctgtaccagaagacctcgcagatcgacttgtacgagtgcatggtgaccctgcagtgtggtgggtgtctcagtttgtcaaatacttgatccgcccacagccttggctagaaaaagaaatagaagaagccaccaagaagcttggcttcaaacatccagttattggagtccatgtcagacgcacagacaaagtgggaacagaagctgccttccatcccattgaagagtacatggtgcatgttgaagaacattttcagcttcttgcacgcagaatgcaagtggacaaaaaaagagtgtatttggccacagatgacccttctttattaaaggaggcaaaaacaaagtaccccaattatgaatttattagtgataactctatttcctggtcagctggactgcacaatcgatacacagaaaattcacttcgtggagtgatcctggatatacattttctctctcaggcagacttcctagtgtgtactttttcatcccaggtctgtcgagttgcttatgaaattatgcaaacactacatcctgatgcctctgcaaacttccattctttagatgacatctactattttgggggccagaatgcccacaatcaaattgccatttatgctcaccaaccccgaactgcagatgaaattcccatggaacctggagatatcattggtgtggctggaaatcattgggatggctattctaaaggtgtcaacaggaaattgggaaggacgggcctatatccctcctacaaagttcgagagaagatagaaacggtcaagtaccccacatatcctgaggctgagaaataaagctcagatggaagagataaacgaccaaactcagttcgaccaaactcagttcaaaccatttcagccaaactgtagatgaagagggctctgatctaacaaaataaggttatatgagtagatactctcagcaccaagagcagctgggaactgacataggcttcaattggtggaattcctctttaacaagggctgcaatgccctcatacccatgcacagtacaataatgtactcacatataacatgcaaacaggttgttttctactttgcccctttcagtatgtccccataagacaaacactgccatattgtgtaatttaagtgacacagacattttgtgtgagacttaaaacatggtgcctatatctgagagacctgtgtgaactattgagaagatcggaacagctccttactctgaggaagttgattcttatttgatggtggtattgtgaccactgaattcactccagtcaacagattcagaatgagaatggacgtttggtttttttttgtttttgtttttgttttt

SEQ ID NO: 331446 - DNA, 751 bp, Artificial Sequence
  derived and/or modified sequence
gtcagtggcgccgaaggctccgttaagcggcggcggcggttcctgtttccgtttcttcctctccgttcggtcgggagtagcatcctccactcagccacccttcccactcccccatcgtggggcagctgcggctgagggctgtggctttggcagctgcgacggggagcggcggagaccgcctctgctcccgcctggggttgctgcttttgctcagaggacatccatgaccctaatggtctttttgttcaagataaagtgattttttgcctttgttgattaactggacaaattcagattctattttgaccagcaataagttgaattatggggctagaagataaggactaaaaacaagaattggtgtccagaaagcatgtagagcgcatgaagtacaggacaataaagcttcctacacatatcaccaggaggatctctttgaaagattcactgcaggactaccagagagaataatttgtctgaagcatcatgtgttgaaacaacagaagtctattcacctgtgcactaactagaaacagagttacaatgttttcaattctttgagctccaggactccagggaagtgagttgaaaatctgaaaatgcggccatggactggttcctggcgttggattatgctcattctttttgcctgggggaccttgctgttttatataggtggtcacttggtacgagataatgaccatcctgatcactctagccgagaactgtccaagattctggcaaagcttga

SEQ ID NO: 331447 - DNA, 1728 bp, Artificial Sequence
  derived and/or modified sequence
atgcgaccctggactggatcctggcggtggataatgctgatcctctttgcctggggcacattgctgttctacattgggggccacctggtccgggacaacgatcaccccgatcattcttcaagagaactttctaaaatcttagccaagctggagagattgaaacagcagaatgaagatctgaggcgcatggcggaatctctgcgcattccagaagggcccatcgaccagggccccgccattgggagagttcgcgtgctggaagaacagttggtaaaggccaaagaacagatcgaaaactataagaaacaaaccaggaatgggcttggaaaggatcacgagattctgcggagaaggatagagaatggcgccaaagagctatggttcttcctccagagcgagctcaagaagctgaagaatctggagggcaatgagctgcagaggcacgctgatgagtttctgttggatctgggacaccatgaaagaagcatcatgactgacctgtattatctctcccagacagatggcgccggagactggagggagaaagaggccaaagacctaaccgagctagtgcaacggaggattacttacttgcagaatccaaaagattgttcaaaggcaaagaaactggtttgcaacattaacaaagggtgcggctatgggtgtcagctgcaccacgtggtgtactgtttcatgatcgcttacggcactcagagaacacttatcctggaatcacaaaactggaggtatgccaccggtggatgggagaccgtattccggcccgtatctgagacctgtacagatcgcagtggcatttcaaccggtcattggtccggcgaggtcaaggacaaaaacgttcaggtggtggaactccctatcgtggactcattgcatccccgccccccttacctcccattggccgtccctgaagacttggccgatagactggtccgagtgcacggagaccccgccgtgtggtgggtgtcgcagttcgttaagtatctcatacggcctcagccctggttagagaaggagattgaggaggcgaccaagaaactgggtttcaagcaccccgtgattggcgtgcatgttagacgaactgataaggtgggaacggaggcggcatttcatcctatcgaagagtatatggtgcacgtcgaagaacatttccagctgctggctagacgcatgcaggttgacaagaagagggtttacctggcaacagatgatccttctttactaaaagaggcaaagaccaagtatcccaactatgaattcatctctgacaactctattagttggtctgccggccttcacaatcgctacacagaaaatagcctcagaggagtcattctcgacatccacttcctctcacaggctgacttcttagtttgtacattcagcagccaggtgtgccgtgtggcatatgagatcatgcagactctgcacccagatgcctcagctaactttcactcactggacgacatctactattttggcgggcaaaacgcacataaccaaatcgctatctacgcacaccagccccgaaccgccgatgagattccaatggaaccgggtgacataattggggtggcaggaaaccactgggatggctactccaagggggtcaacagaaagcttgggcggacagggctgtacccatcatacaaggttagggagaagatcgagactgtcaaatatcctacttatcctgaggccgagaagtag

SEQ ID NO: 331448 - DNA, 1728 bp, Artificial Sequence
  derived and/or modified sequence
atgcggccctggacaggatcctggagatggatcatgctgattctttttgcctggggaaccctgctattttacataggaggccacttagtgagggacaatgatcaccctgatcattcgtcaagagaactgagcaagatcctcgcaaaactggagcggctgaagcagcagaacgaagatttgcgaagaatggctgaatccttaagaattcctgaaggcccaatagaccaaggccctgcaatagggcgagtgagagtcttggaggagcaactcgttaaagctaaggagcagattgaaaactacaagaagcaaactcgcaatgggctgggaaaagatcacgagatcctaaggcggagaatagagaatggtgcaaaggagttgtggtttttcctccagagcgagctcaaaaaactgaagaatttggaaggtaatgaactacagaggcacgccgacgagttcctcctggacctgggtcatcatgagcggtctatcatgactgatttatactatttaagtcagactgacggagcgggtgattggcgagaaaaagaggcaaaggatctgaccgagttagtgcagcggagaatcacctacctccagaacccaaaagactgttctaaagccaaaaagctggtttgtaacattaataaaggttgcggttatgggtgccagttgcaccacgtcgtctattgctttatgattgcttatggaacgcagcgcacacttattctcgagagtcagaattggaggtacgctactggagggtgggagaccgtctttaggcccgtatcggagacctgtacggaccgttcggggatttccaccggacactggtccggcgaagtgaaggacaagaacgtgcaggtggtcgagcttcctatcgttgattccctgcacccgcggcctccttaccttcccctggcggtccccgaagatctggccgacagattggtgcgggttcacggggaccctgccgtatggtgggtttctcagttcgtgaagtatctaattcgcccacagccctggcttgaaaaggaaatcgaagaggccaccaaaaaactggggttcaaacaccctgtgattggtgttcatgtgaggagaaccgataaagtgggtaccgaggcagccttccatccgatcgaagaatatatggtgcatgtcgaggagcatttccagctcttggcccgccggatgcaagtggacaagaaaagagtgtatctggccacggatgacccatccctcttaaaggaggccaagactaagtaccccaattatgaatttattagcgacaattctatttcctggtccgccggtctgcataatcgatatacagaaaactctctgcgcggggtcattctcgacattcatttcctctcccaggctgacttcctggtgtgtacttttagttctcaagtgtgtagagtcgcatacgaaataatgcaaaccttgcaccccgatgcttccgcaaattttcacagcctggatgatatctattattttgggggtcagaatgcgcacaatcagatcgcaatttacgctcaccagcctcgtaccgcggacgagatcccaatggaaccaggggacataatcggtgtagccggaaaccattgggacggctacagtaaaggcgtcaataggaagttggggcggacaggattataccccagctacaaggtccgggaaaaaattgagaccgtgaagtacccgacctacccagaggctgagaagtag

SEQ ID NO: 331449 - DNA, 1728 bp, Artificial Sequence
  derived and/or modified sequence
atgcgcccctggacaggcagctggcgctggatcatgctgattctgttcgcgtgggggactctgcttttctatatcgggggccacctagtcagggacaacgatcaccccgatcattcgtcacgcgagctcagcaaaatcctagccaagctcgaacggctgaagcagcaaaacgaggaccttagacgcatggccgagtctttgcgcatccctgagggaccaatcgatcaaggaccggctatcgggcgcgtaagagtgcttgaggagcaactggttaaggccaaggagcagatcgaaaattataagaagcagacgagaaacgggctaggtaaagatcatgaaatccttaggcgccgcattgagaacggtgctaaagagctttggttcttcctccagtccgagctaaaaaaactcaaaaacctcgaggggaatgaactccagcggcacgcagacgagttcctcttggacctaggacatcatgagcggtcgattatgacggacttgtactatcttagtcagactgatggagccggagattggcgggagaaagaggctaaagacctaaccgagcttgtgcaaaggaggattacctatctccaaaatcccaaggactgctccaaagctaagaaacttgtctgtaacataaataagggttgtggatacggctgtcagttgcaccacgtggtttattgttttatgatcgcatatggaacgcagagaactttgatattagagagccagaactggcggtatgctacaggtggatgggagacggtcttcaggcctgtgagcgagacctgtactgaccggagtggcatctcaacagggcactggtctggcgaggtgaaggataagaatgtgcaggtcgtggagctccccatcgtggactccttacatcctcgcccaccatatcttccgctcgccgtgcccgaggacttagctgatcgtttggttcgcgtgcacggcgacccagccgtttggtgggtgtcacagtttgtgaaatatttgattcgcccccaaccgtggcttgagaaggagatcgaagaagccacgaagaaactgggcttcaaacacccagttatcggggtccacgtccggcggacagacaaggtggggaccgaagcggcttttcacccgatcgaggagtatatggtgcacgtcgaagagcactttcagctgctggcccgtcgcatgcaggtggacaagaagcgcgtgtatttggccactgacgatccctccctgctcaaggaagctaaaacaaagtatccaaattacgagtttatttctgacaacagcatctcttggtccgcaggactgcacaatcggtacacggagaactccttgcgcggcgtcatccttgacatccacttcctttctcaggcagactttctagtgtgcactttcagctcccaggtgtgtagagttgcatacgagatcatgcagaccttacacccagatgcgagcgctaactttcactccctcgacgacatatattacttcggaggacagaatgctcacaaccaaattgccatatatgcacaccagccccgaactgcggatgaaataccaatggagcctggtgacataatcggggttgcagggaaccactgggatgggtattctaaaggggtgaacaggaagctgggccgcactggtctgtacccatcctacaaagtccgtgagaagattgagaccgtgaagtatcccacttaccctgaggcagagaaatag

SEQ ID NO: 331450 - DNA, 48 bp, Artificial Sequence
  derived and/or modified sequence
atgagaccttggactggctcttggcgatggatcatgctcatcctgtag

SEQ ID NO: 331451 - DNA, 135 bp, Artificial Sequence
  derived and/or modified sequence
atgagaccctggacagggtcatggagatggattatgctgatcctctttgcgtgggggaccctgctattttacataggcggccacctggtacgagacaatgaccatccagatcactcttctcgtgagcttagctag

SEQ ID NO: 331452 - DNA, 141 bp, Artificial Sequence
  derived and/or modified sequence
atgaggccctggacaggctcatggagatggattatgctgatcttatttgcctggggtactcttcttttctacattggcggccatctcgtgagggacaacgaccatcctgatcactcaagtcgcgagctgtctaagatttag

SEQ ID NO: 331453 - DNA, 126 bp, Artificial Sequence
  derived and/or modified sequence
atgagaccttggacggggagctggaggtggatcatgctaatcctgttcgcatgggggacgctactgttctatatcggtggccacctggttagagataacgaccaccccgatcactcctcaaggtag

SEQ ID NO: 331454 - DNA, 93 bp, Artificial Sequence
  derived and/or modified sequence
atgcggccctggaccggcagttggaggtggataatgctaatactgtttgcctggggcactctgctgttttacatcggtggccatctggtttag

SEQ ID NO: 331455 - DNA, 153 bp, Artificial Sequence
  derived and/or modified sequence
atgcgaccctggacaggctcgtggcggtggatcatgcttatcctgttcgcatggggtacccttcttttctacattggcggccatctggtgcgggataacgaccatcctgaccacagtagccgcgagctgtccaagatcctcgccaagctctag

SEQ ID NO: 331456 - DNA, 1728 bp, Artificial Sequence
  derived and/or modified sequence
atgaggccctggacaggctcctggcgctggatcatgctgatcctgtttgcctggggcaccctgctcttctacatcggcggccacctggtgcgggacaatgaccacccagaccacagcagccgggagctgagcaagatcctggccaagctggagcggctgaagcagcagaatgaagacctgcggaggatggccgagagcctgcgcatccctgagggccccatcgaccagggccctgccatcggccgggtgcgggtgctggaggagcagctggtgaaggccaaggagcagatcgagaactacaagaagcagaccagaaatggcctgggcaaggaccacgagatcctgcggaggagaattgaaaatggagccaaggagctgtggttcttcctgcagagcgagctgaagaagctgaagaacctggagggcaatgagctgcagagacatgctgatgagttcctgctggacctgggccaccacgagaggagcatcatgacagacctgtactacctgagccagacagatggagctggggactggagggagaaggaggccaaggacctgacagagctggtgcagaggcgcatcacctacctgcagaaccccaaggactgcagcaaggccaagaagctggtgtgcaacatcaacaagggctgcggctacggctgccagctgcaccacgtggtgtactgcttcatgattgcctacggcacccagaggaccctcatcctggagagccagaactggaggtatgccaccggcggctgggagaccgtcttccggcctgtgtctgagacctgcacagacaggagcggcatcagcacaggccactggagcggggaggtgaaggacaagaatgtgcaggtggtggagctgcccatcgtggacagcctgcaccccaggcctccctacctgcccctggccgtgcctgaggacctggccgaccggctggtgcgggtgcacggggaccctgctgtgtggtgggtgtcccagtttgtgaagtacctgatccggccccagccctggctggagaaggagattgaggaggccaccaagaagctgggcttcaagcaccctgtgattggagtgcacgtgagaagaacagacaaggtgggcacagaggccgccttccaccccatcgaggagtacatggtgcacgtggaggagcacttccagctgctggcccggaggatgcaggtggacaagaagagggtgtacctggccacagatgaccccagcctgctgaaggaggccaagaccaagtaccccaactatgagttcatcagtgacaacagcatctcctggagcgctggcctgcacaaccgctacacagagaacagcctgcggggcgtcatcctggacatccacttcctgagccaggccgacttcctggtgtgcaccttcagcagccaggtgtgccgggtggcctatgagatcatgcagaccctgcacccagatgccagcgccaacttccacagcctggatgacatctactactttggaggccagaatgcccacaaccagatcgccatctatgcccaccagcccaggacagcagatgagatccccatggagcccggggacatcattggagtggccggcaaccactgggatggctacagcaaaggagtgaacaggaagctgggccgcacaggcctgtaccccagctacaaggtgcgggagaagattgagaccgtgaagtaccccacctacccagaggccgagaagtag

SEQ ID NO: 331457 - DNA, 48 bp, Artificial Sequence
  derived and/or modified sequence
atgaggccctggacaggctcctggcgctggatcatgctgatcctgtag

SEQ ID NO: 331458 - DNA, 135 bp, Artificial Sequence
  derived and/or modified sequence
atgaggccctggacaggctcctggcgctggatcatgctgatcctgtttgcctggggcaccctgctcttctacatcggcggccacctggtgcgggacaatgaccacccagaccacagcagccgggagctgtcctag

SEQ ID NO: 331459 - DNA, 141 bp, Artificial Sequence
  derived and/or modified sequence
atgaggccctggacaggctcctggcgctggatcatgctgatcctgtttgcctggggcaccctgctcttctacatcggcggccacctggtgcgggacaatgaccacccagaccacagcagccgggagctgagcaagatctag

SEQ ID NO: 331460 - DNA, 126 bp, Artificial Sequence
  derived and/or modified sequence
atgaggccctggacaggctcctggcgctggatcatgctgatcctgtttgcctggggcaccctgctcttctacatcggcggccacctggtgcgggacaatgaccacccagaccacagcagcaggtag

SEQ ID NO: 331461 - DNA, 93 bp, Artificial Sequence
  derived and/or modified sequence
atgaggccctggacaggctcctggcgctggatcatgctgatcctgtttgcctggggcaccctgctcttctacatcggcggccacctggtgtag

SEQ ID NO: 331462 - DNA, 153 bp, Artificial Sequence
  derived and/or modified sequence
atgaggccctggacaggctcctggcgctggatcatgctgatcctgtttgcctggggcaccctgctcttctacatcggcggccacctggtgcgggacaatgaccacccagaccacagcagccgggagctgagcaagatcctggccaagctgtag

SEQ ID NO: 331463 - DNA, 1728 bp, Artificial Sequence
  derived and/or modified sequence
atgcggccctggaccggcagctggcggtggatcatgctgatcctgtttgcttggggaacactgctgttctacatcggcgggcatctcgtcagggacaatgaccaccctgaccactcatcacgagaactcagcaagatactggctaaattggagcggctgaagcaacaaaacgaggatctgagaaggatggcagaaagcctgcgtatacctgagggccctatagatcaaggaccagccatcgggcgggtgagggtccttgaggagcagctggtgaaggctaaggagcagatcgagaattataagaaacaaacgcgaaatggtctaggaaaggatcacgagattttgcggagaaggatagagaacggggccaaggaactgtggtttttcttgcagagcgaactaaaaaagctcaagaatctggaaggcaatgagctacagagacacgccgacgagtttttacttgatctgggacatcacgaaaggagcatcatgaccgatctctattacctgtctcaaaccgacggtgcgggcgactggagggaaaaggaagccaaagacctgactgagctggtgcagagacgcattacctatctccaaaatcctaaagactgtagtaaagccaagaaactggtatgcaacatcaacaagggctgtggctacggttgccagttacatcatgtggtatactgtttcatgattgcctacggaacacagaggaccctcatcttggagtcccagaattggcggtacgcaactggcggctgggagacagtgttccgcccagtgagcgaaacctgcaccgatcgcagcggcatcagcacaggccattggtctggggaagttaaagacaaaaatgtgcaagtagtggaattgccaatcgttgactccctgcaccctaggccaccttacctcccccttgccgtcccagaagatttggcagatagactcgtgagagtgcatggagaccccgccgtttggtgggtctcacaattcgtaaaatacctcattagacctcagccttggctggaaaaggagattgaagaggccactaaaaagcttggctttaaacatccagtcattggtgtgcacgtgcgtcggacagataaagtcgggacggaggcagcctttcaccctatcgaggagtacatggtacacgtggaggagcacttccagctgcttgctcgacggatgcaagtcgataaaaagcgggtctaccttgccacagatgatccctccctgctgaaagaagcaaagacaaagtacccaaattacgaattcatttcagataattctatcagctggagcgcagggctgcataataggtacactgaaaattctctgcggggcgtgatcctggacattcacttcctgagccaggccgattttctggtctgcaccttttcttcccaggtttgcagggtggcatacgaaattatgcagaccctgcaccccgatgctagtgccaattttcacagcctagacgacatctattatttcggtggacaaaacgcacataatcagatcgctatctatgcccaccagccacgcactgcagatgaaatacctatggaaccaggcgatatcatcggtgttgcaggtaaccattgggacggctattctaagggtgtaaatcgcaagttgggacgcacaggcctttacccatcatacaaggtaagggagaaaatcgagacagttaagtaccctacctatccggaggctgaaaaatag

SEQ ID NO: 331464 - DNA, 1728 bp, Artificial Sequence
  derived and/or modified sequence
atgcggccctggaccggcagctggcggtggatcatgctgatcctgttcgcctggggtacactgctgttctatatcggggggcatctggtgagggacaatgaccaccctgatcattccagccgcgagctgtcgaagattctagccaagctggagcgtttgaaacagcagaacgaggaccttcgacgtatggccgaatcattgcggatacccgaagggcctattgaccagggcccagccatcggcagggttcgtgtgctcgaagaacaattggtcaaggcaaaggagcagattgaaaactataaaaagcaaacaaggaacggccttggaaaggatcatgagatcctgaggcggcggatcgaaaacggcgcgaaggaactgtggttctttctgcaatccgaactgaagaaactgaaaaatctggagggaaacgagcttcaaagacatgccgatgagtttctgctggatctggggcatcatgaaagatccatcatgacagatctgtattacctctcccagacagacggcgccggggactggagggaaaaggaagctaaagatctcacagaactcgtacagcgaaggattacttacttacagaaccccaaggactgtagtaaagctaagaaattagtatgtaacattaataagggctgtggttacggctgccaactgcaccacgtcgtctactgtttcatgatagcatatggaactcagcggacattgatcttagagagtcagaactggagatatgcgactggagggtgggaaactgtattcagaccagtgtctgagacatgcacagaccgcagcggaatttcaactggccactggagtggggaagtgaaagacaagaacgtgcaggtcgtcgagctcccaattgtggactccctgcacccacggccgccttacttacctctcgcagtcccagaagacctggcagatagactggttagagttcacggcgatcccgcagtatggtgggtcagccaatttgtgaaataccttattcgccctcagccatggcttgagaaggaaatcgaagaggccacaaagaagctgggattcaagcacccggtcatcggagtacacgttcggcgcactgataaggtgggtaccgaagccgcttttcatcccatcgaagagtatatggtgcacgtggaggaacactttcagctgttggctagaagaatgcaagtggataaaaagcgcgtgtacctcgccaccgacgatccctccctactgaaagaggccaaaaccaagtacccgaattatgagtttattagtgacaacagtataagctggtcggcggggttgcacaaccgttacaccgaaaattcactcagaggcgtgatactcgatatacactttctctctcaggccgactttctggtgtgtacgtttagtagccaggtttgtagagtggcctatgagattatgcagaccctgcatcccgacgccagcgctaactttcatagcctggacgacatctattattttggaggccaaaatgcacacaatcagattgcaatttatgcacatcaaccccgtactgcagacgaaattcccatggagccgggtgatataataggagtggccggcaaccactgggacgggtacagcaagggagtaaatcgaaaactggggaggactggactctacccaagttacaaggtgcgggagaagatagagacagtcaaatatccgacctacccagaagccgagaagtag

SEQ ID NO: 331465 - DNA, 1728 bp, Artificial Sequence
  derived and/or modified sequence
atgcggccctggaccggcagctggcggtggatcatgctgatcctgtttgcttgggggacattgctgttctacataggcggccacctggtgagagataacgaccatcccgatcatagtagcagagaactgagtaagatcttggccaagcttgagcggctgaaacaacaaaacgaggacctgagaaggatggctgaatctctgcggatcccggaaggcccgattgaccaaggtcccgctataggcagagtccgggtcctggaggaacagctcgtgaaggcaaaggagcaaatagaaaattataaaaaacaaacccgtaacggcttgggcaaggaccacgagatcctgcgtcggaggatagagaacggtgcaaaggaactctggttcttcctgcagtcggaactgaagaaactgaaaaacctggaaggtaatgaactacaaaggcatgcggatgagtttctcctggatctcgggcaccacgagaggagtataatgaccgatctttattatctgagtcagacagacggagcaggtgactggcgggagaaggaggcaaaggatttgacggaacttgtgcagaggcggatcacctatttgcaaaacccaaaggattgttccaaagctaaaaagctggtatgcaatattaacaagggctgcggatacggctgccagttacaccatgtggtgtattgcttcatgattgcctacggaactcaaaggactctcatactcgaatcacagaactggaggtacgccaccgggggctgggagacagtttttagacccgtgagcgagacctgcaccgataggtcgggaatcagcaccggtcattggtcaggagaggtgaaagacaagaatgtacaagttgtggaactccctatcgtggactccctgcacccacgtccaccgtatctgccactggcagtcccggaagaccttgcagaccgcctcgtgcgcgttcacggggatcctgcggtgtggtgggtttcccagtttgtcaagtatctgatacggcctcaaccgtggcttgagaaagaaatcgaggaggctaccaaaaaattggggttcaaacatcctgtcatcggggtgcacgttcgaaggactgataaagtgggtaccgaagccgccttccaccccatcgaggagtacatggtgcacgtcgaagagcatttccagctcctggcacgacggatgcaagtcgataagaagagggtgtatttggcaactgatgacccttcactcctgaaggaggctaaaacaaagtacccgaactatgaattcattagcgacaatagcattagctggagcgctggcttgcacaatcgatatacagagaatagtcttcgaggggtgattcttgatattcacttcttaagtcaggccgactttctggtgtgcaccttctcaagccaggtctgtagggtggcctacgaaatcatgcagactctgcacccggatgcctctgccaattttcacagtctggacgacatttattattttgggggccagaatgcgcataatcagatcgcgatctatgctcatcagccaagaaccgcagacgagattcccatggaaccgggcgacattattggggtggccggcaaccattgggatgggtactccaaaggagtgaatcggaaactgggaagaaccgggctgtacccttcttataaagtacgggagaagatcgaaaccgttaagtaccccacttacccagaagccgaaaaatag

SEQ ID NO: 331466 - DNA, 48 bp, Artificial Sequence
  derived and/or modified sequence
atgcggccctggaccggcagctggcggtggatcatgctgatcctgtag

SEQ ID NO: 331467 - DNA, 135 bp, Artificial Sequence
  derived and/or modified sequence
atgcggccctggaccggcagctggcggtggatcatgctgatcctgtttgcgtggggcaccctactcttttacattggcggccacctggtgcgagataatgaccatccggaccatagctctcgagagctgtcctag

SEQ ID NO: 331468 - DNA, 141 bp, Artificial Sequence
  derived and/or modified sequence
atgcggccctggaccggcagctggcggtggatcatgctgatcctgttcgcctggggcactctgcttttctacatcgggggtcatctcgtgagagataatgaccacccagaccattcttctcgtgagctttcaaagatttag

SEQ ID NO: 331469 - DNA, 126 bp, Artificial Sequence
  derived and/or modified sequence
atgcggccctggaccggcagctggcggtggatcatgctgatcctgttcgcatggggcacacttttattctacattggagggcatctggtcagagacaacgaccaccccgatcactctagtcgttag

SEQ ID NO: 331470 - DNA, 93 bp, Artificial Sequence
  derived and/or modified sequence
atgcggccctggaccggcagctggcggtggatcatgctgatcctgtttgcctggggcaccctcctattctacatcggaggccatctggtatag

SEQ ID NO: 331471 - DNA, 153 bp, Artificial Sequence
  derived and/or modified sequence
atgcggccctggaccggcagctggcggtggatcatgctgatcctgttcgcctggggcacgctgttgttttacatcggtggacacctcgtccgtgacaacgaccatcccgatcatagttctcgggagctttctaagatactcgcaaagctttag

SEQ ID NO: 331472 - DNA, 1728 bp, Artificial Sequence
  derived and/or modified sequence
atgaggccatggacaggcagttggcgctggatcatgttaattctatttgcatggggcaccctgttgttctatattggcggacacctcgttcgtgacaacgatcaccccgaccattccagtagggaactgagtaagatactggccaagctggaacgcctgaaacagcagaatgaggaccttcggagaatggcagagagtctgaggatccccgagggcccaattgatcagggtcctgccatagggcgagtccgtgtgctggaggagcaactggtgaaagctaaggagcagattgagaactacaagaagcaaaccagaaatggattagggaaggaccatgaaatccttagaagacgcatcgaaaatggggcaaaagagttatggtttttcttgcagtctgagttgaaaaaattaaagaatcttgaaggaaatgaacttcaaagacacgcagacgagtttctactggatttggggcatcacgaacggagcatcatgaccgacctgtattacctttctcagaccgatggcgctggcgattggcgggagaaggaggctaaggatctgacggaattggtgcagcggagaatcacgtatttacagaaccccaaggactgctctaaggccaagaagttagtttgtaacatcaataaagggtgcggatacggatgccagctacaccacgtcgtgtactgctttatgattgcatacggaacacagcgaacgctcatcctggagtcacagaactggcgatacgcgaccggagggtgggaaaccgtatttcggccagtcagcgagacttgcactgatcgctcaggtatttccactggacactggtcaggggaggttaaggacaaaaacgtccaggtcgtcgaactgcctatcgtcgacagcctgcatcctaggcccccatatctgccactcgccgttcccgaagacctggctgacaggttggtacgtgtgcacggagaccctgccgtctggtgggtaagccaattcgtcaagtatctgatcagacctcagccatggctcgagaaggagattgaagaggcaaccaaaaagttgggcttcaaacaccccgtaattggggtccatgtccgaaggaccgataaggtgggaacagaagccgcattccatccaattgaagagtacatggtgcacgtcgaagaacactttcagctgctggcccgtagaatgcaggtcgataagaaaagagtgtatctggctaccgacgatccctctttgctaaaggaggccaaaacaaaatatccgaactacgaattcatatccgacaattccatctcctggtccgctggtctgcacaatcgatatacagagaattcgctgcgtggagttattctggacatccactttctctcacaagccgatttcctcgtttgcacattctccagccaggtgtgtcgggtcgcatacgaaatcatgcagacgttgcatcccgacgcttccgctaacttccacagtttggatgacatctattattttggtgggcagaatgcccacaatcaaattgccatctacgcccaccagcctaggacagccgatgagattcccatggagcctggcgatatcattggcgtcgccggaaaccactgggatgggtatagcaaaggcgtgaaccgcaaactggggcgaacggggctctacccatcttataaagttagggagaagatcgagaccgtgaagtaccctacctatcccgaggcagagaagtag

SEQ ID NO: 331473 - DNA, 1728 bp, Artificial Sequence
  derived and/or modified sequence
atgcgcccttggacaggctcctggcggtggatcatgctaattctgtttgcatggggaaccttgctgttttacatcgggggtcacctcgtgagggataacgaccatcctgatcattccagccgcgaattatctaaaattctggccaaactggaaagacttaagcaacagaacgaggacctgcggagaatggccgaatccctgagaattccagagggccctattgaccaggggccagctattggcagagtgagagtgttagaggagcagctggtaaaagccaaagagcagatcgagaactataagaaacagacaaggaatggcctgggcaaggaccatgagatcttacgacggagaatagaaaatggagctaaagagttgtggtttttcctgcagagcgagctgaaaaagctgaaaaatcttgaaggcaacgaacttcaaaggcacgctgatgagtttttgttggatttgggccaccacgaacgaagtataatgaccgatctttactatctgtcacaaacggacggtgccggagactggagagaaaaggaggccaaggatctgaccgaactggtgcagagaaggatcacttatctccagaacccgaaggattgtagcaaagccaagaaactcgtatgtaatatcaataagggatgcggctacgggtgccagctccatcatgtggtatattgctttatgattgcctacgggactcagcgcaccctgattctagagagccaaaactggcgatacgcaacaggaggatgggaaaccgttttcagacctgtgtcagagacatgcactgacagatccgggatcagcaccgggcattggtccggcgaagtcaaggacaaaaacgtccaggtggtcgaactccccatcgtggatagcctccacccacgccctccttatctgcctttggccgttccagaggatcttgctgatcgactcgttcgggtgcatggagacccagcggtatggtgggtttctcagtttgtgaaatacttaataagaccgcagccgtggttagaaaaggagatcgaagaggctactaagaagctgggttttaagcaccctgtcatcggcgtgcatgtgcggcgtactgacaaagtgggaacagaagctgcttttcacccaatcgaagaatacatggtgcacgtcgaagaacacttccagctgctcgcgagaaggatgcaggtagataagaagcgcgtttatttggctacggacgatccatctctcttaaaggaagccaaaacgaagtacccaaattacgagttcatttctgataatagcattagctggtccgcaggcctccacaaccgttacaccgaaaactcgcttagaggcgtcatcctcgacattcactttctgagtcaagctgacttcctggtttgcacctttagtagccaggtatgtcgtgttgcatatgaaattatgcagaccttacacccggacgcctcggccaacttccactccttggatgacatttactacttcgggggacaaaacgctcacaaccaaatagcgatctatgctcatcagccaagaaccgccgacgaaatcccaatggagcctggagacatcatcggcgtcgcagggaatcattgggatggatattcaaaaggggtgaataggaagctgggccgtaccggcttgtatccgtcgtacaaagtaagagaaaaaatcgagaccgtgaagtacccgacgtaccccgaggcagagaaatag

SEQ ID NO: 331474 - DNA, 1728 bp, Artificial Sequence
  derived and/or modified sequence
atgcgaccttggactggtagttggcggtggattatgctgatcttgtttgcatggggcaccctcctcttttacattggaggccatctcgtgcgggacaacgatcatcccgaccattcctcccgcgagttgagcaagatcctcgctaaactggagaggctgaagcaacaaaacgaagaccttcggcgaatggctgagtcactgcgcattcccgagggcccaatagatcagggtcccgcaatcggcagggtacgggtccttgaagaacagctggtgaaggccaaagagcaaattgaaaactataaaaagcaaaccaggaacggtctgggtaaagaccatgagatcctgaggcggagaattgagaatggcgcaaaggagctgtggtttttcctgcagtcggagttaaagaagctgaaaaatcttgaagggaatgagttgcaacggcacgcagacgagtttctgctggaccttggccaccatgagcgttcaatcatgacagacctgtactatcttagccagaccgacggcgcaggagactggcgcgagaaggaagccaaggacctgacggagctagtgcagcggcgtatcacgtacctgcagaacccaaaggattgcagcaaggctaaaaaactggtgtgcaacatcaataaggggtgtgggtacggatgccagcttcaccacgtagtgtattgcttcatgatagcatatggcacacagagaaccctgatcctggagagccagaattggcgatatgcgaccggcggatgggagacagtgtttagacctgtgagtgaaacatgcacagataggagcgggatttcaaccggccactggagtggggaagtcaaagataaaaatgttcaagtggtggagcttccaattgtcgatagcttgcaccctcggccaccatacttaccacttgcagtcccggaagacttggccgatagactcgtccgggtgcacggggatcccgctgtgtggtgggtgtctcagtttgtcaaatatcttattcgtccacagccttggctggaaaaggagatcgaagaggccacaaaaaaactgggcttcaaacaccctgtgatcggagtgcacgttagacgtaccgacaaggtggggacggaggctgcattccacccaatcgaggaatatatggtgcacgttgaggaacattttcagttgttggctaggcggatgcaggtcgacaagaaacgcgtatatcttgcgactgatgatccctccctgcttaaagaagccaaaacgaagtatcccaattatgagtttattagtgacaattcgatttcttggtccgctggccttcacaacagatacaccgagaacagcctgcgcggtgtgatccttgatatccacttcctgagtcaggctgatttcttggtatgcacattttctagccaggtatgtagagtcgcttacgaaataatgcagacccttcaccctgacgcatctgctaatttccactcgctagatgatatttactacttcggcggacaaaatgcccataaccaaattgccatatacgctcaccaacctaggactgcggacgaaattcctatggaacccggagacattataggcgtcgcgggaaatcattgggatgggtattctaaaggcgttaacagaaaattggggcgaaccggcctatacccatcctacaaggttagagagaaaattgaaaccgtgaagtatcctacatatcccgaggccgaaaaatag

SEQ ID NO: 331475 - DNA, 48 bp, Artificial Sequence
  derived and/or modified sequence
atgaggccctggacaggatcctggaggtggatcatgcttatcttgtag

SEQ ID NO: 331476 - DNA, 135 bp, Artificial Sequence
  derived and/or modified sequence
atgagaccatggacaggatcctggaggtggattatgctgattttattcgcctggggtaccctgctgttctatattggcggacacctggttcgcgacaatgaccaccctgatcactccagccgcgaactgtcctag

SEQ ID NO: 331477 - DNA, 141 bp, Artificial Sequence
  derived and/or modified sequence
atgaggccctggacgggttcatggaggtggatcatgcttattctgtttgcctggggtaccctgctattttacattggagggcacctagtgcgtgataatgaccaccccgaccattcttcccgtgagttatcaaaaatatag

SEQ ID NO: 331478 - DNA, 126 bp, Artificial Sequence
  derived and/or modified sequence
atgaggccttggacagggtcctggcgctggatcatgcttatcctgtttgcctggggcacactgctgttttacatcggtggtcatctagtacgggacaatgaccatccagatcattcctcccggtag

SEQ ID NO: 331479 - DNA, 93 bp, Artificial Sequence
  derived and/or modified sequence
atgagaccgtggaccggttcttggcggtggatcatgctgatcctgttcgcttggggcacccttctcttctacatcggagggcatttggtttag

SEQ ID NO: 331480 - DNA, 153 bp, Artificial Sequence
  derived and/or modified sequence
atgcgcccttggacgggctcctggagatggattatgctaattcttttcgcttggggtactttattgttctatatcgggggacatctggtccgagataatgaccaccccgatcactccagtagggaacttagtaaaattctggccaagctgtag

SEQ ID NO: 331481 - DNA, 1728 bp, Artificial Sequence
  derived and/or modified sequence
atgagaccctggaccggcagctggagatggatcatgctgatcctgttcgcctggggcaccctgctgttctacatcggcggccacctggtgagagacaacgaccaccccgaccacagcagcagagagctgagcaagatcctggccaagctggagagactgaagcagcagaacgaggacctgagaagaatggccgagagcctgagaatccccgagggccccatcgaccagggccccgccatcggcagagtgagagtgctggaggagcagctggtgaaggccaaggagcagatcgagaactacaagaagcagaccagaaacggcctgggcaaggaccacgagatcctgagaagaagaatcgagaacggcgccaaggagctgtggttcttcctgcagagcgagctgaagaagctgaagaacctggagggcaacgagctgcagagacacgccgacgagttcctgctggacctgggccaccacgagagaagcatcatgaccgacctgtactacctgagccagaccgacggcgccggcgactggagagagaaggaggccaaggacctgaccgagctggtgcagagaagaatcacctacctgcagaaccccaaggactgcagcaaggccaagaagctggtgtgcaacatcaacaagggctgcggctacggctgccagctgcaccacgtggtgtactgcttcatgatcgcctacggcacccagagaaccctgatcctggagagccagaactggagatacgccaccggcggctgggagaccgtgttcagacccgtgagcgagacctgcaccgacagaagcggcatcagcaccggccactggagcggcgaggtgaaggacaagaacgtgcaggtggtggagctgcccatcgtggacagcctgcaccccagacccccctacctgcccctggccgtgcccgaggacctggccgacagactggtgagagtgcacggcgaccccgccgtgtggtgggtgagccagttcgtgaagtacctgatcagaccccagccctggctggagaaggagatcgaggaggccaccaagaagctgggcttcaagcaccccgtgatcggcgtgcacgtgagaagaaccgacaaggtgggcaccgaggccgccttccaccccatcgaggagtacatggtgcacgtggaggagcacttccagctgctggccagaagaatgcaggtggacaagaagagagtgtacctggccaccgacgaccccagcctgctgaaggaggccaagaccaagtaccccaactacgagttcatcagcgacaacagcatcagctggagcgccggcctgcacaacagatacaccgagaacagcctgagaggcgtgatcctggacatccacttcctgagccaggccgacttcctggtgtgcaccttcagcagccaggtgtgcagagtggcctacgagatcatgcagaccctgcaccccgacgccagcgccaacttccacagcctggacgacatctactacttcggcggccagaacgcccacaaccagatcgccatctacgcccaccagcccagaaccgccgacgagatccccatggagcccggcgacatcatcggcgtggccggcaaccactgggacggctacagcaagggcgtgaacagaaagctgggcagaaccggcctgtaccccagctacaaggtgagagagaagatcgagaccgtgaagtaccccacctaccccgaggccgagaagtag

SEQ ID NO: 331482 - DNA, 48 bp, Artificial Sequence
  derived and/or modified sequence
atgagaccctggaccggcagctggagatggatcatgctgatcctgtag

SEQ ID NO: 331483 - DNA, 135 bp, Artificial Sequence
  derived and/or modified sequence
atgagaccctggaccggcagctggagatggatcatgctgatcctgttcgcctggggcaccctgctgttctacatcggcggccacctggtgagagacaacgaccaccccgaccacagcagcagagagctgagctag

SEQ ID NO: 331484 - DNA, 141 bp, Artificial Sequence
  derived and/or modified sequence
atgagaccctggaccggcagctggagatggatcatgctgatcctgttcgcctggggcaccctgctgttctacatcggcggccacctggtgagagacaacgaccaccccgaccacagcagcagagagctgagcaagatctag

SEQ ID NO: 331485 - DNA, 126 bp, Artificial Sequence
  derived and/or modified sequence
atgagaccctggaccggcagctggagatggatcatgctgatcctgttcgcctggggcaccctgctgttctacatcggcggccacctggtgagagacaacgaccaccccgaccacagcagcagatag

SEQ ID NO: 331486 - DNA, 93 bp, Artificial Sequence
  derived and/or modified sequence
atgagaccctggaccggcagctggagatggatcatgctgatcctgttcgcctggggcaccctgctgttctacatcggcggccacctggtgtag

SEQ ID NO: 331487 - DNA, 153 bp, Artificial Sequence
  derived and/or modified sequence
atgagaccctggaccggcagctggagatggatcatgctgatcctgttcgcctggggcaccctgctgttctacatcggcggccacctggtgagagacaacgaccaccccgaccacagcagcagagagctgagcaagatcctggccaagctgtag

SEQ ID NO: 331488 - DNA, 1368 bp, Artificial Sequence
  derived and/or modified sequence
ctgtatttaggcctgtaagtgagacatgcacagacagatctggcatctccactggacactggtcaggtaccccaattatgaatttattagtgataactctatttcctggtcagctggactgcacaatcgatacacagaaaattcacttcgtggagtgatcctggatatacattttctctctcaggcagacttcctagtgtgtactttttcatcccaggtctgtcgagttgcttatgaaattatgcaaacactacatcctgatgcctctgcaaacttccattctttagatgacatctactattttgggggccagaatgcccacaatcaaattgccatttatgctcaccaaccccgaactgcagatgaaattcccatggaacctggagatatcattggtgtggctggaaatcattgggatggctattctaaaggtgtcaacaggaaattgggaaggacgggcctatatccctcctacaaagttcgagagaagatagaaacggtcaagtaccccacatatcctgaggctgagaaataaagctcagatggaagagataaacgaccaaactcagttcgaccaaactcagttcaaaccatttcagccaaactgtagatgaagagggctctgatctaacaaaataaggttatatgagtagatactctcagcaccaagagcagctgggaactgacataggcttcaattggtggaattcctctttaacaagggctgcaatgccctcatacccatgcacagtacaataatgtactcacatataacatgcaaacaggttgttttctactttgcccctttcagtatgtccccataagacaaacactgccatattgtgtaatttaagtgacacagacattttgtgtgagacttaaaacatggtgcctatatctgagagacctgtgtgaactattgagaagatcggaacagctccttactctgaggaagttgattcttatttgatggtggtattgtgaccactgaattcactccagtcaacagattcagaatgagaatggacgtttggtttttttttgtttttgtttttgttttttcctttataaggttgtctgtttttttttttttaaataattgcatcagttcattgacctcatcattaataagtgaagaatacatcagaaaataaaatattcactctccattagaaaattttgtaaaacaatgccatgaacaaattctttagtactcaatgtttctggacattctctttgataacaaaaaataaattttaaaaaggaattttgtaaagtttctagaattttatatcattggatgatatgttgatcagccttatgtggaagaactgtgataaaaagaggagctttttagtttttcagctt

SEQ ID NO: 331489 - DNA, 510 bp, Artificial Sequence
  derived and/or modified sequence
atgcatcggcagatttggcatctgcattggacactcgtgcgctacccgaactacgaatttatcagtgataactcaattagctggagcgctgggcttcataaccgatataccgagaacagtctgcggggagtgatactagatatacatttcctgtcccaggccgattttctcgtgtgcaccttttccagtcaggtatgcagagttgcttacgaaataatgcagacactacatcctgacgcaagtgccaattttcacagtctggacgatatatactactttggaggccaaaacgcccacaatcagatagctatatacgcccatcagcctagaacagccgatgaaatccctatggagcccggcgacataataggtgttgcagggaatcattgggatggctactccaagggggtgaaccggaaactgggcagaaccggactgtacccatcttacaaggtccgagagaaaattgagacagttaagtacccgacctaccctgaagccgagaaatag

SEQ ID NO: 331490 - DNA, 510 bp, Artificial Sequence
  derived and/or modified sequence
atgcaccggcagatctggcacctgcactggaccctggtgcgctaccccaactatgagttcatcagtgacaacagcatctcctggagcgctggcctgcacaaccgctacacagagaacagcctgcggggcgtcatcctggacatccacttcctgagccaggccgacttcctggtgtgcaccttcagcagccaggtgtgccgggtggcctatgagatcatgcagaccctgcacccagatgccagcgccaacttccacagcctggatgacatctactactttggaggccagaatgcccacaaccagatcgccatctatgcccaccagcccaggacagcagatgagatccccatggagcccggggacatcattggagtggccggcaaccactgggatggctacagcaaaggagtgaacaggaagctgggccgcacaggcctgtaccccagctacaaggtgcgggagaagattgagaccgtgaagtaccccacctacccagaggccgagaagtag

SEQ ID NO: 331491 - DNA, 510 bp, Artificial Sequence
  derived and/or modified sequence
atgcaccggcagatctggcacctgcactggaccctggtgcggtaccccaactacgagtttatcagtgacaactcaatcagctggagcgccggactgcataatcgatacaccgaaaatagcctgaggggtgtgatcctggacattcactttctgtcccaagctgactttctagtgtgcaccttttcttcacaggtttgcagagtagcgtatgagatcatgcagacgctccatccggatgcatctgcaaatttccactctctcgatgatatctactacttcgggggacagaatgcacataaccaaatcgctatctacgcacatcagcctcggactgcggatgaaattcctatggagcccggcgatattatcggcgtagcagggaaccattgggacggatactcaaagggagtgaacagaaaactcggaagaaccggcttataccctagctataaagtgcgagagaagatagaaaccgtgaaatatccgacgtatccagaagcagagaagtag

SEQ ID NO: 331492 - DNA, 510 bp, Artificial Sequence
  derived and/or modified sequence
atgcaccggcaaatctggcatttgcattggactctggtgagatacccaaattacgaatttataagcgataattctatttcttggtctgccggacttcacaatagatataccgagaactcactcagaggcgtcatccttgacattcacttcctctcacaggcagatttcctggtctgcactttctctagccaagtctgccgggtggcctacgagatcatgcagacattacatccagacgctagcgcaaactttcattctctagacgacatttactatttcggaggtcagaacgcccacaaccagatcgcgatttacgcccaccaaccacggaccgccgatgagatcccaatggaacccggtgacatcatcggggtggctggaaatcactgggatgggtactctaaaggtgtaaatcgcaaactgggaagaactggactgtaccctagttataaagtcagggagaagatcgagacggtcaagtacccgacataccctgaggcagagaaatag

SEQ ID NO: 331493 - DNA, 510 bp, Artificial Sequence
  derived and/or modified sequence
atgcacagacagatctggcacctgcactggaccctggtgagataccccaactacgagttcatcagcgacaacagcatcagctggagcgccggcctgcacaacagatacaccgagaacagcctgagaggcgtgatcctggacatccacttcctgagccaggccgacttcctggtgtgcaccttcagcagccaggtgtgcagagtggcctacgagatcatgcagaccctgcaccccgacgccagcgccaacttccacagcctggacgacatctactacttcggcggccagaacgcccacaaccagatcgccatctacgcccaccagcccagaaccgccgacgagatccccatggagcccggcgacatcatcggcgtggccggcaaccactgggacggctacagcaagggcgtgaacagaaagctgggcagaaccggcctgtaccccagctacaaggtgagagagaagatcgagaccgtgaagtaccccacctaccccgaggccgagaagtag

SEQ ID NO: 331494 - protein, 589 aa, Artificial Sequence
  derived and/or modified sequence
MGFMVADLWATSRLLVNYPEPYRSQILDYLFKPNFGASLHILKVEIGGDGQTTDGTEPSHMHYALDENYFRGYEWWLMKEAKKRNPNITLIGLPWSFPGWLGKGFDWPYVNLQLTAYYVVTWIVGAKRYHDLDIDYIGIWNERSYNANYIKILRKMLNYQGLQRVKIIASDNLWESISASMLLDAELFKVVDVIGAHYPGTHSAKDAKLTGKKLWSSEDFSTLNSDMGAGCWGRILNQNYINGYMTSTIAWNLVASYYEQLPYGRCGLMTAQEPWSGHYVVESPVWVSAHTTQFTQPGWYYLKTVGHLEKGGSYVALTDGLGNLTIIIETMSHKHSKCIRPFLPYFNVSQQFATFVLKGSFSEIPELQVWYTKLGKTSERFLFKQLDSLWLLDSDGSFTLSLHEDELFTLTTLTTGRKGSYPLPPKSQPFPSTYKDDFNVDYPFFSEAPNFADQTGVFEYFTNIEDPGEHHFTLRQVLNQRPITWAADASNTISIIGDYNWTNLTIKCDVYIETPDTGGVFIAGRVNKGGILIRSARGIFFWIFANGSYRVTGDLAGWIIYALGRVEVTAKKWYTLTLTIKVAGRRKKT

SEQ ID NO: 331495 - DNA, 2276 bp, Artificial Sequence
  derived and/or modified sequence
atgtgacccacacaatggctgagtggctactctcggcttcctggcaacgccgagcgaaagctatgactgcggccgcgggttcggcgggccgcgccgcggtgcccttgctgctgtgtgcgctgctggcgcccggcggcgcgtacgtgctcgacgactccgacgggctgggccgggagttcgacggcatcggcgcggtcagcggcggcggggcaacctcccgacttctagtaaattacccagagccctatcgttctcagatattggattatctctttaagccgaattttggtgcctctttgcatattttaaaagtggaaataggtggtgatgggcagacaacagacggcactgagccctcccacatgcattatgcactagatgagaattatttccgaggatacgagtggtggttgatgaaagaagctaagaagaggaatcccaatattacactcattgggttgccatggtcattccctggatggctggattgtgggcgccaagcgttaccatgatttggacattgattatattggaatttggaatgagaggtcatataatgccaattatattaagatattaagaaaaatgctgaattatcaaggtctccagcgagtgaaaatcatagcaagtgataatctctgggagtccatctctgcatccatgctccttgatgccgaactcttcaaggtggttgatgttataggggctcattatcctggaacccattcagcaaaagatgcaaagttgactgggaagaagctttggtcttctgaagactttagcactttaaatagtgacatgggtgcaggctgctggggtcgcattttaaatcagaattatatcaatggctatatgacttccacaatcgcatggaatttagtggctagttactatgaacagttgccttatgggagatgcgggttgatgacggcccaggagccatggagtgggcactacgtggtagaatctcctgtctgggtatcagctcataccactcagtttactcaacctggctggtattacctgaagacagttggccatttagagaaaggaggaagctacgtagctctgactgatggcttagggaacctcaccatcatcattgaaaccatgagtcataaacattctaagtgcatacggccatttcttccttatttcaatgtgtcacaacaatttgccacctttgttcttaagggatcttttagtgaaataccagagctacaggtatggtataccaaacttggaaaaacatccgaaagatttctttttaagcagctggattctctatggctccttgacagcgatggcagtttcacactgagcctgcatgaagatgagctgttcacactcaccactctcaccactggtcgcaaaggcagctacccgcttcctccaaaatcccagcccttcccaagtacctataaggatgatttcaatgttgattacccattttttagtgaagctccaaactttgctgatcaaactggtgtatttgaatattttacaaatattgaagaccctggcgagcatcacttcacgctacgccaagttctcaaccagagacccattacatgggctgccgatgcatccaacacaatcagtattataggagactacaactggaccaatctgactataaagtgtgatgtatacatagagacccctgacacaggaggtgtgttcattgcaggaagagtaaataaaggtggtattttgattagaagtgccagaggaattttcttctggatttttgcaaatggatcttacagggttacaggtgatttagctggatggattatatatgctttaggacgtgttgaagttacagcaaaaaaatggtatacactcacgttaactattaagggtcatttcacctctggcatgctgaatgacaagtctctgtggacagacatccctgtgaattttccaaagaatggctgggctgcaattggaactcactcctttgaatttgcacagtttgacaactttcttgtggaagccacacgctaatacttaacagggcatcatagaatactctggattttcttcccttctttttggttttggttcagagccaattcttgtttcattggaacagtatatgaggcttttgagactaaaaataatgaagagtaaaaggggagagaaatttatttttaatttaccctgtggaagattttattagaattaattccaaggggaaaactggtgaatctttaacattacctggtgtgttccctaacattcaaactgtgcattggccatacccttaggag

SEQ ID NO: 331496 - DNA, 2528 bp, Artificial Sequence
  derived and/or modified sequence
agtcagcaggcggttggggcgggcccgctgcggggctggggcgggtgctttctcgtttaacacgaaccagacaggcagttaggtttgaacaaatgaggatccggaggtccagagagtataggtgcagagagtaaagtgacaggtctaagtagtgaagtagccggggctggaaccctcgtcccaggcagtggggcacaggctgtcttcatcgcggagatggcagtcggggagcgtcgctccagaaagggccagggagtgcgggagcgtccgtgtgcgaaagagaacgccccagtgggatgctttggctgtgtctctcccttttggaggagttggtgggtggtggagtcgttaagtcccgtgcagttgttagtgcagggtaagaatgggctcctccagagagggtagcgccgaataggatttcgtttggaggcaggactggtgcctcaaggtctctttaaaaggaagataagcgagcggcctgaaactaccgggtactccctctgggcccatgggcttcatggtggccgacctttgggcaacctcccgacttctagtaaattacccagagccctatcgttctcagatattggattatctctttaagccgaattttggtgcctctttgcatattttaaaagtggaaataggtggtgatgggcagacaacagacggcactgagccctcccacatgcattatgcactagatgagaattatttccgaggatacgagtggtggttgatgaaagaagctaagaagaggaatcccaatattacactcattgggttgccatggtcattccctggatggctgggaaaaggtttcgactggccttatgtcaatcttcagctgactgcctattatgtcgtgacctggattgtgggcgccaagcgttaccatgatttggacattgattatattggaatttggaatgagaggtcatataatgccaattatattaagatattaagaaaaatgctgaattatcaaggtctccagcgagtgaaaatcatagcaagtgataatctctgggagtccatctctgcatccatgctccttgatgccgaactcttcaaggtggttgatgttataggggctcattatcctggaacccattcagcaaaagatgcaaagttgactgggaagaagctttggtcttctgaagactttagcactttaaatagtgacatgggtgcaggctgctggggtcgcattttaaatcagaattatatcaatggctatatgacttccacaatcgcatggaatttagtggctagttactatgaacagttgccttatgggagatgcgggttgatgacggcccaggagccatggagtgggcactacgtggtagaatctcctgtctgggtatcagctcataccactcagtttactcaacctggctggtattacctgaagacagttggccatttagagaaaggaggaagctacgtagctctgactgatggcttagggaacctcaccatcatcattgaaaccatgagtcataaacattctaagtgcatacggccatttcttccttatttcaatgtgtcacaacaatttgccacctttgttcttaagggatcttttagtgaaataccagagctacaggtatggtataccaaacttggaaaaacatccgaaagatttctttttaagcagctggattctctatggctccttgacagcgatggcagtttcacactgagcctgcatgaagatgagctgttcacactcaccactctcaccactggtcgcaaaggcagctacccgcttcctccaaaatcccagcccttcccaagtacctataaggatgatttcaatgttgattacccattttttagtgaagctccaaactttgctgatcaaactggtgtatttgaatattttacaaatattgaagaccctggcgagcatcacttcacgctacgccaagttctcaaccagagacccattacatgggctgccgatgcatccaacacaatcagtattataggagactacaactggaccaatctgactataaagtgtgatgtatacatagagacccctgacacaggaggtgtgttcattgcaggaagagtaaataaaggtggtattttgattagaagtgccagaggaattttcttctggatttttgcaaatggatcttacagggttacaggtgatttagctggatggattatatatgctttaggacgtgttgaagttacagcaaaaaaatggtatacactcacgttaactattaaggtggctggaagaaggaagaaaacctgatatagccaatgctgttgtagtcgtttcctcagcctcatctcactgtgctgtggtctgtcctcacatgtgcactggtaacagactcacacagctgatgaatgcttttctctccttatgtgtggaaggaggggagcacttagacatttgctaactcccagaattggatcatctcctaagatgtacttactttttaaagtccaaatatgtttatatttaaatatacgtgagcgtgttcatcatgttgtatgat

SEQ ID NO: 331497 - DNA, 1425 bp, Artificial Sequence
  derived and/or modified sequence
atgctgaattaccagggtcttcagagggtaaaaatcattgcaagtgataacctctgggaaagcatttccgcgagcatgctgctggatgccgagctgttcaaagtcgtggatgtcattggggcccattaccccggcactcatagcgcaaaagatgccaaactcacagggaaaaagctctggtcatcagaagatttctcgacgttaaacagtgatatgggtgctggttgctggggtcgaattctcaatcagaactacattaacggatatatgaccagcacaatcgcatggaatctggtagcaagttactacgagcagttaccctacgggcgatgcgggttgatgaccgcgcaagagccctggtcaggccactacgtggtggaatctcctgtttgggtgagcgcccacaccactcaatttacacagcccggatggtactaccttaagaccgttggtcacttagagaaagggggctcctatgtggccctgaccgatggacttggtaatttgaccataatcatcgaaacaatgagtcacaagcactcaaaatgcattcggccattcctcccctattttaacgtgtcccaacagtttgctaccttcgttctgaaggggagctttagtgagataccggagctgcaggtgtggtacactaagctgggcaaaacctctgagaggttcttgtttaaacaactggactctctttggctcctggactccgacggctcttttacgctgagccttcacgaagatgagttatttaccctgaccaccttaacgacgggtagaaaggggagctatccgctgcccccgaaaagtcaaccttttccaagcacttacaaagacgacttcaacgtagattatcctttttttagtgaagcccccaatttcgccgaccagaccggggtgttcgaatactttacgaacatagaggatcccggcgagcaccactttacattgagacaggtcctgaatcagaggcctattacctgggctgccgacgctagcaatactatttccattattggggactacaactggaccaacctcacaatcaaatgcgacgtgtatatagagacacctgatactggtggagtcttcatcgccggcagagtgaataaaggcggaattctgatcagatcagcgagggggattttcttctggatctttgcaaatggctcctatagggtgacaggcgatctcgcaggctggattatctatgccctgggccgcgtggaggttaccgccaaaaagtggtacactttgaccctgacgattaagggccattttacttctggaatgcttaatgacaaaagtctctggaccgatataccagtgaacttcccaaagaatggctgggccgccatcggtacacactcttttgagttcgcgcagtttgacaactttttggtggaggccactcgctag

SEQ ID NO: 331498 - DNA, 1770 bp, Artificial Sequence
  derived and/or modified sequence
atgggctttatggttgctgatctatgggctacttccagactattggtgaactatccagagccttaccgctctcaaattcttgattatctcttcaagccgaattttggcgcgagtctgcatatccttaaggtcgagatcggcggcgatggccaaactaccgatggcacagagccgagccacatgcattatgctctggacgaaaactactttcgaggttacgagtggtggctgatgaaggaggccaagaagcgtaaccctaatattaccttaattgggctaccttggtcttttccaggatggctgggcaagggctttgattggccatacgtcaatctgcagttaactgcatattatgtggtgacctggatcgttggagccaaacgataccatgacttggacattgactacatcggaatttggaatgagaggagctacaacgctaactacataaagattcttcggaaaatgctcaactaccaggggctgcagcgagtgaagattatcgccagcgacaacctatgggaatccatctcagcaagtatgctgctggatgccgagctgtttaaggttgtcgatgttatcggagctcattaccccggaacccactctgccaaagacgccaaactcacagggaagaagttatggagctccgaagatttttcgacattgaattccgacatgggggccggctgctggggcagaatcctgaatcagaattacatcaacggatacatgacttccactattgcatggaatttggtagctagctactatgaacagctgccttatggacgctgtggccttatgaccgcacaggaaccttggagcgggcattacgtggtggagtcccctgtgtgggtcagcgcacataccacccagttcacacaacccggttggtattatctaaagacagtcgggcatttagaaaaaggtgggtcgtacgtcgccctgaccgatggtcttggcaacttaactattattatagaaacaatgtctcacaaacacagcaagtgcatccggccttttttgccctacttcaacgtctcacaacagttcgctacttttgtactgaaaggcagcttttccgaaataccagaactgcaagtttggtacactaagctgggcaaaacaagcgaacgctttctctttaaacagctcgattctctttggttgctggactccgatggctccttcactttatccctgcatgaggatgaactcttcaccctgacaacattgacaactgggcgcaaagggagctatcccctgccaccaaaatcccagccattcccctctacatacaaggatgattttaatgtggactaccccttcttcagcgaggcccctaatttcgctgatcaaacgggagtgtttgagtatttcacaaatatcgaagatcctggggagcaccactttacccttaggcaggtgcttaatcagcgtccgattacatgggccgccgatgcgtccaacactatctcaatcattggagattataactggacgaatctgacgataaaatgcgatgtttatatagaaactcctgacacggggggggtgttcattgccgggcgggtgaacaaaggaggcatattgattagatctgctaggggaatttttttttggattttcgccaatgggagttatcgcgtgaccggcgatctggccggatggataatttatgccttgggtcgcgtggaggtcacagccaaaaagtggtacacactcaccctgacaataaaggtggctgggaggaggaagaagacctag

SEQ ID NO: 331499 - DNA, 1425 bp, Artificial Sequence
  derived and/or modified sequence
atgctgaactaccagggcctgcagagggtgaagatcatcgccagtgacaacctgtgggagagcatcagcgcctccatgctgctggatgctgagctgttcaaggtggtggatgtgattggagcccactacccaggcacccacagcgccaaggatgccaagctgaccgggaagaagctgtggagcagcgaggacttcagcaccctgaacagcgacatgggcgccggctgctggggccgcatcctgaaccagaactacatcaatggctacatgaccagcaccatcgcctggaacctggtggccagctactatgagcagctgccctacggccgctgtggcctgatgacagcccaggagccctggagcggccactacgtggtggagagccctgtgtgggtgtctgcccacaccacccagttcacccagcccggctggtactacctgaagacagtgggccacctggagaagggcggcagctatgtggccctgacagatggcctgggcaacctgaccatcatcatcgagaccatgagccacaagcacagcaagtgcatccggcccttcctgccctacttcaacgtgtcccagcagtttgccacctttgtgctgaagggcagcttcagcgagatccctgagctgcaggtgtggtacaccaagctgggcaagaccagcgagcgcttcctgttcaagcagctggacagcctgtggctgctggacagtgatggcagcttcaccctgagcctgcatgaagatgagctgttcaccctgaccaccctgaccaccggcaggaagggcagctaccccctgccccccaagagccagcccttccccagcacctacaaggatgacttcaacgtggactaccccttcttcagcgaggcccccaactttgctgaccagacaggagtgtttgagtacttcaccaacatcgaggaccccggggagcaccacttcaccctgcggcaggtgctgaaccagaggcccatcacctgggccgcagatgccagcaacaccatcagcatcattggagactacaactggaccaacctgaccatcaagtgtgatgtgtacatcgagaccccagacaccggcggcgtcttcatcgccggccgggtgaacaagggcggcatcctgatccgcagcgcccggggcatcttcttctggatctttgccaacggcagctacagagtgactggagacctggccggctggatcatctatgccctgggccgggtggaggtgacagccaagaagtggtacaccctgaccctgaccatcaagggccacttcaccagcggcatgctgaatgacaagagcctgtggacagacatccctgtgaacttccccaagaatggctgggccgccatcggcacccacagctttgaatttgcccagtttgacaacttcctggtggaggccaccaggtag

SEQ ID NO: 331500 - DNA, 1770 bp, Artificial Sequence
  derived and/or modified sequence
atgggcttcatggtggccgacctgtgggccaccagccggctgctggtgaactacccagagccctaccgcagccagatcctggactacctgttcaagcccaactttggagccagcctgcacatcctgaaggtggagattggaggagatggccagaccacagatggaacagagcccagccacatgcactacgccctggatgagaactacttccggggctatgagtggtggctgatgaaggaggccaagaagaggaaccccaacatcaccctgattggcctgccctggagcttccctggctggctgggcaaaggatttgactggccctacgtgaacctgcagctgacagcctactacgtggtgacctggatcgtgggcgccaagcgctaccatgacctggacatcgactacatcggcatctggaatgaaagaagctacaatgccaactacatcaagatcctgaggaagatgctgaactaccagggcctgcagagggtgaagatcatcgccagtgacaacctgtgggagagcatcagcgcctccatgctgctggatgctgagctgttcaaggtggtggatgtgattggagcccactacccaggcacccacagcgccaaggatgccaagctgaccgggaagaagctgtggagcagcgaggacttcagcaccctgaacagcgacatgggcgccggctgctggggccgcatcctgaaccagaactacatcaatggctacatgaccagcaccatcgcctggaacctggtggccagctactatgagcagctgccctacggccgctgtggcctgatgacagcccaggagccctggagcggccactacgtggtggagagccctgtgtgggtgtctgcccacaccacccagttcacccagcccggctggtactacctgaagacagtgggccacctggagaagggcggcagctatgtggccctgacagatggcctgggcaacctgaccatcatcatcgagaccatgagccacaagcacagcaagtgcatccggcccttcctgccctacttcaacgtgtcccagcagtttgccacctttgtgctgaagggcagcttcagcgagatccctgagctgcaggtgtggtacaccaagctgggcaagaccagcgagcgcttcctgttcaagcagctggacagcctgtggctgctggacagtgatggcagcttcaccctgagcctgcatgaagatgagctgttcaccctgaccaccctgaccactggaaggaagggcagctaccccctgccccccaagagccagcccttccccagcacctacaaggatgacttcaacgtggactaccccttcttcagcgaggcccccaactttgctgaccagacaggagtgtttgagtacttcaccaacattgaagatcctggagagcaccacttcaccctgcggcaggtgctgaaccagaggcccatcacctgggccgcagatgccagcaacaccatcagcatcatcggggactacaactggaccaacctgaccatcaagtgtgatgtgtacatcgagaccccagacacaggaggagtcttcatcgccggccgggtgaacaagggcggcatcctgatccgcagcgcccggggcatcttcttctggatctttgccaacggcagctacagagtgactggagacctggccggctggatcatctatgccctgggccgggtggaggtgacagccaagaagtggtacaccctgaccctgaccatcaaggtggccggccgcaggaagaagacctag

SEQ ID NO: 331501 - DNA, 1425 bp, Artificial Sequence
  derived and/or modified sequence
atgctgaactaccagggcctgcagcgggtgaagatcatcgccagcgacaacctttgggaaagtattagcgcatccatgctgttggacgcggagctgtttaaggtcgtcgacgtgattggagcccattatcccggtacacattctgccaaggacgcaaaactgacaggaaagaaattgtggtccagcgaggatttctctaccctgaatagtgatatgggcgctggttgctggggaaggatcctgaatcaaaattatatcaatggctacatgaccagcaccatcgcctggaatctggtcgcaagttattacgagcaactgccttatggccgctgtgggctcatgactgctcaggagccctggtctgggcattacgtggtagaatcacccgtctgggtttctgcacacacaacccagttcacccagccaggctggtactatttaaaaaccgttgggcatctcgaaaagggtggatcgtatgtagctttgaccgatggccttggtaacttgacaataatcatcgagaccatgtctcacaaacattccaagtgcatccgaccttttcttccctatttcaacgtcagccagcagtttgccacatttgtcctgaagggcagcttctccgaaattcccgagttacaggtgtggtacacgaaactgggcaagacgtcggaaaggttcctctttaaacaacttgactccctctggctgctggatagcgacggaagtttcacattatcactgcatgaagacgagctgttcactttaaccacattgaccaccggccggaagggaagctaccccctaccgcctaagtctcaaccattccccagcacatataaggatgattttaacgtagattatccctttttctcggaggccccaaacttcgcagatcagacaggtgtgttcgaatattttacaaacatcgaagatcctggagagcatcatttcaccctgcgacaggtcctgaaccagcgacccatcacctgggccgcagacgcatcaaacactattagtatcattggtgattataattggaccaatctcaccattaaatgtgacgtgtacatcgagacaccagacactggaggggtctttatcgccggccgcgtgaataaaggggggattcttatacgttccgcccgcggtatttttttctggatatttgctaacggctcatacagggtcacgggcgacctcgctggttggatcatctatgctctaggacgggtggaggtgacggctaaaaagtggtacacgctcacactcacaattaaaggccatttcacgtctggtatgttgaacgacaaatcactttggacagacatccccgtcaactttcctaagaacgggtgggccgctatcggcactcattccttcgagtttgcccaatttgataactttctggttgaagccactagatag

SEQ ID NO: 331502 - DNA, 1770 bp, Artificial Sequence
  derived and/or modified sequence
atgggcttcatggtggccgacctgtgggccaccagccggctgctggtcaattacccggagccgtacagatcgcagatcctggactacctgtttaagcctaacttcggggcgagcctgcatatcctgaaggtggagatcgggggagatggccaaactaccgatggaaccgagcccagtcatatgcattacgcgctggatgagaactatttccgcggatatgagtggtggctgatgaaggaggccaaaaagcggaatccgaacattactctcatcggcctgccctggtcctttccaggttggctaggcaaaggttttgattggccttacgttaacctccaactcaccgcctattatgtcgtgacatggattgtcggagccaagagatatcatgatttagatatcgactacatagggatttggaacgaacgaagctataacgctaactacatcaagatcctgcgaaagatgttaaattatcaaggtcttcaacgggtaaaaattatcgcgagtgataatttatgggagtccattagcgcctcaatgttgctcgatgctgaactgttcaaagtcgtggacgtgataggggcccattacccgggcacacatagcgccaaggatgcaaagctcacaggaaagaagctgtggtcttccgaagattttagtaccctgaattctgacatgggagctggatgctggggacggattttgaaccagaactacattaatggatacatgacttcaactatcgcatggaacctcgtggccagctactacgaacagctgccctacggccggtgtggcctgatgaccgcccaagaaccctggagtggacactatgtggtggagtcccccgtgtgggttagcgctcatactacacagttcacacagcctgggtggtactacttaaagacagtgggccacctggagaaggggggctcttatgtggctctgaccgatggactgggaaatctgaccatcattatcgaaaccatgagccataagcacagtaagtgcatacgaccatttttgccatacttcaacgtaagtcagcagtttgctacatttgtcctcaaaggttctttcagcgaaattccagaactccaggtgtggtacacaaaactgggaaagacgtctgagaggttcctcttcaagcagctcgacagcctctggttgctggactccgatggcagttttaccctgtcgctccatgaggacgagctgttcacgctgactactctaactaccggcagaaagggatcctaccccttgcccccaaaatctcaaccctttcccagcacatataaggatgactttaacgtggactacccattcttcagcgaggcccctaacttcgcggaccagaccggagtgttcgaatacttcacgaacatagaagacccgggcgagcaccacttcaccttaaggcaggtactgaatcagagaccaattacatgggccgctgacgcctcaaacactatttcaattatcggcgactataattggaccaatttgacgattaagtgcgacgtgtacattgaaactcccgacaccggcggcgtctttatcgctggacgcgtcaataaggggggtatactgattcgttcagcacggggcatcttcttctggatttttgctaatgggtcatacagagtgacaggcgacttagcagggtggattatctatgcccttgggcgggtggaggtaaccgccaagaagtggtacacgcttaccctcaccatcaaagtggccggccggaggaaaaaaacctag

SEQ ID NO: 331503 - DNA, 1425 bp, Artificial Sequence
  derived and/or modified sequence
atgctgaattatcagggtttacagcgggtgaagattatcgcatccgacaatctgtgggagtccatatccgcttccatgctcctggacgccgagcttttcaaagtcgtcgatgtgatcggagcacactaccccggtacccattccgctaaggatgcaaagctcaccgggaagaaattatggagtagtgaggatttctccacccttaacagtgatatgggagcaggctgctggggaaggattctcaaccaaaactacattaatgggtatatgacctcaaccatagcctggaacttggtggcttcctattatgaacaacttccttacggtcgctgtggattgatgactgcccaggagccctggagcggacattacgttgtcgagtctccagtgtgggtttccgcgcacacgactcaatttacccagcccggttggtactacctcaagacggtgggccatcttgagaaagggggaagctacgtggcactgactgatggcctgggcaacctgaccataatcatcgaaaccatgtcacacaaacactccaaatgcataagaccgttcctgccatattttaacgtctcacagcaatttgccacttttgtgctgaagggcagcttcagcgagatccccgagttacaggtttggtatactaaattaggcaaaacttccgaacggttcctatttaagcaacttgattctctgtggctcctcgacagcgatggatccttcactttgagtctgcatgaggacgaattgttcaccctgacgaccctgacgacaggacggaaaggctcctaccccctgccgcctaagtcacagcccttcccatccacctacaaagacgatttcaacgtggattatccttttttttccgaggcacctaattttgccgatcaaactggcgttttcgaatatttcaccaatatagaagacccaggggagcatcattttacgctgaggcaggtactcaaccagcgccctatcacttgggctgcggatgcctctaataccattagtatcattggcgactataactggaccaaccttactatcaaatgtgacgtgtacatagagacaccggacacagggggagtctttatcgcaggcagggtgaacaagggaggcattcttattcgctcagccaggggaattttcttttggatctttgctaatggaagttaccgcgtcaccggtgaccttgcaggctggataatctacgctctcggacgtgtagaagtgactgctaagaagtggtatacactgaccctgaccattaaagggcatttcacttcaggaatgctcaacgacaagtccctctggactgatatcccagtgaacttcccaaaaaatggctgggcggcaataggcactcacagttttgagtttgcacaattcgacaattttttggtggaggccacccgctag

SEQ ID NO: 331504 - DNA, 1770 bp, Artificial Sequence
  derived and/or modified sequence
atggggttcatggtagccgacctgtgggctacctcccggttgctcgtgaactaccctgaaccgtaccggagccagatcttagattatctttttaaacccaacttcggtgcaagtctccatatactgaaagtagaaatcggaggagacggccagaccactgacggtactgagccatctcacatgcactacgcacttgatgagaactacttccgtggttacgaatggtggctgatgaaagaggctaaaaagagaaatccgaatatcactctgattggcctgccttggagcttccctggatggctggggaagggtttcgactggccttatgtgaatttgcagttaactgcctattacgtggtaacttggattgttggcgctaaacgttaccacgacctcgatatcgattatatcggcatatggaatgagcggtcctacaacgcaaattacattaagatcctgagaaagatgctaaactaccaagggctgcagagagtcaagataatcgcatcagacaacctgtgggagagcatatcggcgagcatgctgctagacgccgagctattcaaagtggtagatgtcatcggtgctcactatccaggaacccattcagccaaggacgcaaagctcacaggcaaaaaactgtggtcctccgaggacttttccaccttaaatagtgacatgggcgctggctgttgggggaggatcctaaatcagaactacatcaacggctacatgactagtaccattgcttggaacttggtggccagttactacgaacagctgccatacggcagatgcggcctaatgacagcccaggaaccctggagtggccactatgttgtggagagcccagtctgggtaagtgcacacaccacccagttcacacagcccggttggtactatctcaaaaccgtggggcacctggagaaaggcggttcctatgtggccttaactgatgggctcggtaatctcaccattattattgaaacgatgtcccataagcacagcaaatgcattcgcccattccttccatatttcaacgtgtctcagcagtttgctacgtttgtgttgaaagggtctttctcggaaattccagaattacaagtttggtacaccaaattaggaaaaactagtgagagattcctcttcaagcagctcgactccctgtggctcctggatagtgatggcagcttcacactgagccttcatgaggacgagttgttcaccctgaccaccctcaccacaggaagaaagggatcctacccactcccaccaaaatcacagccatttccctcaacatataaagatgactttaatgtagactacccattcttcagcgaggcccctaatttcgctgatcaaacaggggtttttgaatactttaccaatattgaggaccccggtgagcaccactttaccttaagacaggttctcaatcagcgcccaataacttgggccgcagacgcttctaataccatcagtataatcggtgattacaactggacaaacctaaccatcaagtgcgacgtgtatattgaaacgcccgacaccggaggcgtttttatagccggacgagtgaataagggtggcatcctcattagaagcgccagagggattttcttctggatattcgccaacggctcctaccgcgtgacgggagatctcgccggatggattatctatgccctggggagagtcgaagtaactgccaaaaaatggtataccctaacattaacgatcaaagtggctggacggagaaagaagacctag

SEQ ID NO: 331505 - DNA, 1425 bp, Artificial Sequence
  derived and/or modified sequence
atgctgaactaccagggcctgcagagagtgaagatcatcgccagcgacaacctgtgggagagcatcagcgccagcatgctgctggacgccgagctgttcaaggtggtggacgtgatcggcgcccactaccccggcacccacagcgccaaggacgccaagctgaccggcaagaagctgtggagcagcgaggacttcagcaccctgaacagcgacatgggcgccggctgctggggcagaatcctgaaccagaactacatcaacggctacatgaccagcaccatcgcctggaacctggtggccagctactacgagcagctgccctacggcagatgcggcctgatgaccgcccaggagccctggagcggccactacgtggtggagagccccgtgtgggtgagcgcccacaccacccagttcacccagcccggctggtactacctgaagaccgtgggccacctggagaagggcggcagctacgtggccctgaccgacggcctgggcaacctgaccatcatcatcgagaccatgagccacaagcacagcaagtgcatcagacccttcctgccctacttcaacgtgagccagcagttcgccaccttcgtgctgaagggcagcttcagcgagatccccgagctgcaggtgtggtacaccaagctgggcaagaccagcgagagattcctgttcaagcagctggacagcctgtggctgctggacagcgacggcagcttcaccctgagcctgcacgaggacgagctgttcaccctgaccaccctgaccaccggcagaaagggcagctaccccctgccccccaagagccagcccttccccagcacctacaaggacgacttcaacgtggactaccccttcttcagcgaggcccccaacttcgccgaccagaccggcgtgttcgagtacttcaccaacatcgaggaccccggcgagcaccacttcaccctgagacaggtgctgaaccagagacccatcacctgggccgccgacgccagcaacaccatcagcatcatcggcgactacaactggaccaacctgaccatcaagtgcgacgtgtacatcgagacccccgacaccggcggcgtgttcatcgccggcagagtgaacaagggcggcatcctgatcagaagcgccagaggcatcttcttctggatcttcgccaacggcagctacagagtgaccggcgacctggccggctggatcatctacgccctgggcagagtggaggtgaccgccaagaagtggtacaccctgaccctgaccatcaagggccacttcaccagcggcatgctgaacgacaagagcctgtggaccgacatccccgtgaacttccccaagaacggctgggccgccatcggcacccacagcttcgagttcgcccagttcgacaacttcctggtggaggccaccagatag

SEQ ID NO: 331506 - DNA, 1770 bp, Artificial Sequence
  derived and/or modified sequence
atgggcttcatggtggccgacctgtgggccaccagcagactgctggtgaactaccccgagccctacagaagccagatcctggactacctgttcaagcccaacttcggcgccagcctgcacatcctgaaggtggagatcggcggcgacggccagaccaccgacggcaccgagcccagccacatgcactacgccctggacgagaactacttcagaggctacgagtggtggctgatgaaggaggccaagaagagaaaccccaacatcaccctgatcggcctgccctggagcttccccggctggctgggcaagggcttcgactggccctacgtgaacctgcagctgaccgcctactacgtggtgacctggatcgtgggcgccaagagataccacgacctggacatcgactacatcggcatctggaacgagagaagctacaacgccaactacatcaagatcctgagaaagatgctgaactaccagggcctgcagagagtgaagatcatcgccagcgacaacctgtgggagagcatcagcgccagcatgctgctggacgccgagctgttcaaggtggtggacgtgatcggcgcccactaccccggcacccacagcgccaaggacgccaagctgaccggcaagaagctgtggagcagcgaggacttcagcaccctgaacagcgacatgggcgccggctgctggggcagaatcctgaaccagaactacatcaacggctacatgaccagcaccatcgcctggaacctggtggccagctactacgagcagctgccctacggcagatgcggcctgatgaccgcccaggagccctggagcggccactacgtggtggagagccccgtgtgggtgagcgcccacaccacccagttcacccagcccggctggtactacctgaagaccgtgggccacctggagaagggcggcagctacgtggccctgaccgacggcctgggcaacctgaccatcatcatcgagaccatgagccacaagcacagcaagtgcatcagacccttcctgccctacttcaacgtgagccagcagttcgccaccttcgtgctgaagggcagcttcagcgagatccccgagctgcaggtgtggtacaccaagctgggcaagaccagcgagagattcctgttcaagcagctggacagcctgtggctgctggacagcgacggcagcttcaccctgagcctgcacgaggacgagctgttcaccctgaccaccctgaccaccggcagaaagggcagctaccccctgccccccaagagccagcccttccccagcacctacaaggacgacttcaacgtggactaccccttcttcagcgaggcccccaacttcgccgaccagaccggcgtgttcgagtacttcaccaacatcgaggaccccggcgagcaccacttcaccctgagacaggtgctgaaccagagacccatcacctgggccgccgacgccagcaacaccatcagcatcatcggcgactacaactggaccaacctgaccatcaagtgcgacgtgtacatcgagacccccgacaccggcggcgtgttcatcgccggcagagtgaacaagggcggcatcctgatcagaagcgccagaggcatcttcttctggatcttcgccaacggcagctacagagtgaccggcgacctggccggctggatcatctacgccctgggcagagtggaggtgaccgccaagaagtggtacaccctgaccctgaccatcaaggtggccggcagaagaaagaagacctag

SEQ ID NO: 331507 - protein, 161 aa, Artificial Sequence
  derived and/or modified sequence
MPVSTSLHQDGSQERPVSLTSTTSSSGSSCDSRSAMEEPSSSEAPAKNGAGSLRSRHLPNSNNNSSSWLNVKGPLSPFNSRAAAGPAHHKLSYLGRVVREIVETERMYVQDLRSIVEDYLLKIIDTPGLLKPEQVSALFGNIENIYALNSQLLRDLDSCNS

SEQ ID NO: 331508 - protein, 188 aa, Artificial Sequence
  derived and/or modified sequence
MPVSTSLHQDGSQERPVSLTSTTSSSGSSCDSRSAMEEPSSSEAPAKNGAGSLRSRHLPNSNNNSSSWLNVKGPLSPFNSRAAAGPAHHKLSYLGRVVREIVETERMYVQDLRSIVEDYLLKIIDTPGLLKPEQVSALFGNIENIYALNSQLLRDLDSCNSDPVAVASCFVERSQEFDIYTQYCNNYP

SEQ ID NO: 331509 - DNA, 658 bp, Artificial Sequence
  derived and/or modified sequence
gtgagccatcatgcctggccgagaaagcgagttttctagaagactgattcactgattgatgactgactggattgattcatgttgcaagatggaagaggtcatggctggggcatacttaagagaactggagacccaatctccctggggtgccctccccaggcagcaatgccaggatgcctgtgtccacctccctccaccaggatggcagccaggagcggccggtgagcctgacctctaccacctcctcgtcgggctcctcctgtgacagtcgcagtgccatggaggagcccagcagctccgaggctcccgccaagaatggggcaggctccctgagaagccggcatctgcccaacagcaacaacaactccagcagctggttgaacgtgaaggggcccctctccccgttcaacagccgggcagcggcagggcctgcacaccacaagctcagctacctgggccgagtggtgcgggagatcgtggagacagagcgcatgtacgtacaggacctgcgcagcatcgtggaggactacctcttgaagatcattgacacacccgggctgctgaagccagaacaggtcagcgccctctttgggaacatagaaaatatctacgcgctgaacagccagctcctcagagacctggacagctgcaatagtga

SEQ ID NO: 331510 - DNA, 635 bp, Artificial Sequence
  derived and/or modified sequence
ccatgctgtctcgggaggcggtgatagcagaatctccctggggtgccctccccaggcagcaatgccaggatgcctgtgtccacctccctccaccaggatggcagccaggagcggccggtgagcctgacctctaccacctcctcgtcgggctcctcctgtgacagtcgcagtgccatggaggagcccagcagctccgaggctcccgccaagaatggggcaggctccctgagaagccggcatctgcccaacagcaacaacaactccagcagctggttgaacgtgaaggggcccctctccccgttcaacagccgggcagcggcagggcctgcacaccacaagctcagctacctgggccgagtggtgcgggagatcgtggagacagagcgcatgtacgtacaggacctgcgcagcatcgtggaggactacctcttgaagatcattgacacacccgggctgctgaagccagaacaggtcagcgccctctttgggaacatagaaaatatctacgcgctgaacagccagctcctcagagacctggacagctgcaatagtgaccccgtggctgtggccagctgctttgtggaaaggagccaagagtttgatatctacactcagtattgcaacaattaccccaa

SEQ ID NO: 331511 - DNA, 240 bp, Artificial Sequence
  derived and/or modified sequence
atgatttttacccccttcctgcccccagctgacctgtcagtgttccaaaacgtcaagggccttcaaaacgatcctgaggagtgggtggccgtttctgatgctacagaagatccatctggcggaacagggttaccaagagagcctgctcttctgaggggaagttggagaagccgtttccagagagctctcgcatgctttacgaaatgctttaggggaggatatagggcactcggcatttag

SEQ ID NO: 331512 - protein, 162 aa, Artificial Sequence
  derived and/or modified sequence
MIKCLSVEVQAKLRSGLAISSLGQCVEELALNSIDAEAKCVAVRVNMETFQVQVIDNGFGMGSDDVEKVGNRYFTSKCHSVQDLENPRFYGFRGEALANIADMASAVEISSKKNRTMKTFVKLFQSGKALKACEADVTRASAGTTVTVYNLFYQLPVRRKCM

SEQ ID NO: 331513 - DNA, 489 bp, Artificial Sequence
  derived and/or modified sequence
atgatcaagtgcctgagcgtggaggtgcaggccaagctgagaagcggcctggccatcagcagcctgggccagtgcgtggaggagctggccctgaacagcatcgacgccgaggccaagtgcgtggccgtgagagtgaacatggagaccttccaggtgcaggtgatcgacaacggcttcggcatgggcagcgacgacgtggagaaggtgggcaacagatacttcaccagcaagtgccacagcgtgcaggacctggagaaccccagattctacggcttcagaggcgaggccctggccaacatcgccgacatggccagcgccgtggagatcagcagcaagaagaacagaaccatgaagaccttcgtgaagctgttccagagcggcaaggccctgaaggcctgcgaggccgacgtgaccagagccagcgccggcaccaccgtgaccgtgtacaacctgttctaccagctgcccgtgagaagaaagtgcatgtag

SEQ ID NO: 331514 - DNA, 321 bp, Artificial Sequence
  derived and/or modified sequence
atgatcaagtgcctgagcgtggaggtgcaggccaagctgagaagcggcctggccatcagcagcctgggccagtgcgtggaggagctggccctgaacagcatcgacgccgaggccaagtgcgtggccgtgagagtgaacatggagaccttccaggtgcaggtgatcgacaacggcttcggcatgggcagcgacgacgtggagaaggtgggcaacagatacttcaccagcaagtgccacagcgtgcaggacctggagaaccccagattctacggcttcagaggcgaggccctggccaacatcgccgacatggccagcgcctag

SEQ ID NO: 331515 - DNA, 489 bp, Artificial Sequence
  derived and/or modified sequence
atgatcaagtgtcttagcgtggaagtccaggcaaagcttcgctccggccttgcaatcagttccctgggtcaatgtgtggaggaactcgctctaaatagtatcgacgctgaggccaaatgtgtggccgttagagtaaatatggagaccttccaagtgcaggtgatcgataatgggttcggtatggggagcgacgatgtcgagaaagtcgggaataggtactttaccagtaagtgccactctgtgcaagatctggagaatccccggttttacgggttcaggggcgaagctcttgcaaacattgcagacatggcttcagcagtggagatttcaagtaaaaagaaccgcaccatgaagacatttgtgaagctgttccaaagcggtaaggcgctgaaggcttgtgaggctgatgttaccagggcaagtgcaggaaccaccgtgactgtctacaatctcttctatcagctcccagtgaggcggaagtgtatgtag

SEQ ID NO: 331516 - DNA, 321 bp, Artificial Sequence
  derived and/or modified sequence
atgatcaagtgtctcagcgtggaggtgcaggctaaactgagatcaggtctcgcgatttcatcattaggccaatgtgtggaagagctggcgttgaactctatcgacgcagaggccaaatgtgtggccgttcgcgtaaacatggaaaccttccaggtgcaggtgattgataacgggtttggcatgggcagcgacgatgtcgaaaaagtggggaacaggtacttcacttccaaatgtcacagcgtccaggatctggaaaaccctcgcttctacgggttccgtggggaagcactggcaaacatcgctgacatggcaagcgcctag

SEQ ID NO: 331517 - DNA, 489 bp, Artificial Sequence
  derived and/or modified sequence
atgatcaagtgcctgtctgtggaggtgcaggccaagctgcggagcggcctggccatcagcagcctgggccagtgtgtggaggagctggccctgaacagcattgatgctgaggccaagtgtgtggccgtgcgggtgaacatggagaccttccaggtgcaggtgattgacaatggatttggcatgggcagtgatgatgtggagaaggtgggcaaccgctacttcaccagcaagtgccacagcgtgcaggacctggagaacccccgcttctacggcttccggggggaggccctggccaacattgctgacatggccagcgctgtggagatcagcagcaagaagaacagaaccatgaagacctttgtgaagctgttccagagcggcaaggccctgaaggcctgtgaggctgatgtgacccgggccagcgctggcaccaccgtgacagtgtacaacctcttctaccagctgcctgtgcggaggaagtgcatgtag

SEQ ID NO: 331518 - DNA, 321 bp, Artificial Sequence
  derived and/or modified sequence
atgatcaagtgcctgtctgtggaggtgcaggccaagctgcggagcggcctggccatcagcagcctgggccagtgtgtggaggagctggccctgaacagcattgatgctgaggccaagtgtgtggccgtgcgggtgaacatggagaccttccaggtgcaggtgattgacaatggatttggcatgggcagtgatgatgtggagaaggtgggcaaccgctacttcaccagcaagtgccacagcgtgcaggacctggagaacccccgcttctacggcttccggggggaggccctggccaacattgctgacatggccagcgcctag

SEQ ID NO: 331519 - DNA, 489 bp, Artificial Sequence
  derived and/or modified sequence
atgatcaagtgcctgagcgtggaggtgcaggccaagctgcggagcggcctggcaatctcgagcttggggcagtgcgtggaagagctagccttgaattctatcgatgccgaggccaagtgcgtggcagtacgcgtgaatatggaaactttccaagtacaggttatcgacaacggcttcggtatgggtagcgatgacgttgagaaagtggggaatagatattttacaagtaagtgtcactccgtgcaagacctggagaaccccaggttctacggttttagaggcgaggccctcgcaaatatcgccgacatggcaagcgctgtcgagatctcttctaagaaaaatcggacaatgaaaacttttgtgaaactgttccagtctggtaaagcattgaaggcatgtgaggcggacgtgacaagagccagtgctgggacaacagttactgtatataaccttttctatcagctccctgttaggcggaaatgcatgtag

SEQ ID NO: 331520 - DNA, 321 bp, Artificial Sequence
  derived and/or modified sequence
atgatcaagtgcctgagcgtggaggtgcaggccaagctgcggagcggactggccatcagttcactgggacagtgcgtggaagagctggcacttaactccattgatgcagaagcaaagtgtgtggccgtccgtgtcaacatggaaacctttcaggttcaggtgattgataacggattcggcatgggctctgatgatgtcgagaaggtcggcaacagatattttacaagcaagtgccactctgtccaggacctcgagaatccacgcttttacggctttaggggagaagcactcgccaacatcgctgatatggcatcggcctag

SEQ ID NO: 331521 - DNA, 616 bp, Artificial Sequence
  derived and/or modified sequence
ctcgcggcctggcgcgccccctccgaagcgcatgctcgtgggcacgcacgagcctcaagatccaaggcaattatttccagtcagagaaggaaaccagtgcctggcattctcaccatctttctacctaccatgatcaagtgcttgtcagttgaagtacaagccaaattgcgttctggtttggccataagctccttgggccaatgtgttgaggaacttgccctcaacagtattgatgctgaagcaaaatgtgtggctgtcagggtgaatatggaaaccttccaagttcaagtgatagacaatggatttgggatggggagtgatgatgtagagaaagtgggaaatcgttatttcaccagtaaatgccactcggtacaggacttggagaatccaaggttttatggtttccgaggagaggccttggcaaatattgctgacatggccagtgctgtggaaatttcgtccaagaaaaacaggacaatgaaaacttttgtgaaactgtttcagagtggaaaagccctgaaagcttgtgaagctgatgtgactagagcaagcgctgggactactgtaacagtgtataacctattttaccagcttcctgtaaggaggaaatgcatgg

SEQ ID NO: 331522 - DNA, 583 bp, Artificial Sequence
  derived and/or modified sequence
gtgggcacgcacgagcctcaagatccaagttgctgccggctgcttagtgcattagcttagaaagcagcagaaattctgcagttaagagccctgatttgtcccgagtttggaaaaccggccccaccgcctgcaggggcccacccacgtggctctcactgatggagaagaaggggagacctttaatggcactggaatcttagggcaattatttccagtcagagaaggaaaccagtgcctggcattctcaccatctttctacctaccatgatcaagtgcttgtcagttgaagtacaagccaaattgcgttctggtttggccataagctccttgggccaatgtgttgaggaacttgccctcaacagtattgatgctgaagcaaaatgtgtggctgtcagggtgaatatggaaaccttccaagttcaagtgatagacaatggatttgggatggggagtgatgatgtagagaaagtgggaaatcgttatttcaccagtaaatgccactcggtacaggacttggagaatccaaggttttatggtttccgaggagaggccttggcaaatattgctgacatggccagtgctg

SEQ ID NO: 331523 - DNA, 489 bp, Artificial Sequence
  derived and/or modified sequence
atgatcaaatgcctttccgtagaagtgcaggctaaactgcgttcgggactggctatctcaagccttgggcagtgtgtagaggagctcgcccttaattctatcgacgctgaagcaaagtgtgtcgcagtcagagtgaatatggagacctttcaggtgcaggtcattgacaatggatttggcatgggcagcgatgacgtcgaaaaggttggcaatcgatattttacaagtaagtgtcacagtgttcaggatctggagaaccctaggttttacggctttagaggggaggctctcgccaacattgcagatatggcatccgccgtggaaatttcatctaaaaagaatagaacgatgaaaacatttgttaaactgttccagagcgggaaagcattgaaggcatgtgaagcagatgttacaagagctagcgccggaactaccgtgactgtttataacctgttttaccaactcccagtgagacgcaagtgtatgtag

SEQ ID NO: 331524 - DNA, 321 bp, Artificial Sequence
  derived and/or modified sequence
atgataaaatgtttatccgtggaggtccaggctaagctgcggtccggactggccatctcttctttaggacagtgtgtggaggagttagcacttaacagcatagatgccgaggccaagtgcgtggcagtacgcgtgaatatggagacttttcaggtacaagtgattgacaatggcttcggcatgggcagtgacgatgttgagaaggtcggcaataggtattttactagtaaatgccattccgttcaggacctggagaaccccaggttttatggtttcaggggcgaagcattggctaatatcgccgacatggccagcgcctag

SEQ ID NO: 331525 - DNA, 465 bp, Artificial Sequence
  derived and/or modified sequence
cggagctggggcgacgaggcgattgcgggggcctgggctagctgctggctaccaatattctactttctgtctctatgaatgtgactaccctggttacctcatatttatttgcagtgacttaaaatttggaggcaaattttccttaagaggatatcaagttccagtatcttcagatgttgataagccgttagaatctccctggaaaaggagacatgaatgtctgcaatgatacttcctgacaagaagttgatacaagaaaaggaaaggagattaacagctagtgagcagaatttcgaacagcaggatttcgtattttttgcttccaactgcacacttccgttgcccacttttaaatcagagatacctacactcaaaacccagacaaggcaaaaggatacttttcttgtatattttttgagatcgaagaaacgacaatgtccaggaaacagaaccagaaggattcat

SEQ ID NO: 331526 - DNA, 327 bp, Artificial Sequence
  derived and/or modified sequence
atgagcgcctgcttcctggacaccagaagagccgccttcctgcagtgcgacctgcccagcagctacagaatcctgaccctgcccgagagcggccactgcggcagcgccgagcccgtgagcgacgcccccgccctgctgctgagcggcaacagcatcctgcacagcgccgccgacagcgtgaccagcgccgtgcagaaggccagccaggccctgaacgagagaggcgagagactgggcagagccgaggagaagaccgaggacctgaagaacagcgcccagcagttcgccgagaccgcccacaagctggccatgaagcacaagtgctag

SEQ ID NO: 331527 - DNA, 327 bp, Artificial Sequence
  derived and/or modified sequence
atgtctgcctgctttctggataccagacgcgcggctttcctccaatgcgacctacccagtagctatcgaatcttgactttgccagaatccggacattgcggctccgccgagcccgtgtccgatgccccagctctgctactctccgggaattcaatcctgcactccgccgccgattcagtgacctctgcagtgcagaaggcctcccaagccttgaatgaaagaggtgaacggttggggagagcagaagagaagaccgaagatctgaagaattctgcccagcaattcgctgagacggcccacaagcttgccatgaaacacaaatgctag

SEQ ID NO: 331528 - DNA, 327 bp, Artificial Sequence
  derived and/or modified sequence
atgtctgcctgcttcctggacaccaggagagctgccttcctgcagtgtgacctgcccagcagctaccgcatcctgaccctgcctgagagcggccactgcggcagcgctgagcctgtgtctgatgccccagccctgctgctgagcggcaacagcatcctgcacagcgctgctgacagcgtgaccagcgctgtgcagaaggccagccaggccctgaatgaaagaggagagcggctgggccgggcagaggagaagacagaggacctgaagaacagcgcccagcagtttgctgagacagcccacaagctggccatgaagcacaagtgctag

SEQ ID NO: 331529 - DNA, 327 bp, Artificial Sequence
  derived and/or modified sequence
atgagcgcctgcttcctggacacccggcgggccgccttcctgcagtgtgatctcccttctagttacaggatcctgaccctaccggagtcagggcattgcggaagcgccgagcctgtgtcagatgcccctgcgttactcctaagtggaaacagcatccttcatagtgctgcagacagtgtgacctccgccgtgcaaaaggcttcacaggcactcaacgagcggggggagagactggggagagccgaggagaaaactgaagacctgaaaaattccgctcaacagttcgcagagacggcacacaaacttgcaatgaaacataagtgttag

SEQ ID NO: 331530 - DNA, 327 bp, Artificial Sequence
  derived and/or modified sequence
atgtccgcttgctttctggacacgcgtcgtgcggcatttctccagtgcgaccttcccagtagctacaggatattaacattaccagaatctgggcattgcggaagcgccgagccagtcagcgacgctcccgctctcctgctctcaggtaactccattctgcacagtgccgctgactcagttactagcgccgtgcagaaggcctctcaggccctgaacgagagaggagagcggctggggagggctgaggagaaaacagaagacttgaagaactctgctcaacagtttgctgagacagcgcacaaattagctatgaaacataaatgctag

SEQ ID NO: 331531 - DNA, 682 bp, Artificial Sequence
  derived and/or modified sequence
acagatagaatactggcagaatggaaatgactggcatgtcagtgatgagtttatagagaagcatttaggattttcctaggtcctgcagtcagtgggtgttcttgctgcaagtgcgtcagtcaaacccaatcaaaagaaatgtcggcttgtttcctagacactagacgagcggcctttctgcagtgtgacctgccttcctcttacaggatactcaccctgccggagtctggtcactgtgggtcagctgagccagtttctgatgctcctgctctcctcctttcaggaaacagcatcctccattcagctgctgacagcgtgaccagcgcagtgcagaaggcaagccaggccttgaatgagcgtggagagcgattaggccgagcagaggagaagacagaagacctgaagaacagcgcccagcagtttgcagaaactgcgcacaagcttgccatgaagcacaaatgttgagaaactgcctatcctggtgactcttcttaagagaaactgaagagtttgttcagcagtttttacaagaattcgggacctccgcttgcttctttttttccaatatttggacacttagagtggtttttgttttttcttttcagatgttaatgtgaaagaaagggtgttgcatttttacatttccctaatgatcttgctaataaatgctacaatagcatca

SEQ ID NO: 331532 - DNA, 1383 bp, Artificial Sequence
  derived and/or modified sequence
cggctgcgctcaccggtaggccccgctcgggttccgccgaagcccagcccccgcaggtcgcccctccgacgccggcgcgccgcaagggaggccagctcgctcgcagtggggaggtcgcggctccagtcctcgcgtccccgccgtggtcccggtgcctgtcccatcccgcgggcgcggccgttgcgggcggcgcggcccgggcgcgcgcggcgaatctgcggctgcgaatcggctggagcggggcctcgcgagagcggcgaggcctgggcggctgggcctgggcgggcggcgcgggctgctccggaggctcgggtggcttgagagtcttgggaggctccgggcgctgcccgcgcggtcgccggcatgacgggccgcgtgtgccgcggttgcggcggcacggacatcgagctggacgcggcgcgcggggacgcggtgtgcaccgcctgcggctcagtgctggaggacaacatcatcgtgtccgaggtgcagttcgtggagagcagcggcggcggctcctcggccgtgggccagttcgtgtccctggacggtgctggcaaaaccccgactctgggtggcggcttccacgtgaatctggggaaggagtcgagagcgcagaccctgcagaatgggaggcgccacatccaccacctggggaaccagctgcagctgaaccagcactgcctggacaccgccttcaacttcttcaagatggccgtgagcaggcacctgacccgcggccggaagatggcccacgtgattgctgcctgcctctacctggtctgccgtacggagggcacgccgcacatgctcctggacctcagcgacctgctccaggtgaatgtgtacgtgcttggaaagacgtttcttctcttggcaagagagctctgcatcaatgcgccggccatagacccgtgcctgtatattccacgctttgcgcacctgctggaattcggggagaagaaccacgaggtgtccatgactgccctgaggctcctacagaggatgaagcgggactggatgcacacaggccggcgcccctcgggcctctgcggagcagcgctcctggttgcagccagaatgcatgacttcaggaggactgtgaaggaggtcatcagtgtggtcaaagtgtgtgagtccacgctgcggaagaggctcacggaatttgaagacacccccaccagtcagttgaccattgatgagttcatgaagatcgacctggaggaggagtgcgaccccccccccatcgaggagggagggcagacggaggcccgagagcctccccaggcctcttcgtgggaaggccccagtaccactcgtaggaggtctcagctctggcatggctgccccggatgtggccgagggggcttcaccctgtgtccttag

SEQ ID NO: 331533 - protein, 439 aa, Artificial Sequence
  derived and/or modified sequence
MHDFRRTVKEVISVVKVCESTLRKRLTEFEDTPTSQLTIDEFMKIDLEEECDPPSYTAGQRKLRMKQLEQVLSKKLEEVEGEISSYQDAIEIELENSRPKAKGGLASLAKDGSTEDTASSLCGEEDTEDEELEAAASHLNKDLYRELLGGAPGSSEAAGSPEWGGRPPALGSLLDPLPTAASLGISDSIRECISSQSSDPKDASGDGELDLSGIDDLEIDRYILNESEARVKAELWMRENAEYLREQREKEARIAKEKELGIYKEHKPKKSCKRREPIQASTAREAIEKMLEQKKISSKINYSVLRGLSSAGGGSPHREDAQPEHSASARKLSRRRTPASRSGADPVTSVGKRLRPLVSTQPAKKVATGEALLPSSPTLGAEPARPQAVLVESGPVSYHADEEADEEEPDEEDGEPCVSALQMMGSNDYGCDGDEDDGY

SEQ ID NO: 331534 - protein, 203 aa, Artificial Sequence
  derived and/or modified sequence
MRENAEYLREQREKEARIAKEKELGIYKEHKPKKSCKRREPIQASTAREAIEKMLEQKKISSKINYSVLRGLSSAGGGSPHREDAQPEHSASARKLSRRRTPASRSGADPVTSVGKRLRPLVSTQPAKKVATGEALLPSSPTLGAEPARPQAVLVESGPVSYHADEEADEEEPDEEDGEPCVSALQMMGSNDYGCDGDEDDGY

SEQ ID NO: 331535 - DNA, 813 bp, Artificial Sequence
  derived and/or modified sequence
ccgccaaggacacacccaccgaggccacagctgcgatttcatagtgtgggaccccactggcaaagacacgctggctgctgtggccgtggtttctgtcccagccgtctgtttccatagaaaaagacccgtgcctgtatattccacgctttgcgcacctgctggaattcggggagaagaaccacgaggtgtccatgactgccctgaggctcctacagaggatgaagcgggactggatgcacacaggccggcgcccctcgggcctctgcggagcagcgctcctggttgcagccagaatgcatgacttcaggaggactgtgaaggaggtcatcagtgtggtcaaagtgtgtgagtccacgctgcggaagaggctcacggaatttgaagacacccccaccagtcagttgaccattgatgagttcatgaagatcgacctggaggaggagtgcgaccccccctcgtacacagctgggcagaggaagctgcggatgaagcagcttgaacaagtcctgtcaaaaaaactggaggaggttgaaggtgaaatatccagttaccaggatgcaattgagattgaactagaaaacagccccccatcgaggagggagggcagacggaggcccgagagcctccccaggcctcttcgtgggaaggccccagtaccactcgtaggaggtctcagctctggcatggctgccccggatgtggccgagggggcttcaccctgtgtccttaggagggggtggccttgaggcagagccgtgcctcactgacccccaggggcctcatcctccccatggaatgggctgtatgtcctgc

SEQ ID NO: 331536 - DNA, 3579 bp, Artificial Sequence
  derived and/or modified sequence
gggaggtgcgtggcatggggcactggctttgctgatgaggagaccagacttcagaggccgtgtcacctggcctgggccgcacagctggtgcatgccaagctcgcgtgcagacgaagctccagaggcctggctgtcaggagggttcctccccgaggacacacacgcaacctcctggaccgccaggctttagacttttaaaacttccatatgcaggaaaccccacaggacgcagccagcatctcgggtcatgggtgcacctgtcaccgcagtcctgggctaaacagtgaacaggagctctgtgtctctgtggtcgttacagttgtagtgaatgttccctgggagagtcctcttcagaagatatttgcggtattttcaacaaaggactctccaggatggaggagcaactacaagtcaggaaggaaaaggctgacaacccagttttttaaaaaacgggcaaaggacgtgaacagacaccatgcaatggcccagagtgcacaaatcatcatttctcccaggaatggggtgcccgagcccccaggcggctgaacttgagacttgtcacgtagtgttggtggaatgcagagcagctggagatcacctgctgcaggtgggtgcgtaactccgcacggccaagccgtttggaaagctgtagcatatgcatgagagtccggaaagttccgagagaaagtgtgtggatgcacccgccaaggacacacccaccgaggccacagctgcgatttcatagtgtgggaccccactggcaaagacacgctggctgctgtggccgtggtttctgtcccagccgtctgtttccatagaaaaagacccgtgcctgtatattccacgctttgcgcacctgctggaattcggggagaagaaccacgaggtgtccatgactgccctgaggctcctacagaggatgaagcgggactggatgcacacaggccggcgcccctcgggcctctgcggagcagcgctcctggttgcagccagaatgcatgacttcaggaggactgtgaaggaggtcatcagtgtggtcaaagtgtgtgagtccacgctgcggaagaggctcacggaatttgaagacacccccaccagtcagttgaccattgatgagttcatgaagatcgacctggaggaggagtgcgaccccccctcgtacacagctgggcagaggaagctgcggatgaagcagcttgaacaagtcctgtcaaaaaaactggaggaggttgaaggtgaaatatccagttaccaggatgcaattgagattgaactagaaaacagccggccaaaggccaaggggggcctggccagcctggcaaaagatggctccaccgaggacaccgcgtccagcttgtgtggcgaggaggacacagaggacgaggagctggaagccgcggccagccacctgaacaaagacttataccgggagctccttggtggtgcccccggcagctcggaagcagcaggaagccccgagtggggcggcagacctccggccctggggtccctgctggaccccctccccactgcagccagcctgggcatctcagactccatccgcgaatgcatctcctctcagagcagcgaccccaaagatgcttcaggagacggtgagctggacctcagtggcattgatgacctggagattgacaggtacatcctgaatgagtcggaagcccgcgtgaaggccgagctgtggatgagggagaacgccgagtacctgcgggaacagagggaaaaagaagcaagaatagcgaaagagaaggagctcggcatctacaaggaacacaagcccaagaagtcttgcaagcgacgggagccaattcaggccagtaccgccagggaggccatcgagaagatgctggagcagaagaagatctccagcaagatcaattatagcgtgctccggggcctcagcagcgccggcgggggcagtccgcacagggaggatgcacagcccgagcatagcgccagtgccaggaagctgtcacgaaggaggacgccggccagcagaagtggggctgaccctgtgaccagtgtggggaaaaggttgaggcctctggtgtctacgcagccagcaaagaaggtggccacgggagaggctttgctcccaagctctcccaccctcggagctgagcctgccaggccccaggcggtgctggtggagagcgggcccgtgtcataccacgccgacgaggaggctgacgaggaggagcctgacgaggaggacggggagccctgcgtcagtgccctgcagatgatgggcagcaacgactatggctgtgatggcgatgaggacgacggctactgaagtgtggcctccaggcaggtgatgtcctggcagggggcctcgcgggtctcctcagcatcagacgggcttccaggaccgcagcaggcaggccccagcgccgagactcctggtgacaggtggcacctgtcccacagccctcgtcccatgtggaacttaccattgggattgtgtttctattcagcaagggaaaccggaccaagcgtctgcatgtgtgtgatcagatgtgggccgggtgtgtgcagggctgggtcccgctgcctgccgtcgactcatccaaggaccctccaaggctggcagtgtggtgttgctactattaaggaaacaggcttggggcagccccactgctggtccaagtgtgtggagggctgagtgtgctggccctgtgactcaggaccagctctggagtctccagcccaccctccgcaccgtcccctcctgagcagcactcggcgccagcagcctctgccagagtggaagccagagccctgcaggtgtccggcgcagccgtgggagctgaggatctggcacttgagaggcagcagctccttgaaggtcctctgcctccagctgtggccctgcatccagatacctgcctcgtccgaggcagacacccccacccctgcctcctccagacccccctccccgctgcctgcaccgcctggagcagcatgggggtcagacccctgctccagggccacttgagttgtgggcccaggagccctgcggctgccggcaggtgaactgagtgcccgacagctgagaccggcgcccacccgtcctgagcatagctctgtaggcagtgcgggcatagcctgcatagtgtcctggcgctgggagttccccgtggacagagccagagggcagtggcgctccctgtcagagctggatcaggccccccatcgaggagggagggcagacggaggcccgagagcctccccaggcctcttcgtgggaaggccccagtaccactcgtaggaggtctcagctctggcatggctgccccggatgtggccgagggggcttcaccctgtgtccttaggagggggtggccttgaggcagagccgtgcctcactgacccccaggggcctcatcctccccatggaatgggctgtatgtcctgccccaacttggcccgcagcaggccagacccccctacccccgcccagagctcagtagccagcctgggtcctgccagggcttctcgagggcttgggggaagaatagatttagtaaagcaggaagatctgttgttacttaacagaaa

SEQ ID NO: 331537 - DNA, 1970 bp, Artificial Sequence
  derived and/or modified sequence
gcaccaccacgccctgcaaattttgtatttttagtaaagatggggtttctccatgttggtcaggccggtctcgaactgcggacctcaggtgatccgcccgcctcggcccccaaagtgctgggattagaggtgtgagccaccgcgcccagcctatgagcatattttttatcgttctctttatttctagctgcgatgattgtatcttattgaaaatcattaaaaatcttagcaattgttttaaattatctaatttttttctccaaataatatctattttagcagccaaatcaccacaaatcattggtttttatctttagttgtgggtgcacagcgggtgcgtgtattttggggcatgtgaggtgtcttgatgcgttcatgcagtgtgtaacagtcacatcagggtaaatgggacatctttcacctcaagcatttatccttcgtgttatggacaccctcagctggaaaggggggctgcgtcgtgagtatgaatggatgcaagtcatagccacctgagcctggtggggcacagcagggccctgtggagtcacatcccggcctcatgctcggcataggggagcgctgcttaggtccatgcagtcgctcagggcccaggctgtgcagcgcccagcctgtcctgctccaggcactcccccgtggcactgtgccgtgctggcagaggtgcacagcgccaggcctcagtgtgcacacacagcccccgtggcaccgccatgctggtagagatgccagaagtgggccctcctctcacccatgagtgtcagctgatgccggccggctggcgacttgtgtacccagcccacgcctgtcttgctctaagagtccccggaccgttgttgcgtgtggtgctgtctgcatggtctggagggaaggctgctgggtgtgcgcccctctgtgtcctgagcagggcggccatgcagtaggagcacgctgcctggccctagcgtgtctgcagcaggctggctggcagcaggtggccagtggctctcctgggttcggtgcgatggctgccctagctgagggtcagagaggctttgtccaggggaggggaactggtggggggcctgggggcctggaaagacaagtgcaggttgccccacccctgggctgcgtgggccgcctgtgcacgtgccatggcacatggaggtgggcactgaggtgctgtgtctgccgcagacccgtgcctgtatattccacgctttgcgcacctgctggaattcggggagaagaaccacgaggtgtccatgactgccctgaggctcctacagaggatgaagcgggactggatgcacacaggccggcgcccctcgggcctctgcggagcagcgctcctggttgcagccagaatgcatgacttcaggaggactgtgaaggaggtcatcagtgtggtcaaagtgtgtgagtccacgctgcggaagaggctcacggaatttgaagacacccccaccagtcagttgaccattgatgagttcatgaagatcgacctggaggaggagtgcgaccccccctcgtacacagctgggcagaggaagctgcggatgaagcagcttgaacaagtcctgtcaaaaaaactggaggaggttgaaggtgaaatatccagttaccaggatgcaattgagattgaactagaaaacagccggccaaaggccaaggggggcctggccagcctggcaaaagatggctccaccgaggacaccgcgtccagcttgtgtggcgaggaggacacagaggacgaggagctggaagccgcggccagccacctgaacaaagacttataccgggagctccttggtggtgcccccggcagctcggaagcagcaggaagccccgagtggggcggcagacctccggccctggggtccctgctggaccccctccccactgcagccagcctgggcatctcagactccatccgcgaatgcatctcctctcagagcagcgaccccagtgagttc

SEQ ID NO: 331538 - DNA, 1040 bp, Artificial Sequence
  derived and/or modified sequence
gcggccgcggcgctggcgggagcgtagagttccgccgccatcttcgcgggcggggcggcgggggcagcctcggcgcctgtggacgccgcgccccgcgccctcgcgccgcgccggggcctcgggagcggctctgcaagcaaaagcaaggaggtcaggcactgagcgacgcggccgtgcaggcaggctaggggcagcagcatgggcggcggcggcgctgtgacccgcggggctgccacccgctcccctgccacccccgcccctgcgaccctgcccgagcccagcctagcgcagcccggccaggcccggccgcggggggcgccgtcccgcccgcccgcccgcccgagcccgtacccgccgcggcgccggtgcgtcacgctgcgtcagggccgcgccccgcgcgacgtcgctgcctcgcggccccgcccccaggcccgacatcctcgaagctgctcgagcttctgcccagcaaccggcgcgagccgcgcgctgtgcagaggtagccgtggaaggcggctcccggcgctggcaggcggccgcccccagacccgcagtgccatgcgcaggtgcttgcgcccgttcttcagttagcgatcttttggttaggaacgcaggtggacctgcttgtttggccatttgcattccggagtctgcctctggccgcggcctgtgggatggtcgttgggcttcctcgttcgttcagatgcttcgcgatttagcttgctacggacgccagcagccagcgcttgcagagagcgcggtccactctgctctgagggctttacaggggcaggcgctgctatttcccggcattttcctcgaggaaataggcacagagagacccgtgcctgtatattccacgctttgcgcacctgctggaattcggggagaagaaccacgaggtgtccatgactgccctgaggctcctacagaggatgaagcgggactggatgcacacaggccggcgcccctcgggcctctgcggagcagcgctcctggttgcagccagaatgcatgacttcaggaggactgtgaaggaggtc

SEQ ID NO: 331539 - DNA, 1362 bp, Artificial Sequence
  derived and/or modified sequence
acgctgcgtcagggccgcgccccgcgcgacgtcgctgcctcgcggccccgcccccaggcccgacatcctcgaagctgctcgagcttctgcccagcaaccggcgcgagccgcgcgctgtgcagaggtagccgtggaaggcggctcccggcgctggcaggcggccgcccccagacccgcagtgccatgcgcaggtgcttgcgcccgttcttcagttagcgatcttttggttaggaacgcaggtggacctgcttgtttggccatttgcattccggagtctgcctctggccgcggcctgtgggatggtcgttgggcttcctcgttcgttcagatgcttcgcgatttagcttgctacggacgccagcagccagcgcttgcagagagcgcggtccactctgctctgagggctttacaggggcaggcgctgctatttcccggcattttcctcgaggaaataggcacagagaggttagtcgcgcgctgaaggtcacacagccggcgggtgggcaagtcaggatctggccctgggcctgcagccctggagcttgggccccagggcgcgccctgcctctgtggctctgcctgtggatcgcagtcgcaggctcgctccttgtggggcctctagcctcccggcctggggctaatcctgggaggtgcgtggcatggggcactggctttgctgatgaggagaccagacttcagaggccgtgtcacctggcctgggccgcacagctggtgcatgccaagctcgcgtgcagacgaagctccagaggcctggctgtcaggagggttcctccccgaggacacacacgcaacctcctggaccgccaggctttagacttttaaaacttccatatgcaggaaaccccacaggacgcagccagcatctcgggtcatgggtgcacctgtcaccgcagtcctgggctaaacagtgaacaggagctctgtgtctctgtggtcgttacagttgtagtgaatgttccctgggagagtcctcttcagaagatatttgcggtattttcaacaaaggactctccaggatggaggagcaactacaagtcaggaaggaaaaggctgacaacccagttttttaaaaaacgggcaaaggacgtgaacagacaccatgcaatggcccagagtgcacaaatcatcatttctcccaggaatggggtgcccgagcccccaggcggctgaacttgagacttgtcacgtagtgttggtggaatgcagagcagctggagatcacctgctgcagacccgtgcctgtatattccacgctttgcgcacctgctggaattcggggagaagaaccacgaggtgtccatgactgccctgaggctcctacagaggatgaagcgggactgg

SEQ ID NO: 331540 - DNA, 778 bp, Artificial Sequence
  derived and/or modified sequence
atagaagacggagctgccgacagccaagacgtactgggaggagaaagcgccgccgtgagcctggctctcccgcaggctgcgtgtcagccacacggcggacggggcggacggggcacgcgttccgagaggggccgccgctacccaccttgtgggcgggcaccgtcctggtcgcccccgggggccccacgacgaagtgcacgtcggccatgagctcgttgttgaacatgagcgcgttcctgcaaagacccgtgcctgtatattccacgctttgcgcacctgctggaattcggggagaagaaccacgaggtgtccatgactgccctgaggctcctacagaggatgaagcgggactggatgcacacaggccggcgcccctcgggcctctgcggagcagcgctcctggttgcagccagaatgcatgacttcaggaggactgtgaaggaggtcatcagtgtggtcaaagtgtgtgagtccacgctgcggaagaggctcacggaatttgaagacacccccaccagtcagttgaccattgatgagttcatgaagatcgacctggaggaggagtgcgaccccccctcgtacacagctgggcagaggaagctgcggatgaagcagcttgaacaagtcctgtcaaaaaaactggaggaggttgaaggtgaaatatccagttaccaggatgcaattgagattgaactagaaaacagccggccaaaggccaaggggggcctggccagcctggcaaaagatggctccaccgaggacaccgcgtccagcttgt

SEQ ID NO: 331541 - protein, 20 aa, Artificial Sequence
  derived and/or modified sequence
KPQDVCYVAGWGRMAPMGKY

SEQ ID NO: 331542 - protein, 152 aa, Artificial Sequence
  derived and/or modified sequence
MQPILLLLAFLLLPRADQLERKAKRTRAVQPLRLPSNKAQVKPGQTCSVAGWGQTAPLGKHSHTLQEVKMTVQEDRKCESDLRHYYDSTIELCVGDPEIKKTSFKGDSGGPLVCNKVAQGIVSYGRNNGMPPRACTKVSSFVHWIKKTMKRY

SEQ ID NO: 331543 - protein, 235 aa, Artificial Sequence
  derived and/or modified sequence
MQTFPSGEIIGGHEAKPHSRPYMAYLMIWDQKSLKRCGGFLIRDDFVLTAAHCWGSSINVTLGAHNIKEQEPTQQFIPVKRPIPHPAYNPKNFSNDIMLLQLERKAKRTRAVQPLRLPSNKAQVKPGQTCSVAGWGQTAPLGKHSHTLQEVKMTVQEDRKCESDLRHYYDSTIELCVGDPEIKKTSFKGDSGGPLVCNKVAQGIVSYGRNNGMPPRACTKVSSFVHWIKKTMKRY

SEQ ID NO: 331544 - DNA, 459 bp, Artificial Sequence
  derived and/or modified sequence
atgcagcccattctgctgctgctggcctttttactactcccacgtgcggaccaactggaaaggaaagctaagcgaacaagagctgtgcagccactcagactgccatcaaacaaagctcaggtcaaaccaggtcagacctgttctgtggcgggatggggccagaccgcacccctgggtaaacacagtcatacacttcaggaagtaaagatgaccgtccaggaagataggaagtgtgagagtgacttacgtcactactacgatagcacaattgagctctgtgtcggcgatcccgaaattaaaaaaacctccttcaagggtgacagcgggggcccgctggtttgcaacaaggtcgcacagggtatcgtatcctatggacgcaataatggcatgccccccagagcttgcacgaaagtaagtagcttcgtccattggataaagaaaaccatgaagagatattag

SEQ ID NO: 331545 - DNA, 708 bp, Artificial Sequence
  derived and/or modified sequence
atgcagacatttcctagcggcgagattattggaggccacgaagccaaaccccattccaggccatacatggcctacttgatgatctgggatcagaaatctttaaagagatgtggaggatttctgataagggacgacttcgtgctgaccgctgcacactgctggggctcttccattaacgtgacactaggggctcataatattaaagagcaagaaccaactcagcagttcatcccggtgaagcgacctattccccacccagcctacaatcccaagaactttagtaacgatatcatgctgttacagctggagaggaaggccaaacgcacgagagctgtgcaacctcttaggctaccaagcaataaggcccaggtgaagccgggtcagacctgtagcgtggccggctggggccagacagcccccttgggcaagcatagccataccctgcaggaagtcaagatgaccgtacaggaagatagaaagtgcgaatctgacctgaggcactattatgatagcactattgagctatgcgtgggagacccagaaataaaaaaaaccagctttaagggggactctggtggtcctctggtgtgtaacaaagtagcccaaggcattgttagttacgggcgcaataatggcatgcctcctagagcttgtaccaaagtcagcagtttcgtgcattggatcaagaagactatgaagcggtattag

SEQ ID NO: 331546 - DNA, 559 bp, Artificial Sequence
  derived and/or modified sequence
atgcaaccaatcctgcttctgctggccttcctcctgctgcccagggcagatcagctggagagaaaggccaagcggaccagagctgtgcagcccctcaggctacctagcaacaaggcccaggtgaagccagggcagacatgcagtgtggccggctgggggcagacggcccccctgggaaaacactcacacacactacaagaggtgaagatgacagtgcaggaagatcgaaagtgcgaatctgacttacgccattattacgacagtaccattgagttgtgcgtgggggacccagagattaaaaagacttcctttaagggggactctggaggccctcttgtgtgtaacaaggtggcccagggcattgtctcctatggacgaaacaatggcatgcctccacgagcctgcaccaaagtctcaagctttgtacactggataaagaaaaccatgaaacgctactaactacaggaagcaaactaagcccccgctgtaatgaaacaccttctctggagccaagtccagatttacactgggagaggtgccagcaactgaataaatacct

SEQ ID NO: 331547 - DNA, 923 bp, Artificial Sequence
  derived and/or modified sequence
gcaaggaggaaacaacagcagctccaaccagggcagccttcctgagaagatgcaaccaatcctgcttctgctggccttcctcctgctgcccagggcagatgcagacttttccttcaggggagatcatcgggggacatgaggccaagccccactcccgcccctacatggcttatcttatgatctgggatcagaagtctctgaagaggtgcggtggcttcctgatacgagacgacttcgtgctgacagctgctcactgttggggaagctccataaatgtcaccttgggggcccacaatatcaaagaacaggagccgacccagcagtttatccctgtgaaaagacccatcccccatccagcctataatcctaagaacttctccaacgacatcatgctactgcagctggagagaaaggccaagcggaccagagctgtgcagcccctcaggctacctagcaacaaggcccaggtgaagccagggcagacatgcagtgtggccggctgggggcagacggcccccctgggaaaacactcacacacactacaagaggtgaagatgacagtgcaggaagatcgaaagtgcgaatctgacttacgccattattacgacagtaccattgagttgtgcgtgggggacccagagattaaaaagacttcctttaagggggactctggaggccctcttgtgtgtaacaaggtggcccagggcattgtctcctatggacgaaacaatggcatgcctccacgagcctgcaccaaagtctcaagctttgtacactggataaagaaaaccatgaaacgctactaactacaggaagcaaactaagcccccgctgtaatgaaacaccttctctggagccaagtccagatttacactgggagaggtgccagcaactgaataaatacctcttagctgagtggaaaa

SEQ ID NO: 331548 - DNA, 459 bp, Artificial Sequence
  derived and/or modified sequence
atgcagcccatcctgctgctgctggccttcctgctgctgcccagggctgaccagctggagaggaaggccaagaggaccagggctgtgcagcccctgcggctgcccagcaacaaggcccaggtgaagccaggccagacctgcagcgtggccggctggggccagacagcccccctgggcaagcacagccacaccctgcaggaggtgaagatgacagtgcaggaggacagaaaatgtgagagtgacctgcggcactactatgacagcaccatcgagctgtgtgtgggggaccctgagatcaagaagaccagcttcaagggggacagcggcggccccctggtgtgcaacaaggtggcccagggcatcgtgtcctatggcaggaacaacggcatgccaccccgggcctgcaccaaggtgagcagctttgtgcactggatcaagaagaccatgaagcgctactag

SEQ ID NO: 331549 - DNA, 708 bp, Artificial Sequence
  derived and/or modified sequence
atgcagaccttccccagcggggagatcatcggcggccacgaggccaagccccacagccggccctacatggcctacctgatgatctgggaccagaagagcctgaagagatgtggcggcttcctgatcagagatgactttgtgctgacagctgcccactgctggggcagcagcatcaacgtgaccctgggcgcccacaacatcaaggagcaggagcccacccagcagttcatccctgtgaagaggcccatcccccacccagcctacaaccccaagaacttcagcaatgacatcatgctgctgcagctggagaggaaggccaagaggaccagggctgtgcagcccctgcggctgcccagcaacaaggcccaggtgaagccaggccagacctgcagcgtggccggctggggccagacagcccccctgggcaagcacagccacaccctgcaggaggtgaagatgacagtgcaggaggacagaaaatgtgagagtgacctgcggcactactatgacagcaccatcgagctgtgtgtgggggaccctgagatcaagaagaccagcttcaagggggacagcggcggccccctggtgtgcaacaaggtggcccagggcatcgtgtcctatggaagaaataatggcatgccaccccgggcctgcaccaaggtgtcctcctttgtgcactggatcaagaagaccatgaagcgctactag

SEQ ID NO: 331550 - DNA, 459 bp, Artificial Sequence
  derived and/or modified sequence
atgcagcccatcctgctgctgctggccttcctgctgctgccccgggccgaccagttagaacggaaagctaagcggacacgcgctgttcagccccttaggcttccctcaaataaagcccaggtgaaaccggggcagacatgttccgttgctggctggggacaaaccgcaccgttagggaagcattcccacaccttgcaggaggtcaaaatgactgttcaggaggatcggaaatgtgagtctgacctaaggcactattatgacagcacaattgagttatgcgtgggagatcccgaaattaagaaaacgtcttttaagggagatagtggcggccctctcgtctgtaataaagtagcacaaggcatcgtttcttacggccgcaataatgggatgccgccacgagcctgcacaaaagtgagcagctttgtacattggattaaaaagacgatgaagagatactag

SEQ ID NO: 331551 - DNA, 708 bp, Artificial Sequence
  derived and/or modified sequence
atgcagaccttccccagcggcgagatcatcggcggccacgaggccaaacctcattcacgtccttatatggcctacctcatgatttgggatcagaaatccctgaagagatgcggaggattcctgatccgtgacgatttcgtcttgactgctgcccattgttggggttcctctatcaatgtaacactgggagcacataacattaaagagcaagagcccactcaacaattcatccctgtgaagaggcccattcctcatcccgcctacaaccccaagaacttctctaacgatatcatgctccttcagcttgagaggaaggctaagcgcacccgggctgttcagccgttgagactgccatccaataaggcccaggttaaacccggacagacttgcagtgtagccgggtggggtcagacagctcccctcggaaaacacagtcacactctacaggaagttaaaatgactgtccaggaagatcgtaaatgcgagtccgacctgcgccactattatgatagtacaattgaattatgcgtgggcgatcctgagatcaagaagacatccttcaaaggtgacagtggaggaccgctagtctgcaataaggtagcccaaggaattgtgagctacgggcgcaacaatgggatgccgccccgtgcatgtactaaagtcagttcttttgtgcattggattaagaaaacaatgaagagatattag

SEQ ID NO: 331552 - DNA, 459 bp, Artificial Sequence
  derived and/or modified sequence
atgcaacccattctgctgttgctggcgtttttgttacttcctcgtgcggatcagctggaaagaaaagcaaagcgaacccgcgctgtccagcctctgagactgccctcgaacaaagcacaggttaaacctggccagacttgttctgtggcaggctggggccaaacagcccctctcggcaaacattctcacacattacaggaggtgaaaatgaccgtgcaagaggaccgaaaatgtgagtccgatcttcggcactactacgattccaccattgagctctgtgtgggtgatcccgaaatcaagaaaacctccttcaagggtgattcaggaggccctttggtgtgcaataaggtggcccaggggatcgtgtcttatggccgaaataatggtatgcccccacgcgcatgtacaaaagttagcagctttgtgcattggataaagaagaccatgaaacgttattag

SEQ ID NO: 331553 - DNA, 708 bp, Artificial Sequence
  derived and/or modified sequence
atgcagaccttccccagtggtgagatcattggaggccacgaggcaaagccacacagtaggccctatatggcctacctcatgatttgggaccaaaaaagccttaagcgctgcggcggatttctaattcgcgacgattttgtgttaaccgccgcacactgttggggaagttctatcaatgtcactctcggcgctcataacatcaaagagcaagaaccaacgcaacagtttatcccagtcaagcgcccaatcccccatcctgcttataaccctaagaacttttctaacgacattatgctcctgcaactggagcgcaaagctaaacggactcgtgccgtgcagccgctgcgattgccatccaataaggcacaggtcaagcctggccagacctgttctgtggctgggtggggccagaccgctccactgggcaagcatagccacactctacaggaagtaaagatgactgtccaggaggaccggaagtgtgagtccgacttgcggcactactacgattccactatcgagctctgcgtgggtgaccctgaaattaagaagacgtcctttaagggtgactccggaggccctctcgtttgcaataaggtggctcagggtatcgtatcttacgggagaaataatgggatgcctcctcgagcctgcacgaaggtcagttcattcgtccattggatcaagaaaacgatgaagagatattag

SEQ ID NO: 331554 - DNA, 459 bp, Artificial Sequence
  derived and/or modified sequence
atgcagcccatcctgctgctgctggccttcctgctgctgcccagagccgaccagctggagagaaaggccaagagaaccagagccgtgcagcccctgagactgcccagcaacaaggcccaggtgaagcccggccagacctgcagcgtggccggctggggccagaccgcccccctgggcaagcacagccacaccctgcaggaggtgaagatgaccgtgcaggaggacagaaagtgcgagagcgacctgagacactactacgacagcaccatcgagctgtgcgtgggcgaccccgagatcaagaagaccagcttcaagggcgacagcggcggccccctggtgtgcaacaaggtggcccagggcatcgtgagctacggcagaaacaacggcatgccccccagagcctgcaccaaggtgagcagcttcgtgcactggatcaagaagaccatgaagagatactag

SEQ ID NO: 331555 - DNA, 708 bp, Artificial Sequence
  derived and/or modified sequence
atgcagaccttccccagcggcgagatcatcggcggccacgaggccaagccccacagcagaccctacatggcctacctgatgatctgggaccagaagagcctgaagagatgcggcggcttcctgatcagagacgacttcgtgctgaccgccgcccactgctggggcagcagcatcaacgtgaccctgggcgcccacaacatcaaggagcaggagcccacccagcagttcatccccgtgaagagacccatcccccaccccgcctacaaccccaagaacttcagcaacgacatcatgctgctgcagctggagagaaaggccaagagaaccagagccgtgcagcccctgagactgcccagcaacaaggcccaggtgaagcccggccagacctgcagcgtggccggctggggccagaccgcccccctgggcaagcacagccacaccctgcaggaggtgaagatgaccgtgcaggaggacagaaagtgcgagagcgacctgagacactactacgacagcaccatcgagctgtgcgtgggcgaccccgagatcaagaagaccagcttcaagggcgacagcggcggccccctggtgtgcaacaaggtggcccagggcatcgtgagctacggcagaaacaacggcatgccccccagagcctgcaccaaggtgagcagcttcgtgcactggatcaagaagaccatgaagagatactag

SEQ ID NO: 331556 - protein, 306 aa, Artificial Sequence
  derived and/or modified sequence
MASNVTNKTDPRSMNSRVFIGNLNTLVVKKSDVEAIFSKYGKIVGCSVHKGFAFVQYVNERNARAAVAGEDGRMIAGQVLDINLAAEPKVNRGKAGVKRSAAEMYGSVTEHPSPSPLLSSSFDLDYDFQRDYYDRMYSYPARVPPPPPIARAVVPSKRQRVSGNTSRRGKSGFNSKSGQRGSSKSGKLKGDDLQAIKKELTQIKQKVDSLLENLEKIEKEQSKQAVEMKNDKSEEEQSSSSVKKDETNVKMESEGGADDSAEEGDLLDDDDNEDRGDDQLELIKDDEKEAEEGEDDRDSANGEDDS

SEQ ID NO: 331557 - protein, 303 aa, Artificial Sequence [sequence omitted]

SEQ ID NO: 331558 - protein, 147 aa, Artificial Sequence
  derived and/or modified sequence
MASNVTNKTDPRSMNSRVFIGNLNTLVVKKSDVEAIFSKYGKIVGCSVHKGFAFVQYVNERNARAAVAGEDGRMIAGQVLDINLAAEPKVNRGKAGVKRSAAEMYGSVTEHPSPSPLLSVYQETLHEGAKVASILRVDSGDLPSLES

SEQ ID NO: 331559 - protein, 175 aa, Artificial Sequence
  derived and/or modified sequence
MASNVTNKTDPRSMNSRVFIGNLNTLVVKKSDVEAIFSKYGKIVGCSVHKGFAFVQYVNERNARAAVAGEDGRMIAGQVLDINLAAEPKVNRGKAGVKRSAAEMYGSVTEHPSPSPLLSSSFDLDYDFQRDYYDRMYSYPARVPPPPPIARAVVPSKRQRVSGNTSRRGKSGFNS

SEQ ID NO: 331560 - protein, 187 aa, Artificial Sequence
  derived and/or modified sequence
MASNVTNKTDPRSMNSRVFIGNLNTLVVKKSDVEAIFSKYGKIVGCSVHKGFAFVQYVNERNARAAVAGEDGRMIAGQVLDINLAAEPKVNRGKAGVKRSAAEMYGSVTEHPSPSPLLSSSFDLDYDFQRDYYDRMYSYPARVPPPPPIARAVVPSKRQRVSGNTSRRGKSGFNSKSGQRGSSKSGK

SEQ ID NO: 331561 - protein, 66 aa, Artificial Sequence
  derived and/or modified sequence
MASNVTNKTDPRSMNSRVFIGNLNTLVVKKSDVEAIFSKYGKIVGCSVHKGFAFVQYVNERNARAA

SEQ ID NO: 331562 - protein, 54 aa, Artificial Sequence
  derived and/or modified sequence
MASNVTNKTDPRSMNSRVFIGNLNTLVVKKSDVEAIFSKYGKIVGCSVHKGFAF

SEQ ID NO: 331563 - DNA, 921 bp, Artificial Sequence
  derived and/or modified sequence
atggccagtaatgtgacaaacaaaacagaccctcgctcaatgaactcacgggtcttcattgggaatctgaatacactcgtcgtgaagaagtcagatgtagaggccatcttctctaagtacgggaagatcgttggttgttcagtgcacaaaggtttcgcctttgtccagtatgtcaatgagaggaacgcaagagccgccgtggccggggaggacgggagaatgatcgctggccaagtcctggacatcaacctagctgccgaaccaaaggtaaatagaggtaaggccggcgttaaacggtctgcagccgaaatgtacggctccgtgacagaacacccatctccctctcctttactgtccagctctttcgacctggactacgatttccagagagactactacgaccgaatgtacagctaccccgcaagggttccacctccgccccccatagcacgagccgtagttccatccaagcggcagcgggtgagcggtaatacatctcgccgagggaagagcgggtttaactccaagagcggccaacgagggtcttctaagagcggtaaactgaagggggatgacctgcaggcaatcaagaaagagctaacccagatcaagcagaaagtggattcactactcgagaaccttgagaagatagaaaaagagcagagcaagcaggcggtggaaatgaagaacgataaatccgaggaggagcaatcctcttcctctgtcaaaaaagacgagactaatgtgaaaatggaatccgaggggggcgccgacgattcggccgaggaaggggaccttctggatgacgacgataacgaggaccgtggagatgaccagctggagttgattaaggacgacgaaaaagaggctgaagagggcgaggatgaccgcgacagtgccaacggggaagatgacagctag

SEQ ID NO: 331564 - DNA, 921 bp, Artificial Sequence
  derived and/or modified sequence
atggcctccaacgtgaccaacaagaccgatccccgctccatgaacagcagagtgtttattgggaatcttaatacccttgtggttaagaagagtgatgtggaagccatcttcagtaagtacggcaaaatagtggggtgttctgtgcataagggcttcgcctttgtccagtacgtgaacgagagaaatgcgcgcgccgcggtggctggcgaggatggacgcatgatcgcgggccaagtactagacattaaccttgctgctgaacccaaggtcaacaggggcaaagctggggtcaaacgaagcgccgccgaaatgtatggaagtgtcacagagcacccgagcccaagcccactgctgagttcgagctttgaccttgactatgatttccaaagagattactacgatagaatgtatagttacccagcccgcgtccccccccccccccctatcgcaagagctgtggtcccgtctaagcggcagcgtgtctctggtaacacctctcgccgtggcaagtccggctttaatagtaagagcggtcagcgcggcagtagcaagtccggcaagctgaagggcgacgatctccaggcgattaagaaagagcttacccagataaagcagaaggtggatagtctgcttgagaatctggagaagatagaaaaggagcagtctaaacaggccgtagagatgaagaacgacaagtccgaagaagagcagtcctcgtcttctgtcaagaaggacgagacaaatgtgaaaatggaaagcgaaggaggcgccgacgacagcgccgaggagggagatttgctggatgatgatgataatgaagaccgcggtgacgaccagctcgagttaatcaaggatgatgagaaggaagctgaagaaggtgaggatgatagggacagtgccaacggtgaggacgatagctag

SEQ ID NO: 331565 - DNA, 912 bp, Artificial Sequence
  derived and/or modified sequence
atggccagcaatgtgaccaataagacagatccacggagcatgaactccagggtgtttattggcaacttgaatacgctcgtggttaagaaatccgacgtggaagcaatcttctccaagtacggaaagatcgtgggttgcagtgtgcataaggggtttgcgttcgtgcagtacgtgaatgagaggaacgccagggcagccgttgctggagaggacggtcggatgattgccggacaagtgctcgatataaatcttgctgccgaacctaaagtcaaccgaggcaaagcaggagttaagaggtccgcggccgagatgtacggctccgtgaccgagcacccttctcctagccccctcctgtcctcctctttcgacttggactatgatttccaaagagattactatgatcgaatgtactcgtatccagcccgcgtaccacctcctccacctatcgcgcgggctgtggtcccaagcaagcgacaacgggtctccggcaacacgtccaggcgagggaaaagcgggtttaactcaaaaagtggccaacgcggctcatctaagtccggtaagctgaagggggatgatcttcaggcaatcaagaaggagttaacccaaataaagcagaaggtggattctctcctcgaaaatctcgaaaagatcgagaaagagcagtctaagcaggcagtggagatgaaaaacgataaaagtgaagaagaacagtcctcatcttcagtcaagaaagatgagaccaacgttaagatggagtcagagggaggggcagacgactcagcagaggagggcgacctcctcgacgacgatgacaacgaggaccggggagacgaccaactagagctcatcaaagacgatgagaaagaagccgaggaaggggaggacgatagagactcagccaatggcggctag

SEQ ID NO: 331566 - DNA, 444 bp, Artificial Sequence
  derived and/or modified sequence
atggctagcaacgtgacgaataagactgatcccagatccatgaactctagagtgtttatcggaaatctgaacactcttgtggttaaaaagtctgacgtggaggccatcttctccaaatatggtaaaatcgtaggatgtagcgtgcacaaagggtttgcgttcgttcagtacgtaaacgagcgcaatgcacgggcagccgtggcaggcgaagacggaagaatgatcgcaggacaggtgctggatataaacctcgctgctgagccaaaagtcaacaggggtaaagccggcgtgaaacggagcgcagccgaaatgtatggttcagttactgaacatccatctcctagcccgctgctgagcgtgtaccaagaaactcttcacgagggcgccaaggtggccagcattcttcgcgttgactccggcgatctgcccagtcttgaatcttag

SEQ ID NO: 331567 - DNA, 921 bp, Artificial Sequence
  derived and/or modified sequence
atggccagtaatgtcacgaataaaacggacccaagaagtatgaactcccgcgttttcattgggaatctcaatactctcgtggtcaagaaatcagatgttgaggctatcttctctaaatatggtaagattgtggggtgctctgtacataagggttttgcatttgtccagtatgttaatgaacgcaatgcacgcgccgctgtcgctggagaggatggaaggatgatcgctggacaagtgctggatataaacctggctgcagaacccaaagtgaatcgtgggaaggctggcgttaaacggtctgcagccgaaatgtatggcagcgtcacggagcatccaagtccatctcctcttttgtcttccagttttgatctcgactacgactttcagagagattattatgaccgaatgtactcctatcctgcccgggtaccaccaccccctcctatcgctagagccgttgtcccaagcaagcgtcagcgagtatccggaaatactagccgccggggaaaaagtggctttaactctaagtccggccaacgcggatcttccaaaagcgggaagctcaaaggggatgacttgcaagccattaagaaagagttgacacaaataaaacaaaaagtcgacagcctgctggagaatctcgaaaaaattgagaaagagcagtctaaacaggctgtagagatgaaaaacgataagtctgaagaagaacaaagctctagtagcgtgaagaaagatgaaacgaacgtaaagatggagagcgagggtggcgcagatgattcggccgaagaaggggacttgttggatgacgatgataacgaagataggggcgacgatcagttggagttgatcaaggatgacgagaaggaggctgaagagggagaagatgacagggacagtgcgaatggtgaggatgacagttag

SEQ ID NO: 331568 - DNA, 528 bp, Artificial Sequence
  derived and/or modified sequence
atggcgtccaatgtaaccaataagacagaccccagaagtatgaattcacgcgtcttcatagggaatctaaacacgctggttgtgaaaaagtctgatgtggaggctatctttagcaaatacgggaaaattgtgggttgttcagtccacaagggatttgcattcgtccagtatgttaatgaacggaacgccagggctgctgttgcaggggaggatggaagaatgatcgcgggtcaggtcttagatatcaacctggccgctgagcccaaggtgaacagagggaaagcaggggtgaaacgctcagcagcggagatgtacggttctgttaccgagcacccttcccctagtcctctcctcagcagttcctttgatctggactatgatttccagagggactattacgatcggatgtactcatacccagctcgggtcccaccaccaccaccgatcgcccgggcagtggtccccagcaagcgacagcgggtgagtggaaatacatctcggcgtgggaagagcgggttcaattcctag

SEQ ID NO: 331569 - DNA, 564 bp, Artificial Sequence
  derived and/or modified sequence
atggcatctaatgtcactaataagactgatccaagatccatgaattcgcgggttttcatcggcaacctcaatactctcgtggtgaaaaagagcgatgtggaagctatatttagcaaatacggcaagatcgtagggtgttctgtccacaaaggatttgcatttgttcagtatgtgaacgagagaaacgccagggctgctgtggctggcgaagacgggcgtatgattgctggacaggtgctggacataaatctggctgccgagccaaaggtgaaccgtggcaaggccggggtgaagagaagcgctgcagagatgtatggtagtgtgactgagcatccaagcccaagtcctctgttatccagcagcttcgaccttgattatgacttccaaagagactactatgataggatgtacagctacccggcacgagtgcccccaccgcctcctatcgccagagctgttgtaccctctaaaagacaacgcgtgtctggcaacactagtcggcgaggaaagtcggggttcaacagcaagagcgggcagcgtggtagctctaaatccggaaaatag

SEQ ID NO: 331570 - DNA, 921 bp, Artificial Sequence
  derived and/or modified sequence
atggccagcaacgtgacaaataagaccgatccgcggtccatgaattctcgagtcttcattgggaacctgaataccctcgttgtaaaaaaaagtgacgtcgaggccattttctctaagtatggtaagattgtcggatgtagcgtgcacaaaggattcgctttcgttcagtatgttaatgaacgcaatgcccgagccgctgtagcaggagaagatggccgcatgatcgcaggccaggtactggacatcaatttagcagcagagcccaaagtcaaccgcggaaaagccggtgtgaagaggagcgccgcagaaatgtacggatccgtcactgaacatcctagcccgagccctttgctgagcagcagcttcgatttagattatgacttccaaagagactattacgatcggatgtattcataccctgcccgggtgcccccgcctcccccaatcgctcgagcagtcgtgccctcaaaacgccagcgagtgtcagggaacacctcaagaagggggaagagtggttttaatagcaaaagtggacaacgcggtagcagcaagtccggtaagctgaagggtgatgatctgcaagccattaagaaagaactaacacagatcaagcaaaaggttgatagtctgcttgagaatctggagaaaatcgagaaggaacagtccaaacaggccgtggagatgaaaaatgataagagcgaggaggagcagagctcctcctcagttaagaaagacgagacaaacgtaaaaatggagagcgaaggcggggctgatgacagcgctgaagagggggacttgttggacgacgatgacaatgaagatcgcggggacgatcagctggagctgattaaggatgacgagaaggaggcagaggagggtgaggacgatagggacagcgcaaacggcgaggacgatagctag

SEQ ID NO: 331571 - DNA, 444 bp, Artificial Sequence
  derived and/or modified sequence
atggcctcaaatgtgactaacaagaccgacccccggagcatgaattctcgggttttcattggaaacctcaacactctggtcgtaaagaagtccgacgtggaagccatattttccaaatatggaaaaatagtcggctgttcggtccacaagggtttcgcgtttgtccaatacgtcaacgaaaggaacgccagggctgcagtggctggcgaagacggaagaatgattgccggacaggtcctcgacataaatctggccgccgagcccaaggttaaccggggcaaggctggggtcaaacgttctgcggcagagatgtatggttccgtgacagagcatccctccccatctccactgctcagcgtgtatcaagagactctgcacgagggagcaaaggtggcctccatcctgagagttgacagtggggacctccccagcctcgaatcttag

SEQ ID NO: 331572 - DNA, 591 bp, Artificial Sequence
  derived and/or modified sequence
atggcctccaatgtcacaaataaaactgaccctctgttcagttccagcttcgatctggactatgacttccagagagactactacgacagaatgtatagctaccccgccagagtgcctcccccacccccaatcgctcgcgctgtagtacctagtaagagacagagagtgtccgggaacacttctaggcgagggaagagcggattcaattccaagagcgggcagcgggggagtagcaaaagcgggaaattgaaaggggatgatctgcaggccataaaaaaggagttaacccagattaagcagaaggttgacagtctgcttgaaaatcttgaaaagatcgagaaggagcagtccaagcaggcggtggagatgaagaacgacaaatcagaggaagaacagagttcgtcatccgtcaaaaaagatgaaactaatgttaagatggagtccgagggcggagcagacgacagcgccgaagagggcgacctactggacgatgatgacaatgaggatcgcggcgatgatcaagtcaagactacaggaaaggagcggaaaaggtggtggaggggagcccagggccacatggaatgtctctag

SEQ ID NO: 331573 - DNA, 921 bp, Artificial Sequence
  derived and/or modified sequence
atggccagcaatgtgaccaacaagacagaccccaggtccatgaacagcagggtcttcatcggcaacctgaacaccctggtggtgaagaagagtgatgtggaggccatcttcagcaaatatggcaagatcgtgggctgcagcgtgcacaagggctttgcctttgtgcagtatgtgaatgaaagaaatgcccgggctgctgtggccggggaggatggccgcatgattgctggccaggtgctggacatcaacctggccgctgagcccaaggtgaacagaggcaaggccggcgtgaagaggtctgctgctgagatgtatggctctgtgacagagcaccccagccccagccccctgctgagcagcagctttgacctggactatgacttccagagggactactatgacaggatgtacagctacccagcccgggtgcccccacctccacccatcgcccgggctgtggtgcccagcaagaggcagagggtgtctggcaacaccagcagaagaggcaagagcggcttcaacagcaagagcggccagaggggcagcagcaagagcggcaagctgaagggagatgacctgcaggccatcaagaaggagctgacccagatcaagcagaaggtggacagcctgctggagaacctggagaagattgagaaggagcagagcaagcaggccgtggagatgaagaatgacaagtctgaggaggagcagagcagcagctctgtgaagaaggatgagaccaacgtgaagatggagagcgagggcggcgcagatgacagcgctgaggagggggacctgctggatgatgatgacaatgaagatagaggagatgaccagctggagctgatcaaggatgatgagaaggaggccgaggagggggaggatgaccgggacagcgccaatggagaagatgacagctag

SEQ ID NO: 331574 - DNA, 912 bp, Artificial Sequence
  derived and/or modified sequence
atggccagcaatgtgaccaacaagacagaccccaggtccatgaacagcagggtcttcatcggcaacctgaacaccctggtggtgaagaagagtgatgtggaggccatcttcagcaaatatggcaagatcgtgggctgcagcgtgcacaagggctttgcctttgtgcagtatgtgaatgaaagaaatgcccgggctgctgtggccggggaggatggccgcatgattgctggccaggtgctggacatcaacctggccgctgagcccaaggtgaacagaggcaaggccggcgtgaagaggtctgctgctgagatgtatggctctgtgacagagcaccccagccccagccccctgctgagcagcagctttgacctggactatgacttccagagggactactatgacaggatgtacagctacccagcccgggtgcccccacctccacccatcgcccgggctgtggtgcccagcaagaggcagagggtgtctggcaacaccagcagaagaggcaagagcggcttcaacagcaagagcggccagaggggcagcagcaagagcggcaagctgaagggagatgacctgcaggccatcaagaaggagctgacccagatcaagcagaaggtggacagcctgctggagaacctggagaagattgagaaggagcagagcaagcaggccgtggagatgaagaatgacaagtctgaggaggagcagagcagcagctctgtgaagaaggatgagaccaacgtgaagatggagagcgagggcggcgcagatgacagcgctgaggagggggacctgctggatgatgatgacaatgaagatagaggagatgaccagctggagctgatcaaggatgatgagaaggaggccgaggagggggaggatgaccgggacagcgccaatggaggatag

SEQ ID NO: 331575 - DNA, 444 bp, Artificial Sequence
  derived and/or modified sequence
atggccagcaatgtgaccaacaagacagaccccaggtccatgaacagcagggtcttcatcggcaacctgaacaccctggtggtgaagaagagtgatgtggaggccatcttcagcaaatatggcaagatcgtgggctgcagcgtgcacaagggctttgcctttgtgcagtatgtgaatgaaagaaatgcccgggctgctgtggccggggaggatggccgcatgattgctggccaggtgctggacatcaacctggccgctgagcccaaggtgaacagaggcaaggccggcgtgaagaggtctgctgctgagatgtatggctctgtgacagagcaccccagccccagccccctgctgtctgtgtaccaggagaccctgcacgagggcgccaaggtggccagcatcctgcgggtggacagcggggacctgcccagcctggagagctag

SEQ ID NO: 331576 - DNA, 528 bp, Artificial Sequence
  derived and/or modified sequence
atggccagcaatgtgaccaacaagacagaccccaggtccatgaacagcagggtcttcatcggcaacctgaacaccctggtggtgaagaagagtgatgtggaggccatcttcagcaaatatggcaagatcgtgggctgcagcgtgcacaagggctttgcctttgtgcagtatgtgaatgaaagaaatgcccgggctgctgtggccggggaggatggccgcatgattgctggccaggtgctggacatcaacctggccgctgagcccaaggtgaacagaggcaaggccggcgtgaagaggtctgctgctgagatgtatggctctgtgacagagcaccccagccccagccccctgctgagcagcagctttgacctggactatgacttccagagggactactatgacaggatgtacagctacccagcccgggtgcccccacctccacccatcgcccgggctgtggtgcccagcaagaggcagagggtgtctggcaacaccagcagaagaggcaagagcggcttcaacagctag

SEQ ID NO: 331577 - DNA, 564 bp, Artificial Sequence
  derived and/or modified sequence
atggccagcaatgtgaccaacaagacagaccccaggtccatgaacagcagggtcttcatcggcaacctgaacaccctggtggtgaagaagagtgatgtggaggccatcttcagcaaatatggcaagatcgtgggctgcagcgtgcacaagggctttgcctttgtgcagtatgtgaatgaaagaaatgcccgggctgctgtggccggggaggatggccgcatgattgctggccaggtgctggacatcaacctggccgctgagcccaaggtgaacagaggcaaggccggcgtgaagaggtctgctgctgagatgtatggctctgtgacagagcaccccagccccagccccctgctgagcagcagctttgacctggactatgacttccagagggactactatgacaggatgtacagctacccagcccgggtgcccccacctccacccatcgcccgggctgtggtgcccagcaagaggcagagggtgtctggcaacaccagcagaagaggcaagagcggcttcaacagcaagagcggccagaggggcagcagcaagagcggcaagtag

SEQ ID NO: 331578 - DNA, 591 bp, Artificial Sequence
  derived and/or modified sequence
atggccagcaatgtgaccaacaagacagaccccctcttcagcagcagctttgacctggactatgacttccagagggactactatgacaggatgtacagctacccagcccgggtgcccccacctccacccatcgcccgggctgtggtgcccagcaagaggcagagggtgtctggcaacaccagccggcggggcaagagcggcttcaacagcaagagcggccagaggggcagcagcaagagcggcaagctgaagggagatgacctgcaggccatcaagaaggagctgacccagatcaagcagaaggtggacagcctgctggagaacctggagaagattgagaaggagcagagcaagcaggccgtggagatgaagaatgacaagtctgaggaggagcagagcagcagctctgtgaagaaggatgagaccaacgtgaagatggagagcgagggcggcgcagatgattctgctgaggagggggacctgctggatgatgatgacaatgaagatagaggagatgaccaggtgaagaccaccgggaaggagaggaagcgctggtggaggggggcccagggccacatggagtgcctgtag

SEQ ID NO: 331579 - DNA, 921 bp, Artificial Sequence
  derived and/or modified sequence
atggccagcaacgtgaccaacaagaccgacccccggagcatgaactctcgcgtgtttatcgggaacctgaataccctggtagttaaaaagagcgacgtggaggcaatcttcagcaaatatgggaagattgtcggctgctccgtccacaaaggctttgcattcgtgcagtacgtgaatgagagaaatgcccgggctgcggtagcaggagaggatggacggatgattgctggccaggtgctcgatattaatcttgctgccgagcctaaggtcaatagaggtaaggccggagtcaaacgctccgctgcagagatgtacggtagtgtgacggagcacccttctccttccccgctgctttcctcgtcattcgaccttgactacgacttccagcgggattattatgaccggatgtactcctaccctgcgagagtgcccccacccccaccaatcgcgcgtgccgttgtcccatcaaagagacagagggtgtctgggaataccagccggcgcgggaagagcggcttcaattcaaagtctggccagagaggttctagcaaaagcggcaaactcaaaggcgatgacctccaagccatcaagaaagagctgacacagatcaaacaaaaggttgatagtctccttgagaacctggagaaaattgaaaaggagcagagcaaacaggccgtagagatgaaaaacgacaagagcgaagaagaacagtctagctctagcgtcaagaaggatgagactaatgtaaagatggaatctgaaggcggcgccgacgactccgcagaggaaggggatctccttgacgatgacgacaacgaagaccgaggggacgatcagttagaacttatcaaggacgatgagaaggaggccgaggagggggaggacgatagagactctgctaatggcgaggatgactcttag

SEQ ID NO: 331580 - DNA, 921 bp, Artificial Sequence
  derived and/or modified sequence
atggccagcaacgtgaccaacaagaccgacccccggagcatgaacagcagagttttcatcggtaatctcaataccctagtggtcaagaagagcgatgtggaagccatctttagcaagtacggaaaaatagtgggatgcagcgtacacaagggattcgccttcgttcagtacgtgaacgagcgaaacgctagggctgcagtggccggcgaggatgggagaatgatcgccggacaggttctggatatcaacttagctgctgagccaaaagttaatcgtggaaaggccggggtcaagcgtagtgcagccgagatgtacgggtccgttacggagcatccctctccgtcgccactacttagctcttcttttgatctggactacgactttcagagggactattatgatcggatgtatagctatcctgccagggtacctcccccccctccaatagcaagggccgtcgtgccatctaagcggcagagagtaagcggaaacaccagccggcggggtaaaagcggattcaatagcaagtctgggcaacgaggttccagtaaatctggaaagctgaaaggcgatgacctacaggcaatcaaaaaggaattgacacagatcaagcagaaagtggacagtttgttggaaaacctggaaaagatagagaaagagcagtccaagcaggcagtggagatgaaaaatgacaaaagcgaggaggaacagtctagttcgagcgtgaagaaagacgaaacgaacgtgaagatggaaagcgagggcggcgccgatgactccgccgaggagggggacctgttggacgacgatgacaacgaagaccggggagatgaccagctggagctaatcaaggacgatgagaaggaggcggaggagggcgaagatgatcgcgactccgctaacggtgaagatgactcttag

SEQ ID NO: 331581 - DNA, 912 bp, Artificial Sequence
  derived and/or modified sequence
atggccagcaacgtgaccaacaagaccgacccccggagcatgaactctcgcgtttttattggcaatttaaacaccctcgtggttaagaagtcggacgttgaggccatattttccaaatatggcaagatagttggatgctcagttcataaggggttcgcattcgtgcagtatgtcaacgagcgcaatgcccgtgccgccgtcgccggggaagatggtagaatgattgccggacaggtccttgatataaacctggcggccgagcccaaagtcaacagaggaaaagccggcgttaaacggagcgctgccgagatgtatggaagtgtgactgagcatccttcaccatcacccttgctgtccagtagcttcgatctggactatgattttcagagggactactacgatcgaatgtactcttaccccgctagggtgcccccacctccccccattgctcgggccgttgtaccttcgaagagacagagagttagtggcaacacgagccgacgcggcaaatccggttttaactctaagtctggacaacggggatcttccaaatccgggaagcttaaaggtgacgacctccaggctattaaaaaagaactgacccagattaagcagaaggttgacagcctgctagagaatctcgagaaaatcgaaaaggaacagtccaaacaggccgttgagatgaagaacgataagagcgaggaggaacagtctagctcaagtgtgaaaaaggatgagactaatgtgaagatggagagcgaaggcggcgccgacgacagtgccgaagaaggggatctattggacgacgacgacaacgaagacagaggcgatgatcagcttgaactcatcaaagacgatgagaaagaggctgaggagggggaagacgatagggacagtgccaacggaggttag

SEQ ID NO: 331582 - DNA, 444 bp, Artificial Sequence
  derived and/or modified sequence
atggccagcaacgtgaccaacaagaccgacccccggagcatgaactcccgggtgtttatcggtaacctgaataccttggtggtcaagaagagcgatgtcgaagctatttttagcaagtacgggaaaatcgtgggatgttctgtacacaagggttttgctttcgtgcaatatgtcaacgagcgtaatgctcgcgccgccgtggccggggaagacggcaggatgatcgccggccaggtgctcgacattaacttagccgctgaacctaaagtgaacagaggcaaggcgggagttaaacgttccgccgctgagatgtacggctccgtgacagaacacccaagccctagcccacttctgtccgtctatcaggagacattacatgaaggtgccaaggtggccagcattctccgggttgattctggtgacctgccctcactggagtcctag

SEQ ID NO: 331583 - DNA, 921 bp, Artificial Sequence
  derived and/or modified sequence
atggccagcaacgtgaccaacaagaccgacccccggagcatgaactcgcgtgtctttatcggaaacctgaacaccctcgtggttaagaaatctgatgtggaggccatcttttccaagtacggaaaaatagtggggtgctcagtgcacaaaggcttcgcttttgtccaatacgtcaatgagaggaacgccagagccgcagtcgctggcgaggacggccggatgatcgccgggcaggtgctggatataaatctggctgccgaacccaaagtcaatcgagggaaggcaggggtaaagcgatcggctgccgagatgtatggcagcgtgaccgaacatccttcaccttccccccttttgagctccagcttcgatctagactacgacttccagagggattattacgaccgcatgtacagctacccggctcgagtgcccccgcccccacccatcgcaagagccgtcgtgcccagtaagcgccagagagtgtctgggaacacctctcgtagggggaagagcggatttaactccaagagtggccagaggggttcttccaaatcaggaaagctgaagggggatgatctccaggccattaagaaggaactgacccaaattaaacagaaagtggatagcctgctcgagaacctagaaaagatcgaaaaagagcagtcaaaacaggcggtagaaatgaaaaacgataagtctgaagaggagcagtcctccagctctgtaaagaaggatgagaccaacgtcaagatggagtcagagggcggcgcagatgatagcgccgaggaaggcgacctgctggacgatgacgacaatgaggacaggggagacgatcagttggaattgatcaaagacgacgagaaagaggctgaggaaggagaagatgatcgcgatagcgctaatggagaggatgactcatag

SEQ ID NO: 331584 - DNA, 528 bp, Artificial Sequence
  derived and/or modified sequence
atggccagcaacgtgaccaacaagaccgacccccggagcatgaactcacgtgtttttattggcaaccttaatactctcgttgtgaagaaatccgatgtggaggccattttttccaagtacggaaagattgtcggctgctctgtgcataaaggatttgcctttgtccagtacgttaatgagcgcaatgccagggctgctgtcgccggcgaagacggaaggatgatcgctggccaggtgcttgacataaatctcgctgcagagcccaaagtgaatagggggaaagctggcgtaaaaagatctgccgctgaaatgtacggctctgtgacagagcatccctccccctcacccttgctgtcatcatcgttcgacctggactatgatttccagcgagactattatgatcgcatgtatagctaccctgcgagggtccccccacctcctccaatagctagggcagtggtgcctagcaaacgtcagagagtgtctggtaacacctctcgaagaggcaaaagcgggttcaatagttag

SEQ ID NO: 331585 - DNA, 564 bp, Artificial Sequence
  derived and/or modified sequence
atggccagcaacgtgaccaacaagaccgacccccggagcatgaacagcagggtgttcattggcaatctgaacacgttagtagtaaaaaaaagcgacgtagaggctatttttagcaaatacggcaagatcgtagggtgcagcgtgcataaaggctttgcttttgtacaatacgtgaacgagcgtaacgcgagagcggcagtagccggcgaggatggccgcatgatagccggacaggtgctcgacatcaatctcgcagccgagccaaaggtcaacaggggcaaagccggggtcaaacgatcagcggccgagatgtacggctctgttactgaacacccaagtccctcgcctttactgagcagcagcttcgacctggactatgactttcaaagggactactatgaccgtatgtacagctatcctgcaagggtccctccacctcctcccatcgcgcgcgcagtagtcccaagcaaacggcagcgtgtatctggcaatacaagccgtcgagggaaatcgggattcaattccaaaagcggacagcgaggcagtagcaagtccggaaaatag

SEQ ID NO: 331586 - DNA, 921 bp, Artificial Sequence
  derived and/or modified sequence
atggccagcaacgtgaccaacaagaccgacccccggagcatgaactctagggtgttcatcgggaatctcaacactctggtagtgaagaagtcagatgttgaggctatcttttcaaaatacgggaagatcgttggctgctcagttcacaaaggcttcgcgttcgtgcagtacgtcaacgagagaaatgccagggcagccgtcgccggagaagacgggcggatgatcgctgggcaggtcctggacatcaatctggccgcggaaccaaaagtgaatagggggaaggccggcgttaagcgatccgcagctgagatgtacggttccgtcacggagcatccttcaccctctccactcctgtcctcatccttcgaccttgactacgattttcaacgcgattattacgatcgaatgtacagttacccagctagggtgcctcccccccctcctatcgcaagagcagtagttccctcaaagagacagagggtcagcggcaacaccagtagaagaggcaaatccgggtttaactctaagtctggccagcgcggatccagtaagtccgggaagcttaagggcgacgacctgcaagccattaagaaagaactaacacagatcaaacagaaggtggacagtttactggaaaatcttgagaagatcgagaaggagcagtctaagcaagccgtggaaatgaaaaacgacaagtctgaggaggaacagtcaagtagctctgtcaagaaagacgaaacaaatgtgaaaatggaatcagaaggcggcgctgacgactctgcggaagagggcgacctcctggacgacgatgataatgaggatcggggagatgatcagctggagctgattaaggacgacgaaaaggaagcagaggagggggaggacgaccgggacagtgctaatggcgaagacgactcctag

SEQ ID NO: 331587 - DNA, 444 bp, Artificial Sequence
  derived and/or modified sequence
atggccagcaacgtgaccaacaagaccgacccccggagcatgaactctcgtgtttttataggcaacctaaatacgctcgtggtgaaaaagtccgacgtggaggccatattctccaagtatggcaaaatagtgggatgttcggtccataaggggttcgcattcgtccaatacgtgaatgagcgcaacgctcgggcagcagtcgccggagaggacggacggatgatcgccggacaggtgcttgatataaatctagctgctgaacccaaagttaataggggtaaggctggcgtaaagcgcagcgcagcggaaatgtacggtagcgtgacggaacatccaagcccatctccactgctcagcgtgtatcaagagacgctgcatgagggcgccaaagtggctagcattctacgcgttgacagcggcgacttacccagcctggagtcttag

SEQ ID NO: 331588 - DNA, 591 bp, Artificial Sequence
  derived and/or modified sequence
atggccagcaacgtgaccaacaagaccgaccccctgttcagcagctccttcgacttagactatgacttccagagagattattatgaccgaatgtatagctatcctgctagggttcctcctccgcccccaatcgcacgtgcagtggttccatcaaagcggcagcgcgtgtcgggaaacacttcccgcagggggaaatcaggcttcaactctaagtcggggcagcggggttcttctaaaagcggcaagctgaagggggatgatctccaggcgataaaaaaggagctcacacagatcaagcagaaggtcgactctcttctcgagaatctggagaagattgaaaaggaacaaagcaagcaggcggttgagatgaagaatgacaagtctgaagaggagcagagcagtagctccgtgaaaaaagacgaaactaatgtaaaaatggagagcgaaggcggcgcagacgattctgctgaggaaggcgacctgctcgatgacgatgataacgaggataggggcgacgaccaggtgaagacaacaggtaaagagcgtaagagatggtggaggggggctcaaggacatatggagtgtctttag

SEQ ID NO: 331589 - DNA, 921 bp, Artificial Sequence
  derived and/or modified sequence
atggccagtaacgtgactaacaaaactgaccctaggtccatgaacagccgggtgtttatcggcaaccttaatacactggtcgtcaagaaatccgacgttgaagccatcttcagcaaatatggcaaaatcgtgggctgttccgttcacaaggggtttgccttcgtgcaatacgtaaatgagagaaatgccagggctgcggtagcaggggaggacggccgtatgattgccggacaggtgctggacattaatcttgccgcagagcctaaagttaacaggggcaaagccggagtgaaacgaagcgcggctgaaatgtatgggagtgtgacggagcacccatctccctcacccctgttaagctcatccttcgacctggattatgatttccaacgggactactacgacagaatgtactcttaccctgcacgtgtgccacccccaccaccaattgccagggctgtagtgccaagcaagaggcagcgcgtgtccggaaacaccagtcgacggggaaagtcagggttcaactctaagagtgggcaaaggggctcttcaaagagtgggaagctcaagggtgacgaccttcaggccatcaagaaagaactgacccagatcaaacaaaaagtggactctctgctggagaatctggagaaaatagagaaggaacaaagcaagcaggccgtggagatgaaaaacgacaagagtgaggaggagcagagttcatccagtgtgaaaaaggacgaaacaaacgtgaagatggaatccgagggtggagcagacgattccgcagaagaaggggacctgttggatgacgacgacaatgaggacagaggagacgaccagcttgagctcataaaggatgatgaaaaagaggcagaagaaggagaagatgaccgggactcagctaacggggaggatgattcttag

SEQ ID NO: 331590 - DNA, 921 bp, Artificial Sequence
  derived and/or modified sequence
atggcttctaacgtgacaaacaagacagatccacgaagcatgaatagcagagtattcatagggaaccttaataccctcgtagttaaaaaaagtgacgtagaggctattttcagcaagtatggtaaaatcgtgggatgttcggttcacaaaggtttcgcttttgtccagtatgtcaacgaacgcaatgcaagagctgcagtcgcgggtgaggatgggaggatgattgccggtcaggtgctggacattaacttagcagccgaaccaaaagtcaacagaggaaaggctggcgtcaagaggagtgcagccgagatgtacggtagcgttactgaacacccttctcccagcccactcttatcaagctcgttcgacctagattacgatttccagagggactattatgaccgcatgtattcctaccccgcaagagttccacctcctcccccaatcgctcgggctgtagtgcctagcaagcgccaacgggttagtggcaacacgtcacggagggggaagtccggatttaactccaaatctggacagcgaggttcctccaaatcaggtaagctgaaaggagacgacctgcaggctatcaaaaaagagctcacacagatcaagcagaaagtcgactcccttctggaaaacctggaaaaaatcgagaaagaacaatctaagcaagccgtcgaaatgaaaaatgacaagtccgaagaggagcagtcttctagctctgtgaagaaagacgaaaccaacgttaaaatggaatctgaggggggagctgacgacagcgccgaagaaggcgacttgcttgacgatgatgataatgaagacagaggggacgaccagctggagctgatcaaggatgacgagaaagaggccgaggagggtgaggacgatagagacagcgcaaatggagaagatgacagttag

SEQ ID NO: 331591 - DNA, 912 bp, Artificial Sequence
  derived and/or modified sequence
atggcctctaacgtcactaataagaccgatccccgaagtatgaattctagagtgtttatcggcaacctgaatacgctggtggtgaagaagagcgacgtggaggccatcttctccaagtacggaaaaatcgtaggatgctccgtccacaaaggattcgccttcgtccagtacgtgaatgaacgcaatgccagagcagctgttgcaggtgaggatggtagaatgatcgctggacaagtactagacatcaacctggccgctgagcccaaagtgaacaggggcaaagccggagtgaagcgtagcgcagctgaaatgtacggatctgtgacagaacacccatcaccatcccctctgctcagttccagtttcgacctggattatgactttcaacgggattattacgatcgcatgtattcatatccagctagagtacctccccctccccctatagcaagagcagtggttccctccaaaaggcagagggtttccggtaatacttcgagaagaggcaaaagcggctttaatagtaaatccggccagagaggctcttcaaaatcgggcaagctgaaaggtgacgatctacaggcaataaagaaggaactcactcagattaaacaaaaggtagactccctgctggagaacctggaaaagatcgaaaaggaacaatctaagcaggcagtggagatgaaaaatgacaagagcgaagaggaacagtcttccagtagcgtcaaaaaagatgagaccaatgttaagatggaaagcgaaggaggggctgatgattcggctgaagaaggagatctgctggacgacgatgataacgaggatcgaggcgacgatcagctcgaactgataaaagatgacgaaaaagaggctgaagagggcgaagatgaccgagactccgccaacggtggctag

SEQ ID NO: 331592 - DNA, 444 bp, Artificial Sequence
  derived and/or modified sequence
atggcatctaacgtgaccaacaaaacggaccctagaagtatgaactccagagtgttcatcggcaatcttaatacactggtcgtgaaaaaatcagatgtcgaggcaattttctctaaatatggcaaaatagtcggctgctccgtgcataagggcttcgctttcgtacagtacgtgaacgagagaaatgctagagctgccgtagcgggtgaggatggacgcatgatcgcaggacaggtgctggatatcaatcttgcagccgaacctaaggtcaatcgcggaaaggcaggggtaaaaagaagcgccgctgagatgtacggatctgtgaccgagcatccttccccctctcccctgctgagcgtctaccaagagactcttcacgagggggctaaggtagcgtcaattctgagggtggactctggggatttgccaagcctggagtcctag

SEQ ID NO: 331593 - DNA, 921 bp, Artificial Sequence
  derived and/or modified sequence
atggcttcaaacgtgaccaataagacggaccctcgctcaatgaacagtagggtgttcatcggaaacctgaatacgctggtagttaagaagagcgatgttgaagccattttcagcaagtacgggaaaatcgtgggctgcagcgtgcacaagggctttgcattcgttcagtacgttaatgagcgtaacgccagagctgccgtcgccggagaggacggcagaatgatagctggtcaagttttggatataaacttggcagccgagccaaaggtcaaccggggtaaagccggagtcaagcgtagcgctgcagagatgtatggcagcgttaccgagcatccctctccctctccattactttccagttccttcgacctggattacgattttcaacgagactactatgacagaatgtatagctacccggctcgcgtgccccctccaccgccaattgcacgcgctgttgttccttcaaagcgccagagggtctcggggaatacaagtcgccgaggaaagtctggcttcaacagcaaatctggtcagcgtggctcctccaaaagtggcaagttgaagggcgacgatctgcaggcgattaaaaaggaattaacccaaataaaacaaaaggttgactcgctcctggagaacttagaaaaaattgaaaaggaacagtccaaacaagctgtggagatgaaaaatgacaaatccgaggaagagcagtcaagctcgtctgtcaagaaagacgagaccaacgtgaaaatggagagtgaggggggagccgacgattctgctgaggagggcgacctgctggatgacgacgataacgaggatcggggtgacgatcagctagagctaatcaaagacgatgagaaagaagccgaggagggcgaggatgatcgggactcggccaatggagaagacgattcttag

SEQ ID NO: 331594 - DNA, 528 bp, Artificial Sequence
  derived and/or modified sequence
atggccagtaacgtcacaaacaagacagaccccagaagcatgaactcacgcgtgtttatcggaaatctgaatacgttggtcgttaaaaaatctgacgtcgaggctatcttttccaaatacgggaagattgtgggatgctctgtgcataagggattcgcgttcgttcagtatgtgaatgagcgaaacgcacgtgcagcagtcgctggtgaagatggcaggatgatcgcaggacaggtcctggacatcaatcttgctgcagaacctaaggtgaataggggaaaagctggcgtcaaaaggtccgcagctgagatgtacgggtctgtgacagagcacccttccccttcaccactgctttccagttctttcgacctggattatgatttccagagagactattatgacagaatgtactcctaccctgccagggtgccaccaccccctccgatcgctcgggcagtggtcccttcaaaacgacagagagtctcaggaaacactagtcgcaggggcaaatcagggtttaacagttag

SEQ ID NO: 331595 - DNA, 564 bp, Artificial Sequence
  derived and/or modified sequence
atggcatccaacgtgacaaataagacggacccgagaagcatgaattctagagtgtttattggcaatctaaatactctggttgtaaaaaagagcgatgttgaagcgattttcagcaagtacggtaagattgtgggctgctctgtgcataaaggattcgcgttcgtgcagtacgtgaacgaaagaaatgccagagccgcagtggcaggcgaggacggtagaatgatcgccggacaggtcttggacatcaacctggctgctgaaccaaaagttaaccggggaaaggcaggagttaaacggagcgccgctgaaatgtatggatccgtaactgagcacccttctccttctcctctcctcagctctagcttcgacctggactacgactttcagcgggattactacgacagaatgtatagttatccagcacgtgttccccctccgccaccaatcgctcgagctgtagttccctcaaaaaggcagagggtcagtgggaatacgtccagaaggggtaagtctggattcaacagtaagtcgggtcagcggggaagtagtaagagcgggaaatag

SEQ ID NO: 331596 - DNA, 921 bp, Artificial Sequence
  derived and/or modified sequence
atggcttcaaacgtgaccaataaaacggatccacgatccatgaatagccgggtgttcattgggaatctgaatacactagtggtgaaaaagtcggatgtggaagctatttttagcaagtatggcaaaatcgttggttgcagcgtccacaagggcttcgcattcgttcagtacgtgaatgaacggaatgcacgggctgctgtggcgggagaagatgggaggatgatagccggacaagtcctcgacattaacctggctgcagagcccaaagttaatcgcggaaaggctggcgtaaagaggtcggccgcagagatgtacggcagtgtgactgagcacccaagtcccagccccctcctctcctcatctttcgacctggactatgatttccagcgtgactattacgacagaatgtattcttacccagcccgtgtgcccccacccccaccgatcgctcgcgctgttgtgcctagcaaacggcaacgagtgtccggaaacacatccaggcggggaaaatctggctttaattcaaagagtggccaaagaggatctagtaaatcaggtaaacttaaaggcgacgatctacaggcaattaagaaagagctcactcagataaaacaaaaagttgattcactgctcgaaaacttggagaagatcgaaaaggagcaatcaaagcaagcggtggagatgaagaacgataagagtgaagaagagcagtccagtagttcagtcaaaaaagacgagactaatgtgaagatggagagtgaaggtggcgctgatgacagcgctgaagaaggagatctcctggacgacgacgataacgaggaccggggagatgaccaattggaactgatcaaagacgatgagaaggaggccgaggaaggagaggatgaccgagattctgcaaacggagaagatgactcttag

SEQ ID NO: 331597 - DNA, 444 bp, Artificial Sequence
  derived and/or modified sequence
atggctagtaatgtcacgaacaagaccgaccctagaagcatgaattctcgggtctttattggcaacttgaataccctcgtggtgaaaaagtcggatgtcgaggcaatcttcagtaaatatggcaagatcgtgggttgttccgtgcacaaggggttcgccttcgtgcagtatgtcaacgagcgcaatgctcgcgctgctgtggccggagaggatggaagaatgatagccggacaggttttggacatcaatctggccgctgagccaaaggtcaatcgcggaaaggccggagtgaagcgcagtgctgcagagatgtacgggtctgtgacggaacaccccagcccatcccctctcttatcagtgtaccaggagaccctccatgagggcgctaaggtcgcatcaatacttcgggttgactccggcgacctgcccagcctggaaagttag

SEQ ID NO: 331598 - DNA, 591 bp, Artificial Sequence
  derived and/or modified sequence
atggccagcaatgtgacgaataagaccgatccattgttctcgagttcatttgacttggattatgactttcagcgagactactatgaccgaatgtattcgtacccagccagggtccccccaccgcctcctattgccagagccgtagtgccgtccaaacggcagagggttagtgggaatacctcccggagagggaagagtggcttcaacagcaagagcggtcagagggggtctagcaaaagcggcaaacttaagggagacgatctgcaggcaataaagaaagaactgactcagattaagcaaaaggtcgattcactgctggaaaatctggagaagattgaaaaagagcaatcaaagcaggccgttgaaatgaagaacgataagtccgaggaggagcaaagtagctcatctgtgaagaaggatgaaactaacgttaagatggagagcgaggggggtgctgatgatagtgctgaggaaggcgatttgcttgacgacgatgacaacgaggaccgcggagacgaccaggtaaaaaccacagggaaagagagaaagaggtggtggcgtggcgcacaaggacatatggagtgcttatag

SEQ ID NO: 331599 - DNA, 921 bp, Artificial Sequence
  derived and/or modified sequence
atggccagcaacgtgaccaacaagaccgaccccagaagcatgaacagcagagtgttcatcggcaacctgaacaccctggtggtgaagaagagcgacgtggaggccatcttcagcaagtacggcaagatcgtgggctgcagcgtgcacaagggcttcgccttcgtgcagtacgtgaacgagagaaacgccagagccgccgtggccggcgaggacggcagaatgatcgccggccaggtgctggacatcaacctggccgccgagcccaaggtgaacagaggcaaggccggcgtgaagagaagcgccgccgagatgtacggcagcgtgaccgagcaccccagccccagccccctgctgagcagcagcttcgacctggactacgacttccagagagactactacgacagaatgtacagctaccccgccagagtgcccccccccccccccatcgccagagccgtggtgcccagcaagagacagagagtgagcggcaacaccagcagaagaggcaagagcggcttcaacagcaagagcggccagagaggcagcagcaagagcggcaagctgaagggcgacgacctgcaggccatcaagaaggagctgacccagatcaagcagaaggtggacagcctgctggagaacctggagaagatcgagaaggagcagagcaagcaggccgtggagatgaagaacgacaagagcgaggaggagcagagcagcagcagcgtgaagaaggacgagaccaacgtgaagatggagagcgagggcggcgccgacgacagcgccgaggagggcgacctgctggacgacgacgacaacgaggacagaggcgacgaccagctggagctgatcaaggacgacgagaaggaggccgaggagggcgaggacgacagagacagcgccaacggcgaggacgacagctag

SEQ ID NO: 331600 - DNA, 912 bp, Artificial Sequence
  derived and/or modified sequence
atggccagcaacgtgaccaacaagaccgaccccagaagcatgaacagcagagtgttcatcggcaacctgaacaccctggtggtgaagaagagcgacgtggaggccatcttcagcaagtacggcaagatcgtgggctgcagcgtgcacaagggcttcgccttcgtgcagtacgtgaacgagagaaacgccagagccgccgtggccggcgaggacggcagaatgatcgccggccaggtgctggacatcaacctggccgccgagcccaaggtgaacagaggcaaggccggcgtgaagagaagcgccgccgagatgtacggcagcgtgaccgagcaccccagccccagccccctgctgagcagcagcttcgacctggactacgacttccagagagactactacgacagaatgtacagctaccccgccagagtgcccccccccccccccatcgccagagccgtggtgcccagcaagagacagagagtgagcggcaacaccagcagaagaggcaagagcggcttcaacagcaagagcggccagagaggcagcagcaagagcggcaagctgaagggcgacgacctgcaggccatcaagaaggagctgacccagatcaagcagaaggtggacagcctgctggagaacctggagaagatcgagaaggagcagagcaagcaggccgtggagatgaagaacgacaagagcgaggaggagcagagcagcagcagcgtgaagaaggacgagaccaacgtgaagatggagagcgagggcggcgccgacgacagcgccgaggagggcgacctgctggacgacgacgacaacgaggacagaggcgacgaccagctggagctgatcaaggacgacgagaaggaggccgaggagggcgaggacgacagagacagcgccaacggcggctag

SEQ ID NO: 331601 - DNA, 444 bp, Artificial Sequence
  derived and/or modified sequence
atggccagcaacgtgaccaacaagaccgaccccagaagcatgaacagcagagtgttcatcggcaacctgaacaccctggtggtgaagaagagcgacgtggaggccatcttcagcaagtacggcaagatcgtgggctgcagcgtgcacaagggcttcgccttcgtgcagtacgtgaacgagagaaacgccagagccgccgtggccggcgaggacggcagaatgatcgccggccaggtgctggacatcaacctggccgccgagcccaaggtgaacagaggcaaggccggcgtgaagagaagcgccgccgagatgtacggcagcgtgaccgagcaccccagccccagccccctgctgagcgtgtaccaggagaccctgcacgagggcgccaaggtggccagcatcctgagagtggacagcggcgacctgcccagcctggagagctag

SEQ ID NO: 331602 - DNA, 528 bp, Artificial Sequence
  derived and/or modified sequence
atggccagcaacgtgaccaacaagaccgaccccagaagcatgaacagcagagtgttcatcggcaacctgaacaccctggtggtgaagaagagcgacgtggaggccatcttcagcaagtacggcaagatcgtgggctgcagcgtgcacaagggcttcgccttcgtgcagtacgtgaacgagagaaacgccagagccgccgtggccggcgaggacggcagaatgatcgccggccaggtgctggacatcaacctggccgccgagcccaaggtgaacagaggcaaggccggcgtgaagagaagcgccgccgagatgtacggcagcgtgaccgagcaccccagccccagccccctgctgagcagcagcttcgacctggactacgacttccagagagactactacgacagaatgtacagctaccccgccagagtgcccccccccccccccatcgccagagccgtggtgcccagcaagagacagagagtgagcggcaacaccagcagaagaggcaagagcggcttcaacagctag

SEQ ID NO: 331603 - DNA, 564 bp, Artificial Sequence
  derived and/or modified sequence
atggccagcaacgtgaccaacaagaccgaccccagaagcatgaacagcagagtgttcatcggcaacctgaacaccctggtggtgaagaagagcgacgtggaggccatcttcagcaagtacggcaagatcgtgggctgcagcgtgcacaagggcttcgccttcgtgcagtacgtgaacgagagaaacgccagagccgccgtggccggcgaggacggcagaatgatcgccggccaggtgctggacatcaacctggccgccgagcccaaggtgaacagaggcaaggccggcgtgaagagaagcgccgccgagatgtacggcagcgtgaccgagcaccccagccccagccccctgctgagcagcagcttcgacctggactacgacttccagagagactactacgacagaatgtacagctaccccgccagagtgcccccccccccccccatcgccagagccgtggtgcccagcaagagacagagagtgagcggcaacaccagcagaagaggcaagagcggcttcaacagcaagagcggccagagaggcagcagcaagagcggcaagtag

SEQ ID NO: 331604 - DNA, 1164 bp, Artificial Sequence
  derived and/or modified sequence
gaagagacgaagactgagcggttgtggccgcgttgccgacctccagcagcagtcggcttctctacgcagaacccgggagtaggagactcagaatcgaatctcttctccctccccttcttgtatacttttttttgctttacagttttcggctttgtgagaaaccttaccatcaaacacgatggccagcaacgttaccaacaagacagatcctcttttcagctcctcttttgacttggactatgactttcaacgggactattatgataggatgtacagttacccagcacgtgtacctcctcctcctcctattgctcgggctgtagtgccctcgaaacgtcagcgtgtatcaggaaacacttcacgaaggggcaaaagtggcttcaattctaagagtggacagcggggatcttccaagtctggaaagttgaaaggagatgaccttcaggccattaagaaggagctgacccagataaaacaaaaagtggattctctcctggaaaacctggaaaaaattgaaaaggaacagagcaaacaagcagtagagatgaagaatgataagtcagaagaggagcagagcagcagctccgtgaagaaagatgagactaatgtgaagatggagtctgaggggggtgcagatgactctgctgaggagggggacctactggatgatgatgataatgaagatcggggggatgaccaggtgaaaaccacgggaaaggaaagaaaaaggtggtggaggggggctcagggacacatggagtgcctctaactccatcctgtttgtgtctgtttctcacagctggagttgatcaaggatgatgaaaaagaggctgaggaaggagaggatgacagagacagcgccaatggcgaggatgactcttaagcacatagtggggtttagaaatcttatcccattatttctttacctaggcgcttgtctaagatcaaatttttcaccagatcctctcccctagtatcttcagcacatgctcactgttctccccatccttgtccttcccatgttcattaattcatattgccccgcgcctagtcccattttcacttcctttgacgctcctagtagttttgttaagtcttaccctgtaatttttgcttttaattttgatacctctttatgacttaacaataaaaaggatgtatggt

SEQ ID NO: 331605 - DNA, 3248 bp, Artificial Sequence
  derived and/or modified sequence
aggaatggggcggggactaggccttcgcctcggcggcagaggagactcgggggccattttgtgaagagacgaagactgagcggttgtggccgcgttgccgacctccagcagcagtcggcttctctacgcagaacccgggagtaggagactcagaatcgaatctcttctccctccccttcttgtatacttttttttgctttacagttttcggctttgtgagaaaccttaccatcaaacacgatggccagcaacgttaccaacaagacagatcctcgctccatgaactcccgtgtattcattgggaatctcaacactcttgtggtcaagaaatctgatgtggaggcaatcttttcgaagtatggcaaaattgtgggctgctctgttcataagggctttgccttcgttcagtatgttaatgagagaaatgcccgggctgctgtagcaggagaggatggcagaatgattgctggccaggttttagatattaacctggctgcagagccaaaagtgaaccgaggaaaagcaggtgtgaaacgatctgcagcggagatgtacgggtcagtaacagaacacccttctccgtcccctctactcagctcctcttttgacttggactatgactttcaacgggactattatgataggatgtacagttacccagcacgtgtacctcctcctcctcctattgctcgggctgtagtgccctcgaaacgtcagcgtgtatcaggaaacacttcacgaaggggcaaaagtggcttcaattctaagagtggacagcggggatcttccaagtctggaaagttgaaaggagatgaccttcaggccattaagaaggagctgacccagataaaacaaaaagtggattctctcctggaaaacctggaaaaaattgaaaaggaacagagcaaacaagcagtagagatgaagaatgataagtcagaagaggagcagagcagcagctccgtgaagaaagatgagactaatgtgaagatggagtctgaggggggtgcagatgactctgctgaggagggggacctactggatgatgatgataatgaagatcggggggatgaccagctggagttgatcaaggatgatgaaaaagaggctgaggaaggagaggatgacagagacagcgccaatggcgaggatgactcttaagcacatagtggggtttagaaatcttatcccattatttctttacctaggcgcttgtctaagatcaaatttttcaccagatcctctcccctagtatcttcagcacatgctcactgttctccccatccttgtccttcccatgttcattaattcatattgccccgcgcctagtcccattttcacttcctttgacgctcctagtagttttgttaagtcttaccctgtaatttttgcttttaattttgatacctctttatgacttaacaataaaaaggatgtatggtttttatcaactgtctccaaaataatctcttgttatgcagggagtacagttcttttcattcatacataagttcagtagttgcttccctaactgcaaaggcaatctcatttagttgagtagctcttgaaagcagctttgagttagaagtatgtgtgttacaccctcacattagtgtgctgtgtggggcagttcaacacaaatgtaacaatgtatttttgtgaatgagagttggcatgtcaaatgcatcctctagaaaaataattagtgttatagtcttaagatttgttttctaaagttgatactgtgggttatttttgtgaacagcctgatgtttgggaccttttttcctcaaaataaacaagtccttattaaaccaggaatttggagaaaaaaaaaaccctggttttttatttttgtattttattattgtttacttcaaactttgttttacagcgtcctccacaaaacctctagaatgcactagatatatttttcttggagtcataatcatgatgcataccaacacaacactactcaaattatatttcattgagatgcatgttgcattgaggagtcaacttgacatagagtggagactttttcaaaatggcttttacatcctaatgaaagtttgggaagtatatcctctctgccttttcatcagtgctttgtggtccagctggcaccctttctgaggtttgtgttttgtgctaaatggttttgtccttaaataggagaggctcaaaaacatcaagatttcaggaaaatggcgacagctgcataatggaacccccctgcttctattttgttcttttaattactatttatagccccagttaccttctgaattctgaagtgtatatacctccatgttcctgaaaacaagaaaactcttacttcctgatattccatagactgccttcccaggtgattgagaacatagagaatgttacacatttattttactctaaatgatcttttacccctgttagctaatctttgtgttttcctcaactttattaattacagtgattgcatttttagcatccagttgtaagatgaatatattaaacagctaccagtgttggtgatacctcatccttgaaaggcttagttcatttgtgttttatacttcagtttttccagcatagcagaaaatgccgcttataatttttgtgcacacaaaccttggattcccctgtaaagttgctattgtttcatagcatgcggcactggccttttttcatcctactcattacaggcaaaactcatgtcttatttatgaggattttatagatcattttctgtaacaggtgacaaaagcagaaaagaatgaagaggctgaagtatgaactacccttggagcccatatacatgatataggcaatttcttttgtatgttaattcagtcaaaaatactacccacttgatgttttctaatctgatgtgagctcatgttacacagacttttagtaagtaacccgtgactagaaaataaactggatgcttaggagagagtgtcagatgtataagatgctaataaaacctgtttaatattattgttagctgtaagtttttgggaaatactgaacaaattagtccacaatcaagtgtctacttttcccttcactgtagggcctctccctgcacagagcagtctgtttagctgtgaacaccacaatctgcagatgttcaagtcccttacataaaatggcatagtatttatatgtaacctatgcatattctcctgtatattttaaatcatctctacattaaaatacctgataaaatgtaaatggtatgtaaa

SEQ ID NO: 331606 - DNA, 1559 bp, Artificial Sequence
  derived and/or modified sequence
cattttgtgaagagacgaagactgagcggttgtggccgcgttgccgacctccagcagcagtcggcttctctacgcagaacccgggagtaggagactcagaatcgaatctcttctccctccccttcttgggcagcaaggcgaaccccatccctactcactggagctcagctttgatttttaacctcccttccccacccttccagaacacacacattccattccaaaactgattttataaagacattttaaacataatgatgcaacttggtgtgcactacagcaaatgtacagtgagatttttttgatcttcagctacaccatcttcctcctgtttcccttgaaatcccatcctgcttttcctgtacactacccctcacaaaccacaagctgcagcaacatggatgcccagcctggagcagcagcagccaggatgacctggagccaggggggccttcggaacagatgcacacccttcctgggtgatgttttcggctttgtgagaaaccttaccatcaaacacgatggccagcaacgttaccaacaagacagatcctcgctccatgaactcccgtgtattcattgggaatctcaacactcttgtggtcaagaaatctgatgtggaggcaatcttttcgaagtatggcaaaattgtgggctgctctgttcataagggctttgccttcgttcagtatgttaatgagagaaatgcccgggctgctgtagcaggagaggatggcagaatgattgctggccaggttttagatattaacctggctgcagagccaaaagtgaaccgaggaaaagcaggtgtgaaacgatctgcagcggagatgtacgggtcagtaacagaacacccttctccgtcccctctactcagctcctcttttgacttggactatgactttcaacgggactattatgataggatgtacagttacccagcacgtgtacctcctcctcctcctattgctcgggctgtagtgccctcgaaacgtcagcgtgtatcaggaaacacttcacgaaggggcaaaagtggcttcaattctaagagtggacagcggggatcttccaagtctggaaagttgaaaggagatgaccttcaggccattaagaaggagctgacccagataaaacaaaaagtggattctctcctggaaaacctggaaaaaattgaaaaggaacagagcaaacaagcagtagagatgaagaatgataagtcagaagaggagcagagcagcagctccgtgaagaaagatgagactaatgtgaagatggagtctgaggggggtgcagatgactctgctgaggagggggacctactggatgatgatgataatgaagatcggggggatgaccagctggagttgatcaaggatgatgaaaaagaggctgaggaaggagaggatgacagagacagcgccaatggcgaggatgactcttaagcacatagtggggtttagaaatcttatcccattatttctttacctaggcgcttgtctaagatcaaatttttcaccagatcctctcccctagtatcttcagcacatgctcactgttct

SEQ ID NO: 331607 - DNA, 1074 bp, Artificial Sequence
  derived and/or modified sequence
ttttgtgaagagacgaagactgagcggttgtggccgcgttgccgacctccagcagcagtcggcttctctacgcagaacccgggagtaggagactcagaatcgaatctcttctccctccccttcttgttttcggctttgtgagaaaccttaccatcaaacacgatggccagcaacgttaccaacaagacagatcctcgctccatgaactcccgtgtattcattgggaatctcaacactcttgtggtcaagaaatctgatgtggaggcaatcttttcgaagtatggcaaaattgtgggctgctctgttcataagggctttgccttcgttcagtatgttaatgagagaaatgcccgggctgctgtagcaggagaggatggcagaatgattgctggccaggttttagatattaacctggctgcagagccaaaagtgaaccgaggaaaagcaggtgtgaaacgatctgcagcggagatgtacgggtcagtaacagaacacccttctccgtcccctctactcagctcctcttttgacttggactatgactttcaacgggactattatgataggatgtacagttacccagcacgtgtacctcctcctcctcctattgctcgggctgtagtgccctcgaaacgtcagcgtgtatcaggaaacacttcacgaaggggcaaaagtggcttcaattctaagagtggacagcggggatcttccaagtctggaaagttgaaaggagatgaccttcaggccattaagaaggagctgacccagataaaacaaaaagtggattctctcctggaaaacctggaaaaaattgaaaaggaacagagcaaacaagcagtagagatgaagaatgataagtcagaagaggagcagagcagcagctccgtgaagaaagatgagactaatgtgaagatggagtctgaggggggtgcagatgactctgctgaggagggggacctactggatgatgatgataatgaagatcggggggatgaccagctggagttgatcaaggatgatgaaaaagaggctgaggaaggagaggatgacagagacagcgccaatggcggatga

SEQ ID NO: 331608 - DNA, 1304 bp, Artificial Sequence
  derived and/or modified sequence
attttgtgaagagacgaagactgagcggttgtggccgcgttgccgacctccagcagcagtcggcttctctacgcagaacccgggagtaggagactcagaatcgaatctcttctccctccccttcttgtatacttttttttgctttacagttttcggctttgtgagaaaccttaccatcaaacacgatggccagcaacgttaccaacaagacagatcctcgctccatgaactcccgtgtattcattgggaatctcaacactcttgtggtcaagaaatctgatgtggaggcaatcttttcgaagtatggcaaaattgtgggctgctctgttcataagggctttgccttcgttcagtatgttaatgagagaaatgcccgggctgctgtagcaggagaggatggcagaatgattgctggccaggttttagatattaacctggctgcagagccaaaagtgaaccgaggaaaagcaggtgtgaaacgatctgcagcggagatgtacgggtcagtaacagaacacccttctccgtcccctctactcagcgtgtatcaggaaacacttcacgaaggggcaaaagtggcttcaattctaagagtggacagcggggatcttccaagtctggaaagttgaaaggagatgaccttcaggccattaagaaggagctgacccagataaaacaaaaagtggattctctcctggaaaacctggaaaaaattgaaaaggaacagagcaaacaagcagtagagatgaagaatgataagtcagaagaggagcagagcagcagctccgtgaagaaagatgagactaatgtgaagatggagtctgaggggggtgcagatgactctgctgaggagggggacctactggatgatgatgataatgaagatcggggggatgaccagctggagttgatcaaggatgatgaaaaagaggctgaggaaggagaggatgacagagacagcgccaatggcgaggatgactcttaagcacatagtggggtttagaaatcttatcccattatttctttacctaggcgcttgtctaagatcaaatttttcaccagatcctctcccctagtatcttcagcacatgctcactgttctccccatccttgtccttcccatgttcattaattcatattgccccgcgcctagtcccattttcacttcctttgacgctcctagtagttttgttaagtcttaccctgtaatttttgcttttaattttgatacctctttatgacttaacaataaaaaggatgtatggtttttatcaactgtctccaaaataatctcttgttatgca

SEQ ID NO: 331609 - DNA, 1784 bp, Artificial Sequence
  derived and/or modified sequence
cattttgtgaagagacgaagactgagcggttgtggccgcgttgccgacctccagcagcagtcggcttctctacgcagaacccgggagtaggagactcagaatcgaatctcttctccctccccttcttgtgagatttttttgatcttcagctacattttcggctttgtgagaaaccttaccatcaaacacgatggccagcaacgttaccaacaagacagatcctcgctccatgaactcccgtgtattcattgggaatctcaacactcttgtggtcaagaaatctgatgtggaggcaatcttttcgaagtatggcaaaattgtgggctgctctgttcataagggctttgccttcgttcagtatgttaatgagagaaatgcccgggctgctgtagcaggagaggatggcagaatgattgctggccaggttttagatattaacctggctgcagagccaaaagtgaaccgaggaaaagcaggtgtgaaacgatctgcagcggagatgtacgggtcagtaacagaacacccttctccgtcccctctactcagctcctcttttgacttggactatgactttcaacgggactattatgataggatgtacagttacccagcacgtgtacctcctcctcctcctattgctcgggctgtagtgccctcgaaacgtcagcgtgtatcaggaaacacttcacgaaggggcaaaagtggcttcaattctaagagtggacagcggggatcttccaagtctggaaagttgaaaggagatgaccttcaggccattaagaaggagctgacccagataaaacaaaaagtggattctctcctggaaaacctggaaaaaattgaaaaggaacagagcaaacaagcagtagagatgaagaatgataagtcagaagaggagcagagcagcagctccgtgaagaaagatgagactaatgtgaagatggagtctgaggggggtgcagatgactctgctgaggagggggacctactggatgatgatgataatgaagatcggggggatgaccagctggagttgatcaaggatgatgaaaaagaggctgaggaaggagaggatgacagagacagcgccaatggcgaggatgactcttaagcacatagtggggtttagaaatcttatcccattatttctttacctaggcgcttgtctaagatcaaatttttcaccagatcctctcccctagtatcttcagcacatgctcactgttctccccatccttgtccttcccatgttcattaattcatattgccccgcgcctagtcccattttcacttcctttgacgctcctagtagttttgttaagtcttaccctgtaatttttgcttttaattttgatacctctttatgacttaacaataaaaaggatgtatggtttttatcaactgtctccaaaataatctcttgttatgcagggagtacagttcttttcattcatacataagttcagtagttgcttccctaactgcaaaggcaatctcatttagttgagtagctcttgaaagcagctttgagttagaagtatgtgtgttacaccctcacattagtgtgctgtgtggggcagttcaacacaaatgtaacaatgtatttttgtgaatgagagttggcatgtcaaatgcatcctctagaaaaataattagtgttatagtcttaagatttgttttctaaagttgatactgtgggttatttttgtgaacagcctgatgtttgggaccttttttcctcaaaataaacaagtccttattaaaccaggaatttggagaaaaaa

SEQ ID NO: 331610 - DNA, 789 bp, Artificial Sequence
  derived and/or modified sequence
acgaagactgagcggttgtggccgcgttgccgacctccagcagcagtcggcttctctacgcagaacccgggagtaggagactcagaatcgaatctcttctccctccccttcttgtgagatttttttgatcttcagctacagaggacacgttactaagagtggaattaatccgtattgtgagtacgtctgtctttactgttgcctccatcttgaatttaagtcctcatattttcggctttgtgagaaaccttaccatcaaacacgatggccagcaacgttaccaacaagacagatcctcgctccatgaactcccgtgtattcattgggaatctcaacactcttgtggtcaagaaatctgatgtggaggcaatcttttcgaagtatggcaaaattgtgggctgctctgttcataagggctttgccttcgttcagtatgttaatgagagaaatgcccgggctgctgtagcaggagaggatggcagaatgattgctggccaggttttagatattaacctggctgcagagccaaaagtgaaccgaggaaaagcaggtgtgaaacgatctgcagcggagatgtacgggtcagtaacagaacacccttctccgtcccctctactcagctcctcttttgacttggactatgactttcaacgggactattatgataggatgtacagttacccagcacgtgtacctcctcctcctcctattgctcgggctgtagtgccctcgaaacgtcagcgtgtatcaggaaacacttcacgaaggggcaaaagtggcttcaattct

SEQ ID NO: 331611 - DNA, 781 bp, Artificial Sequence
  derived and/or modified sequence
gaagactgagcggttgtggccgcgttgccgacctccagcagcagtcggcttctctacgcagaacccgggagtaggagactcagaatcgaatctcttctccctccccttcttggttacaaaacacttgaaatatataagttagtggaactttgcttgagtgagatttttttgatcttcagctacattttcggctttgtgagaaaccttaccatcaaacacgatggccagcaacgttaccaacaagacagatcctcgctccatgaactcccgtgtattcattgggaatctcaacactcttgtggtcaagaaatctgatgtggaggcaatcttttcgaagtatggcaaaattgtgggctgctctgttcataagggctttgccttcgttcagtatgttaatgagagaaatgcccgggctgctgtagcaggagaggatggcagaatgattgctggccaggttttagatattaacctggctgcagagccaaaagtgaaccgaggaaaagcaggtgtgaaacgatctgcagcggagatgtacgggtcagtaacagaacacccttctccgtcccctctactcagctcctcttttgacttggactatgactttcaacgggactattatgataggatgtacagttacccagcacgtgtacctcctcctcctcctattgctcgggctgtagtgccctcgaaacgtcagcgtgtatcaggaaacacttcacgaaggggcaaaagtggcttcaattctaagagtggacagcggggatcttccaagtctggaaag

SEQ ID NO: 331612 - DNA, 1371 bp, Artificial Sequence
  derived and/or modified sequence
cattttgtgaagagacgaagactgagcggttgtggccgcgttgccgacctccagcagcagtcggcttctctacgcagaacccgggagtaggagactcagaatcgaatctcttctccctccccttcttgttttcggctttgtgagaaaccttaccatcaaacacgatggccagcaacgttaccaacaagacagatcctcgctccatgaactcccgtgtattcattgggaatctcaacactcttgtggtcaagaaatctgatgtggaggcaatcttttcgaagtatggcaaaattgtgggctgctctgttcataagggctttgccttcgttcagtatgttaatgagagaaatgcccgggctgctgtagcaggagaggatggcagaatgattgctggccaggttttagatattaacctggctgcagagccaaaagtgaaccgaggaaaagcaggtgtgaaacgatctgcagcggagatgtacgggtcagtaacagaacacccttctccgtcccctctactcagctcctcttttgacttggactatgactttcaacgggactattatgataggatgtacagttacccagcacgtgtacctcctcctcctcctattgctcgggctgtagtgccctcgaaacgtcagcgtgtatcaggaaacacttcacgaaggggcaaaagtggcttcaattctaagagtggacagcggggatcttccaagtctggaaagttgaaaggagatgaccttcaggccattaagaaggagctgacccagataaaacaaaaagtggattctctcctggaaaacctggaaaaaattgaaaaggaacagagcaaacaagcagtagagatgaagaatgataagtcagaagaggagcagagcagcagctccgtgaagaaagatgagactaatgtgaagatggagtctgaggggggtgcagatgactctgctgaggagggggacctactggatgatgatgataatgaagatcggggggatgaccagctggagttgatcaaggatgatgaaaaagaggctgaggaaggagaggatgacagagacagcgccaatggcgaggatgactcttaagcacatagtggggtttagaaatcttatcccattatttctttacctaggcgcttgtctaagatcaaatttttcaccagatcctctcccctagtatcttcagcacatgctcactgttctccccatccttgtccttcccatgttcattaattcatattgccccgcgcctagtcccattttcacttcctttgacgctcctagtagttttgttaagtcttaccctgtaatttttgcttttaattttgatacctctttatgacttaacaataaaaaggatgtatggttttta

SEQ ID NO: 331613 - DNA, 1308 bp, Artificial Sequence
  derived and/or modified sequence
attttgtgaagagacgaagactgagcggttgtggccgcgttgccgacctccagcagcagtcggcttctctacgcagaacccgggagtaggagactcagaatcgaatctcttctccctccccttcttgtgagatttttttgatcttcagctacattttcggctttgtgagaaaccttaccatcaaacacgatggccagcaacgttaccaacaagacagatcctcgctccatgaactcccgtgtattcattgggaatctcaacactcttgtggtcaagaaatctgatgtggaggcaatcttttcgaagtatggcaaaattgtgggctgctctgttcataagggctttgccttcgttcagtatgttaatgagagaaatgcccgggctgctgtagcaggagaggatggcagaatgattgctggccaggttttagatattaacctggctgcagagccaaaagtgaaccgaggaaaagcaggtgtgaaacgatctgcagcggagatgtacgggtcagtaacagaacacccttctccgtcccctctactcagcgtgtatcaggaaacacttcacgaaggggcaaaagtggcttcaattctaagagtggacagcggggatcttccaagtctggaaagttgaaaggagatgaccttcaggccattaagaaggagctgacccagataaaacaaaaagtggattctctcctggaaaacctggaaaaaattgaaaaggaacagagcaaacaagcagtagagatgaagaatgataagtcagaagaggagcagagcagcagctccgtgaagaaagatgagactaatgtgaagatggagtctgaggggggtgcagatgactctgctgaggagggggacctactggatgatgatgataatgaagatcggggggatgaccagctggagttgatcaaggatgatgaaaaagaggctgaggaaggagaggatgacagagacagcgccaatggcgaggatgactcttaagcacatagtggggtttagaaatcttatcccattatttctttacctaggcgcttgtctaagatcaaatttttcaccagatcctctcccctagtatcttcagcacatgctcactgttctccccatccttgtccttcccatgttcattaattcatattgccccgcgcctagtcccattttcacttcctttgacgctcctagtagttttgttaagtcttaccctgtaatttttgcttttaattttgatacctctttatgacttaacaataaaaaggatgtatggtttttatcaactgtctccaaaataatctcttgttatgca

SEQ ID NO: 331614 - DNA, 591 bp, Artificial Sequence
  derived and/or modified sequence
atggccagcaacgtgaccaacaagaccgaccccctgttcagcagcagcttcgacctggactacgacttccagagagactactacgacagaatgtacagctaccccgccagagtgcccccccccccccccatcgccagagccgtggtgcccagcaagagacagagagtgagcggcaacaccagcagaagaggcaagagcggcttcaacagcaagagcggccagagaggcagcagcaagagcggcaagctgaagggcgacgacctgcaggccatcaagaaggagctgacccagatcaagcagaaggtggacagcctgctggagaacctggagaagatcgagaaggagcagagcaagcaggccgtggagatgaagaacgacaagagcgaggaggagcagagcagcagcagcgtgaagaaggacgagaccaacgtgaagatggagagcgagggcggcgccgacgacagcgccgaggagggcgacctgctggacgacgacgacaacgaggacagaggcgacgaccaggtgaagaccaccggcaaggagagaaagagatggtggagaggcgcccagggccacatggagtgcctgtag

SEQ ID NO: 331615 - protein, 293 aa, Artificial Sequence
  derived and/or modified sequence
MASNVTNKTDPRSMNSRVFIGNLNTLVVKKSDVEAIFSKYGKIVGCSVHKGFAFVQYVNERNARAAVAGEDGRMIAGQVLDINLAAEPKVNRGKAGVKRSAAEMYGSSFDLDYDFQRDYYDRMYSYPARVPPPPPIARAVVPSKRQRVSGNTSRRGKSGFNSKSGQRGSSKSGKLKGDDLQAIKKELTQIKQKVDSLLENLEKIEKEQSKQAVEMKNDKSEEEQSSSSVKKDETNVKMESEGGADDSAEEGDLLDDDDNEDRGDDQLELIKDDEKEAEEGEDDRDSANGEDDS

SEQ ID NO: 331616 - protein, 262 aa, Artificial Sequence
  derived and/or modified sequence
MASNVTNKTDPRSMNSRVFIGNLNTLVVKKSDVEAIFSKYGKIVGCSVHKGFAFVQYVNERNARAAVAGEDGRMIAGQVLDINLAAEPKVNRGKAGVKRSAAEMYGSSFDLDYDFQRDYYDRMYSYPARVPPPPPIARAVVPSKRQRVSGNTSRRGKSGFNSKSGQRGSSKSGKLKGDDLQAIKKELTQIKQKVDSLLENLEKIEKEQSKQAVEMKNDKSEEEQSSSSVKKDETNVKMESEGGADDSAEEGDLLDDDDNEDR

SEQ ID NO: 331617 - protein, 126 aa, Artificial Sequence
  derived and/or modified sequence
MASNVTNKTDPRSMNSRVFIGNLNTLVVKKSDVEAIFSKYGKIVGCSVHKGFAFVQYVNERNARAAVAGEDGRMIAGQVLDINLAAEPKVNRGKAGVKRSAAEMYGSSFDLDYDFQRDYYDRMYSY

SEQ ID NO: 331618 - protein, 117 aa, Artificial Sequence
  derived and/or modified sequence
MASNVTNKTDPRSMNSRVFIGNLNTLVVKKSDVEAIFSKYGKIVGCSVHKGFAFVQYVNERNARAAVAGEDGRMIAGQVLDINLAAEPKVNRGKAGVKRSAAEMYGSSFDLDYDFQR

SEQ ID NO: 331619 - protein, 250 aa, Artificial Sequence
  derived and/or modified sequence
MASNVTNKTDPRSMNSRVFIGNLNTLVVKKSDVEAIFSKYGKIVGCSVHKGFAFVQYVNERNARAAVAGEDGRMIAGQVLDINLAAEPKVNRGKAGVKRSAAEMYGSSFDLDYDFQRDYYDRMYSYPARVPPPPPIARAIKKELTQIKQKVDSLLENLEKIEKEQSKQAVEMKNDKSEEEQSSSSVKKDETNVKMESEGGADDSAEEGDLLDDDDNEDRGDDQLELIKDDEKEAEEGEDDRDSANGEDDS

SEQ ID NO: 331620 - protein, 121 aa, Artificial Sequence
  derived and/or modified sequence
MASNVTNKTDPRSMNSRVFIGNLNTLVVKKSDVEAIFSKYGKIVGCSVHKGFAFVQYVNERNARAAVAGEDGRMIAGQVLDINLAAEPKVNRGKAGVKRSAAEMYGSSFDLDYDFQRDYYD

SEQ ID NO: 331621 - DNA, 309 bp, Artificial Sequence
  derived and/or modified sequence
atggcttcaaacgtcaccaacaaaaccgaccctaggtccatgaacagtcgagtcttcataggaaacctcaacaccttagtcgttaagaagagcgacgtagaagccattttttccaagaaggatgagacaaatgtgaagatggagagcgaggggggcgcggacgacagtgccgaagagggcgatctcctggatgacgacgacaatgaggacaggggtgatgatcagttagagctaatcaaggacgacgaaaaggaagccgaagaaggtgaagacgatcgcgatagtgcaaatggagaagacgatagttag

SEQ ID NO: 331622 - DNA, 882 bp, Artificial Sequence
  derived and/or modified sequence
atggctagtaacgtaacaaataagacggatcctagatctatgaattcaagggtgttcatcgggaacctgaataccttagtggtcaagaagagcgacgtggaggcaatcttttccaagtacgggaaaatcgtgggctgtagcgtgcacaaaggctttgcattcgtccaatacgtgaacgaacggaacgcccgtgccgctgtggcaggtgaagatggtcggatgatcgctgggcaggtactggacataaacttagcggccgaaccaaaagtgaacagagggaaagccggcgtgaagcgatctgctgccgaaatgtatgggtcctcgttcgacctagattacgacttccaacgggactactatgaccgcatgtatagttaccctgctagagtccctccccccccgcccattgccagagccgtggtgcccagcaagagacaacgagttagcggcaacacgtccaggaggggaaagtcaggattcaactccaagtccggccagagaggatcttcaaagagtggcaagttgaagggagacgatctccaagcgatcaaaaaggaactgacccaaatcaagcagaaagtggattccctcctggaaaacctggaaaaaatcgaaaaagagcagtctaagcaggccgtggaaatgaaaaatgacaaatctgaagaggaacagtcttcctcatctgttaaaaaagacgaaacaaacgtgaaaatggagagcgagggcggagctgacgacagcgccgaagagggggatctgttggacgatgacgataatgaggacagaggagacgatcagctggaactaataaaagacgacgaaaaggaggctgaggagggcgaggacgaccgtgactcggcaaatggagaggacgattcctag

SEQ ID NO: 331623 - DNA, 882 bp, Artificial Sequence
  derived and/or modified sequence
atggcttccaacgtcacaaataaaacagacccccggtctatgaacagtagggtgtttattggcaacttgaacacactcgtggtgaagaagtctgatgtggaagcgattttcagcaagtacggcaaaattgtgggctgctccgtccataaaggatttgccttcgtgcagtatgtgaacgaaagaaacgctagggcagccgttgccggggaagacggtcggatgatcgccggccaggtgcttgacatcaatctagcggcagagcccaaagttaaccgaggaaaggccggtgttaagagatctgcggccgaaatgtacggatcttcattcgatctggactatgacttccaacgggattattacgaccggatgtacagttatcctgccagagtgcctcctccaccacccatcgcgagggccgtggtgccgtcaaaacgccagagagtcagcggcaacacttccagacgggggaagtccggcttcaactcaaagtctggccaaagagggtctagcaagagcggcaaactcaaaggagatgatctgcaggcaataaaaaaggagctgacccagataaagcaaaaggtggacagtctcctggagaacctcgagaaaattgaaaaagagcagtcgaaacaggcggtggagatgaaaaacgacaaaagtgaggaagaacaatcctcctcatccgtcaagaaagacgaaactaatgtcaaaatggaatccgagggtggcgccgacgacagcgctgaggaaggcgatctgctcgacgacgatgacaatgaggaccgcggagacgatcaactcgaactgataaaggatgacgaaaaggaggctgaggaaggcgaggatgaccgggatagcgctaatggggaagatgactcttag

SEQ ID NO: 331624 - DNA, 882 bp, Artificial Sequence
  derived and/or modified sequence
atggcctccaacgtgacaaataaaacggatccaagaagcatgaactctagagtgttcattggcaatttgaatacactagtggtcaaaaaaagcgacgtcgaagccatattctcaaagtatgggaaaatcgtggggtgttctgtgcataagggtttcgcctttgtccagtatgttaacgaaagaaacgccagagctgcggtcgctggggaggatggacgaatgattgccggacaagtactcgacataaacttggcagccgaacccaaggtgaatcgaggcaaggccggggtgaagcgttcggcagccgaaatgtatggctcaagtttcgatctggattacgatttccaacgggactactacgataggatgtacagctaccctgctcgcgtgcctcctcctcccccaatcgcccgcgccgtcgttccaagtaagaggcagcgcgtttcgggaaatacttccaggcgaggaaaatcagggttcaactcaaaatccggccaaaggggctccagcaaatctggcaagctcaaaggagacgacctgcaggccattaagaaggagctgacacagattaaacaaaaagtggactctctactggagaatctggagaagatcgagaaggagcaaagcaaacaggccgtggagatgaagaatgacaagagcgaggaggagcaatcgagtagcagcgtgaagaaggatgagactaacgttaagatggaatccgaagggggagcagatgactcagccgaggagggggacctcctcgatgacgacgacaatgaagaccgcggcgacgatcaactggaactgataaaagacgacgaaaaagaggccgaggaaggagaagatgaccgggatagcgctaacggggaggatgattcatag

SEQ ID NO: 331625 - DNA, 789 bp, Artificial Sequence
  derived and/or modified sequence
atggctagcaacgttaccaataagaccgacccacgcagcatgaactcaagggtattcatcgggaacctgaataccctggtcgtgaagaagagcgacgtggaagccatcttcagtaaatatggtaaaatcgtaggctgttctgtacacaagggattcgcctttgtgcagtatgtgaatgagcggaacgctagggcagccgtagcaggagaagatggaaggatgatagcagggcaggtgctggacattaacttagctgcagagcccaaggtgaacaggggtaaggcaggcgtcaagcgcagtgcagccgagatgtacggcagctcctttgacttagactacgacttccagagagattactatgacaggatgtattcctaccctgccagggtaccaccaccaccgcctattgcaagggccgttgttccctccaaaaggcagcgggtgtctggcaatacctcgcgaagaggaaaatccggcttcaacagcaaatccggacagaggggaagcagcaagtctggcaaactaaaaggggacgatctgcaggcgatcaaaaaggagctgacacagataaagcaaaaggtcgattctctcctggagaacctggaaaaaatagagaaggaacaatcaaagcaggccgtagaaatgaaaaatgacaagtcagaagaggagcagagctcctcttccgtgaagaaggatgaaactaacgttaagatggaaagtgagggcggggctgacgattcagcggaggaaggtgacctcttggatgatgacgacaacgaggacagatag

SEQ ID NO: 331626 - DNA, 381 bp, Artificial Sequence
  derived and/or modified sequence
atggcctcaaacgtgacaaataaaactgaccctaggagcatgaactcaagagtctttattgggaatttaaataccctggtggtgaagaaatccgacgtcgaggctatattttctaagtacgggaagattgtcgggtgttcagtgcacaagggatttgcatttgttcagtacgttaatgaacgaaatgccagggccgctgtagccggtgaagacggcagaatgatcgccggacaagtactagacattaatttagcagccgagccaaaggtgaacagaggtaaggccggtgtgaaaagatcagcagcagagatgtacggaagctcgtttgacctcgattatgacttccagcgcgactactacgaccgcatgtattcctactag

SEQ ID NO: 331627 - DNA, 882 bp, Artificial Sequence
  derived and/or modified sequence
atggcctcgaacgtgactaacaaaactgatccacgctcaatgaatagtagggtgttcatcgggaaccttaatacacttgtggtgaaaaaatctgatgtggaggcgatctttagtaagtacggcaaaatagtagggtgtagcgtgcataagggctttgctttcgtccagtacgtgaatgagagaaatgcgcgagcggcggtagcgggtgaggatggccgtatgattgctggacaggtgctggatattaatttagcagccgagccgaaagtaaataggggaaaggctggcgtcaagagatcagctgccgaaatgtacggtagttcctttgacttggactacgacttccagcgcgactattacgacagaatgtactcttatcccgctcgcgtgcctcctcccccgcctatcgctagagctgtagtaccttcaaaaagacagagggtgtccggaaacactagcaggcggggcaagagcggatttaattcaaagagtgggcaaaggggctccagtaaaagtggtaaactgaaaggcgatgacctgcaggctatcaagaaggaactgactcagattaagcaaaaagttgactctttgctcgagaacttagaaaaaatcgagaaggagcagagcaagcaagcagtggaaatgaagaacgataagagtgaagaggagcaaagtagttcatctgtcaaaaaggacgagacaaatgtgaagatggaatccgaaggcggagctgatgacagcgccgaggagggagacttgctcgatgacgacgacaacgaagatcgcggagacgaccagttggaacttatcaaagacgatgaaaaggaggcagaggaaggagaggatgatcgggacagtgccaacggtgaagacgatagctag

SEQ ID NO: 331628 - DNA, 354 bp, Artificial Sequence
  derived and/or modified sequence
atggccagcaacgtgactaataagactgacccacgcagcatgaactctcgagtttttataggtaatctcaacactctggtagtgaaaaagtctgatgtggaggccattttctcaaaatacgggaagatcgtcggctgctcggttcataaaggattcgcctttgttcaatatgtgaatgagagaaacgcacgcgccgccgtcgcgggagaggacgggcggatgatcgccggccaggtgctggatatcaacctagccgccgaacccaaagttaataggggcaaagcaggcgtgaagcggagtgccgccgagatgtatgggtcctcttttgacctagactatgattttcagcgttag

SEQ ID NO: 331629 - DNA, 753 bp, Artificial Sequence
  derived and/or modified sequence
atggcatcaaacgtgacaaacaagaccgacccacggtccatgaactcgagagtgttcatcgggaacctgaacaccttggtggtaaaaaagtccgacgtcgaagccatcttctccaaatatgggaaaatcgtgggctgcagcgtgcacaagggttttgctttcgtgcagtatgtgaatgagcggaacgcccgagccgccgtggccggagaagacggcagaatgattgcaggccaagtcctggacatcaacctcgccgctgagcccaaggtcaaccgaggcaaagcaggggtgaagcgcagtgccgccgaaatgtatggctcaagttttgacctggattatgattttcagcgagactattatgaccgaatgtattcatatcccgcacgggtgcctccaccgccgccaattgcccgcgctatcaagaaggaattgacccagatcaagcagaaggttgacagcctgttggagaatctagagaaaatcgagaaagagcagtcaaaacaggctgtggagatgaagaatgacaaatcagaggaggaacagagctctagtagtgttaagaaggatgagacaaacgtcaagatggaaagtgagggtggggcggatgacagcgctgaggagggggacctactcgacgatgatgataacgaagacaggggcgacgaccagctcgaattgatcaaagatgacgagaaggaagctgaggaaggcgaagatgacagggattccgctaacggagaggatgactcctag

SEQ ID NO: 331630 - DNA, 366 bp, Artificial Sequence
  derived and/or modified sequence
atggctagtaacgtcacgaataagaccgacccccggtccatgaattcgcgagttttcatcggaaacctcaacactctggtcgtcaagaagtccgacgtcgaagctatattctctaagtatggaaaaattgtcggatgttctgtacacaagggttttgcatttgtgcagtatgtgaatgaacgcaatgccagagctgctgtcgcaggggaggatgggagaatgattgccggccaagtccttgacattaatctggccgccgagcctaaagttaaccgcggcaaggccggtgtgaaaagaagtgcggccgaaatgtatggatctagctttgatcttgactatgactttcagcgcgactactacgattag

SEQ ID NO: 331631 - DNA, 681 bp, Artificial Sequence
  derived and/or modified sequence
atggcttcaaacgtgaccaacaaaactgatccccgctcaatgaactcccgcgtcttcattggaaatctgaataccctggtcgtcaaaaaaagcgacgtggaggcaatcttttccaattcaagcttcgatttggactacgattttcaacgggattactacgacagaatgtattcgtaccctgccagggtgccacctcctccccctatcgcgcgtgcggtggtcccctccaagcgtcagcgagtatccggaaacacctccaggcgcggcaagagcggcttcaactccaagtccggccagaggggtagttccaagagcggtaaactgaagggtgacgacttacaggctattaaaaaggagctgacccagattaaacagaaggtggacagccttttggaaaacctcgagaaaatagaaaaagagcagtccaagcaggccgtggagatgaagaacgataagtcagaagaggaacagtcttcctcatccgtcaagaaggacgagaccaatgtgaaaatggagtcggaaggcggcgccgacgactcagcagaggagggggatttgttggacgacgatgataatgaggacaggggggacgatcagttagaacttattaaggacgacgaaaaagaggccgaagagggagaagatgatagagactccgccaacggtgaggatgactcctag

SEQ ID NO: 331632 - DNA, 882 bp, Artificial Sequence
  derived and/or modified sequence
atggcaagtaatgtgacgaacaagacagacccccgctctatgaattcccgggtgttcatcggaaacttaaacacccttgtggtgaagaagtccgacgtggaagcgatctttagcaagtacgggaagatcgtgggatgcagcgttcacaaaggattcgctttcgtgcagtacgtgaatgagaggaacgcccgggcggctgtggcgggagaggacgggcgcatgattgctggtcaagtgctggacataaatttggccgctgagcctaaggttaaccgcggcaaagccggtgtaaagcggagcgctgcagagatgtatggcagctccttcgacctggattacgactttcagcgggattactacgacagaatgtattcttacccagcccgcgtaccgccaccaccaccaatagcacgagccgtggttccatctaagcggcaaagagtgagtggaaacacatcgcggagaggcaaaagtggctttaatagcaaatcggggcagaggggttcctctaaaagcggtaaactgaaaggcgacgatctgcaggccataaaaaaagaactgacacaaataaaacagaaggtggatagcttgcttgagaacctggagaaaatagaaaaggagcagagcaagcaggcggtagaaatgaaaaatgacaagtcagaagaggagcagtctagttcctcagtgaagaaggatgagaccaatgttaaaatggaaagtgaagggggtgctgatgattcggcagaagaaggtgatcttctcgacgacgatgacaatgaggatcgcggagacgatcagttggagctcattaaagatgacgagaaagaagctgaggagggcgaggatgatagggacagcgccaatggagaagatgattcttag

SEQ ID NO: 331633 - DNA, 201 bp, Artificial Sequence
  derived and/or modified sequence
atggccagcaacgtgaccaacaaaactgacccgcgatccatgaattcacgcgttttcatcggcaatttaaatactctggtggtgaagaagtcagatgtggaggcgatcttttccaaatatggcaaaatcgtcgggtgtagcgtgcataaaggctttgcctttgtgcaatacgttaacgagagaaacgcccgagcggcctag

SEQ ID NO: 331634 - DNA, 165 bp, Artificial Sequence
  derived and/or modified sequence
atggctagcaacgtgacaaataagaccgatccacggtctatgaactctagagtattcataggaaacctgaacacgctagttgttaagaagtccgacgtggaggcgatctttagcaaatacggcaagatagtaggctgtagcgtgcataaaggttttgccttttag

SEQ ID NO: 331635 - DNA, 309 bp, Artificial Sequence
  derived and/or modified sequence
atggccagcaatgtgaccaacaagacagaccccaggtccatgaacagcagggtcttcatcggcaacctgaacaccctggtggtgaagaagagtgatgtggaggccatcttcagcaagaaggatgagaccaacgtgaagatggagagcgagggcggcgcagatgacagcgctgaggagggggacctgctggatgatgatgacaatgaagatagaggagatgaccagctggagctgatcaaggatgatgagaaggaggccgaggagggggaggatgaccgggacagcgccaatggagaagatgacagctag

SEQ ID NO: 331636 - DNA, 882 bp, Artificial Sequence
  derived and/or modified sequence
atggccagcaatgtgaccaacaagacagaccccaggtccatgaacagcagggtcttcatcggcaacctgaacaccctggtggtgaagaagagtgatgtggaggccatcttcagcaaatatggcaagatcgtgggctgcagcgtgcacaagggctttgcctttgtgcagtatgtgaatgaaagaaatgcccgggctgctgtggccggggaggatggccgcatgattgctggccaggtgctggacatcaacctggccgctgagcccaaggtgaacagaggcaaggccggcgtgaagaggtctgctgctgagatgtatggcagcagctttgacctggactatgacttccagagggactactatgacaggatgtacagctacccagcccgggtgcccccacctccacccatcgcccgggctgtggtgcccagcaagaggcagagggtgtctggcaacaccagccggcggggcaagagcggcttcaacagcaagagcggccagaggggcagcagcaagagcggcaagctgaagggagatgacctgcaggccatcaagaaggagctgacccagatcaagcagaaggtggacagcctgctggagaacctggagaagattgagaaggagcagagcaagcaggccgtggagatgaagaatgacaagtctgaggaggagcagagcagcagctctgtgaagaaggatgagaccaacgtgaagatggagagcgagggcggcgcagatgattctgctgaggagggggacctgctggatgatgatgacaatgaagatagaggagatgaccagctggagctgatcaaggatgatgagaaggaggccgaggagggagaagatgaccgggacagcgccaacggggaggatgacagctag

SEQ ID NO: 331637 - DNA, 789 bp, Artificial Sequence
  derived and/or modified sequence
atggccagcaatgtgaccaacaagacagaccccaggtccatgaacagcagggtcttcatcggcaacctgaacaccctggtggtgaagaagagtgatgtggaggccatcttcagcaaatatggcaagatcgtgggctgcagcgtgcacaagggctttgcctttgtgcagtatgtgaatgaaagaaatgcccgggctgctgtggccggggaggatggccgcatgattgctggccaggtgctggacatcaacctggccgctgagcccaaggtgaacagaggcaaggccggcgtgaagaggtctgctgctgagatgtatggcagcagctttgacctggactatgacttccagagggactactatgacaggatgtacagctacccagcccgggtgcccccacctccacccatcgcccgggctgtggtgcccagcaagaggcagagggtgtctggcaacaccagccggcggggcaagagcggcttcaacagcaagagcggccagaggggcagcagcaagagcggcaagctgaagggagatgacctgcaggccatcaagaaggagctgacccagatcaagcagaaggtggacagcctgctggagaacctggagaagattgagaaggagcagagcaagcaggccgtggagatgaagaatgacaagtctgaggaggagcagagcagcagctctgtgaagaaggatgagaccaacgtgaagatggagagcgagggcggcgcagatgattctgctgaggagggggacctgctggatgatgatgacaatgaagatagatag

SEQ ID NO: 331638 - DNA, 381 bp, Artificial Sequence
  derived and/or modified sequence
atggccagcaatgtgaccaacaagacagaccccaggtccatgaacagcagggtcttcatcggcaacctgaacaccctggtggtgaagaagagtgatgtggaggccatcttcagcaaatatggcaagatcgtgggctgcagcgtgcacaagggctttgcctttgtgcagtatgtgaatgaaagaaatgcccgggctgctgtggccggggaggatggccgcatgattgctggccaggtgctggacatcaacctggccgctgagcccaaggtgaacagaggcaaggccggcgtgaagaggtctgctgctgagatgtatggcagcagctttgacctggactatgacttccagagggactactatgacaggatgtacagctactag

SEQ ID NO: 331639 - DNA, 354 bp, Artificial Sequence
  derived and/or modified sequence
atggccagcaatgtgaccaacaagacagaccccaggtccatgaacagcagggtcttcatcggcaacctgaacaccctggtggtgaagaagagtgatgtggaggccatcttcagcaaatatggcaagatcgtgggctgcagcgtgcacaagggctttgcctttgtgcagtatgtgaatgaaagaaatgcccgggctgctgtggccggggaggatggccgcatgattgctggccaggtgctggacatcaacctggccgctgagcccaaggtgaacagaggcaaggccggcgtgaagaggtctgctgctgagatgtatggcagcagctttgacctggactatgacttccagaggtag

SEQ ID NO: 331640 - DNA, 753 bp, Artificial Sequence
  derived and/or modified sequence
atggccagcaatgtgaccaacaagacagaccccaggtccatgaacagcagggtcttcatcggcaacctgaacaccctggtggtgaagaagagtgatgtggaggccatcttcagcaaatatggcaagatcgtgggctgcagcgtgcacaagggctttgcctttgtgcagtatgtgaatgaaagaaatgcccgggctgctgtggccggggaggatggccgcatgattgctggccaggtgctggacatcaacctggccgctgagcccaaggtgaacagaggcaaggccggcgtgaagaggtctgctgctgagatgtatggcagcagctttgacctggactatgacttccagagggactactatgacaggatgtacagctacccagcccgggtgcccccacctccacccatcgcccgggccatcaagaaggagctgacccagatcaagcagaaggtggacagcctgctggagaacctggagaagattgagaaggagcagagcaagcaggccgtggagatgaagaatgacaagtctgaggaggagcagagcagcagctctgtgaagaaggatgagaccaacgtgaagatggagagcgagggcggcgcagatgacagcgctgaggagggggacctgctggatgatgatgacaatgaagatagaggagatgaccagctggagctgatcaaggatgatgagaaggaggccgaggagggggaggatgaccgggacagcgccaatggagaagatgacagctag

SEQ ID NO: 331641 - DNA, 366 bp, Artificial Sequence
  derived and/or modified sequence
atggccagcaatgtgaccaacaagacagaccccaggtccatgaacagcagggtcttcatcggcaacctgaacaccctggtggtgaagaagagtgatgtggaggccatcttcagcaaatatggcaagatcgtgggctgcagcgtgcacaagggctttgcctttgtgcagtatgtgaatgaaagaaatgcccgggctgctgtggccggggaggatggccgcatgattgctggccaggtgctggacatcaacctggccgctgagcccaaggtgaacagaggcaaggccggcgtgaagaggtctgctgctgagatgtatggcagcagctttgacctggactatgacttccagagggactactatgactag

SEQ ID NO: 331642 - DNA, 681 bp, Artificial Sequence
  derived and/or modified sequence
atggccagcaatgtgaccaacaagacagaccccaggtccatgaacagcagggtcttcatcggcaacctgaacaccctggtggtgaagaagagtgatgtggaggccatcttcagcaacagcagctttgacctggactatgacttccagagggactactatgacaggatgtacagctacccagcccgggtgcccccacctccacccatcgcccgggctgtggtgcccagcaagaggcagagggtgtctggcaacaccagcagaagaggcaagagcggcttcaacagcaagagcggccagaggggcagcagcaagagcggcaagctgaagggagatgacctgcaggccatcaagaaggagctgacccagatcaagcagaaggtggacagcctgctggagaacctggagaagattgagaaggagcagagcaagcaggccgtggagatgaagaatgacaagtctgaggaggagcagagcagcagctctgtgaagaaggatgagaccaacgtgaagatggagagcgagggcggcgcagatgacagcgctgaggagggggacctgctggatgatgatgacaatgaagatagaggagatgaccagctggagctgatcaaggatgatgagaaggaggccgaggagggggaggatgaccgggacagcgccaatggagaagatgacagctag

SEQ ID NO: 331643 - DNA, 201 bp, Artificial Sequence
  derived and/or modified sequence
atggccagcaatgtgaccaacaagacagaccccaggtccatgaacagcagggtcttcatcggcaacctgaacaccctggtggtgaagaagagtgatgtggaggccatcttcagcaaatatggcaagatcgtgggctgcagcgtgcacaagggctttgcctttgtgcagtatgtgaatgaaagaaatgcccgggccgcctag

SEQ ID NO: 331644 - DNA, 165 bp, Artificial Sequence
  derived and/or modified sequence
atggccagcaatgtgaccaacaagacagaccccaggtccatgaacagcagggtcttcatcggcaacctgaacaccctggtggtgaagaagagtgatgtggaggccatcttcagcaaatatggcaagatcgtgggctgcagcgtgcacaagggctttgccttctag

SEQ ID NO: 331645 - DNA, 309 bp, Artificial Sequence
  derived and/or modified sequence
atggccagcaacgtgaccaacaagaccgacccccggagcatgaactcacgtgtttttatagggaacctgaatacccttgtggttaaaaaatcagatgtggaagcaattttttcaaaaaaggatgagacaaacgtaaagatggagtctgaaggcggtgccgacgattcagccgaagaaggggatctgctcgacgatgacgacaatgaggatcggggtgacgatcaactcgaactgatcaaggacgatgagaaggaggccgaggagggcgaagatgacagagactcagcaaacggtgaggatgattcatag

SEQ ID NO: 331646 - DNA, 882 bp, Artificial Sequence
  derived and/or modified sequence
atggccagcaacgtgaccaacaagaccgacccccggagcatgaactcaagagtgttcatagggaatctgaacacactggtggtcaagaaaagcgatgtggaagccatcttctcaaagtacggtaagattgtcggctgctccgtgcataaagggttcgcctttgtgcagtacgtgaatgaacgaaacgccagagctgcagtcgcaggagaggacgggcgcatgattgctggacaggttctagatattaacttggccgctgagcccaaggtcaatcgaggcaaggccggcgtgaagcgaagcgctgccgaaatgtacgggtcgagcttcgacctagattatgactttcaacgcgactactatgaccgcatgtacagctatcctgccagagttcccccgcccccgcctatcgccagagccgtagtacccagcaagagacagagggtctctgggaataccagccgccgcggaaagtctgggttcaatagcaaatcagggcagcgaggctcgtctaaatctggtaagttgaagggtgatgacctccaagcgattaaaaaagagctcacgcaaatcaagcagaaagtggattccctcctagaaaatctcgagaagattgagaaggagcagtcaaaacaggccgtagaaatgaaaaatgataaatcagaggaagaacaaagctcaagcagcgtcaaaaaggacgagacaaacgtgaaaatggaatcggagggcggcgctgatgactccgctgaagaaggtgacctgcttgacgatgacgacaatgaggatcggggagatgatcagctcgaactgattaaggatgatgaaaaagaggcagaggagggcgaagacgatcgagatagcgccaatggagaagatgattcctag

SEQ ID NO: 331647 - DNA, 882 bp, Artificial Sequence
  derived and/or modified sequence
atggccagcaacgtgaccaacaagaccgacccccggagcatgaactcaagggtgttcattgggaacctcaatacgcttgtggtgaaaaagagtgacgtggaagccattttttccaagtacggaaagattgtgggctgcagtgttcataaagggttcgctttcgtgcagtatgtgaatgagaggaacgcccgggctgccgttgctggtgaagacggtcggatgattgccggtcaggtgctcgatattaatctggctgccgagcctaaagtgaaccgaggtaaggccggggtgaaacggtcagcagccgagatgtacggatcctccttcgatttagattatgactttcagcgcgattactatgatcggatgtactcctacccggctagagtcccaccacctcccccaatcgcaagggccgtcgtcccatccaagagacagagggtgagcggtaataccagcagaagaggaaaatctggattcaatagtaagagcggtcagcggggcagttcaaaatcgggcaagttgaagggcgatgatttacaggccatcaagaaggagctcacccaaatcaaacagaaggtggactcattgctggagaacctggagaagatcgagaaggaacagtcaaagcaggccgtcgagatgaaaaatgacaaaagcgaagaagaacagtccagcagcagtgtgaagaaggatgagacgaacgtgaagatggaaagcgaaggcggtgccgacgactccgcggaagagggcgatctactcgacgatgacgacaacgaggataggggcgatgaccagttggagctgattaaggacgacgaaaaggaggcagaggaaggggaagacgaccgtgactccgctaatggtgaggacgactcttag

SEQ ID NO: 331648 - DNA, 882 bp, Artificial Sequence
  derived and/or modified sequence
atggccagcaacgtgaccaacaagaccgacccccggagcatgaacagcagagtgttcatcggaaatctgaatacactggttgtcaaaaaatctgatgtggaagccatattctccaagtatggcaaaatagttggctgtagtgtccacaaggggtttgcattcgtgcagtacgtgaatgagcgtaatgcgcgcgccgccgttgcaggagaggacggacgaatgattgccggacaagtgctcgacattaatctggccgccgaacccaaagtgaatcgggggaaggcaggcgtaaagagatcggccgctgagatgtacggtagcagcttcgatctggattacgacttccagagagactattatgaccggatgtattcctaccctgcccgggtgcccccaccaccacccatcgcgagagccgtggtgcctagcaagcgccagcgggtctcgggcaatactagccgccgggggaagtctggcttcaatagtaagtcgggccagcgtggatcctcaaaatcaggaaagctgaagggcgacgacctacaggcgattaaaaaggagctgacgcagataaaacaaaaggtggactccctgttggagaatctggaaaaaatagagaaagagcagtcaaagcaggccgtagagatgaaaaacgataaatccgaggaggaacagagttccagtagcgtgaagaaggacgagaccaacgttaagatggaatctgaaggtggcgccgatgattcagccgaagaaggagacctcttagacgacgacgataacgaggatagaggagatgaccaactggagctcattaaagacgacgagaaggaggccgaggagggcgaagacgaccgcgactccgcaaatggtgaggatgattcctag

SEQ ID NO: 331649 - DNA, 789 bp, Artificial Sequence
  derived and/or modified sequence
atggccagcaacgtgaccaacaagaccgacccccggagcatgaactcacgagtgtttattggaaacctgaatacattggtagtcaagaagtccgacgtggaggccatatttagcaagtatggtaaaatcgtggggtgctcggttcacaaggggtttgctttcgtgcagtacgtgaacgaacgtaacgcccgcgccgcagtggccggagaagatggaagaatgatcgccggccaggtgctggacattaacctagccgctgaacctaaagtgaatagggggaaggccggcgtgaagcggagcgccgccgagatgtacggaagtagttttgacttggactacgacttccagagggactattacgaccgcatgtattcataccccgcaagggtgcctcctcccccaccaatcgcaagagcagttgtgccgtcaaagcgacaacgggtgagtggcaacacctctcggagaggcaaatcaggctttaattccaaaagcgggcaaaggggaagctcgaagtctggaaagctgaagggggacgatctgcaggcaataaagaaggaattaacccaaatcaagcagaaggtcgatagtctgctggagaatctggagaaaattgagaaggagcagtctaagcaggccgtggaaatgaagaatgacaaatccgaggaggaacagtcctcgtcttcagtaaagaaagacgagacaaacgtcaaaatggagtcggagggcggggccgatgacagtgccgaagagggggatctgctagacgacgacgataacgaagacagatag

SEQ ID NO: 331650 - DNA, 381 bp, Artificial Sequence
  derived and/or modified sequence
atggccagcaacgtgaccaacaagaccgacccccggagcatgaactcccgtgtatttatcgggaacttgaacacccttgtagtcaagaaatccgacgtggaggccatattctcaaaatacggcaaaatcgtcggctgctccgtacacaagggcttcgcctttgtacagtacgtcaatgaaaggaatgcaagagccgctgtggctggagaggacggaaggatgatcgccggacaggtcttggatatcaatctggccgctgagcccaaagtcaacagaggtaaagcgggtgtgaaacgcagtgcagccgagatgtatggctccagttttgatctcgactacgattttcaaagagactactacgaccgaatgtacagctactag

SEQ ID NO: 331651 - DNA, 882 bp, Artificial Sequence
  derived and/or modified sequence
atggccagcaacgtgaccaacaagaccgacccccggagcatgaacagccgcgtcttcatcggcaacttaaataccctggtcgtgaaaaagtctgatgtggaggctattttttccaagtacggcaaaatagttggttgttctgtgcataagggttttgctttcgtgcaatatgttaatgaaaggaatgctcgcgcagctgtggcgggcgaggatggtcggatgatagctgggcaggtcctggacattaatctggctgcagagcctaaggtaaacagggggaaggctggagtgaagagaagcgctgctgagatgtacggcagtagcttcgacctcgattacgactttcaacgagactactatgatagaatgtattcttatcccgctagagttccaccgcccccgccaattgcccgcgcagtggtgccctccaagaggcaaagagtgtcagggaatacatcccggcgaggtaaatctggcttcaacagtaagagtggtcagcgtggtagctctaaaagcggcaagctgaagggtgatgaccttcaggcgattaaaaaagagctgactcagattaagcagaaagtagactcactcctcgaaaacctggagaaaatcgaaaaggagcagagtaagcaagctgtcgaaatgaaaaacgacaaatccgaagaggagcagtccagttcttctgtcaaaaaggatgagactaacgtaaagatggagagtgaagggggagcagatgatagcgccgaagagggggatctcttggacgatgatgacaatgaagacagaggtgacgaccagctggagcttattaaggatgatgagaaggaagccgaggagggcgaggacgacagagactctgcaaacggggaagacgactcatag

SEQ ID NO: 331652 - DNA, 354 bp, Artificial Sequence
  derived and/or modified sequence
atggccagcaacgtgaccaacaagaccgacccccggagcatgaacagtagggtgttcataggcaatctcaatacacttgtcgttaagaagtcagacgttgaagcgatcttcagtaagtatggtaagattgtaggttgcagtgtgcacaagggctttgccttcgtgcaatacgtcaatgagagaaatgctagagctgccgttgctggggaggacggcaggatgatcgctggacaagttctagatataaaccttgctgccgagcccaaggtgaatcggggaaaagctggcgtcaagcggtctgccgccgagatgtatggtagttccttcgatcttgattatgattttcagcggtag

SEQ ID NO: 331653 - DNA, 753 bp, Artificial Sequence
  derived and/or modified sequence
atggccagcaacgtgaccaacaagaccgacccccggagcatgaacagccgcgtgttcatcggcaacctgaacacactggttgtaaagaaatccgacgtcgaagccatcttctccaaatatggtaagatcgtcggatgcagcgtgcacaaggggttcgcgtttgttcagtacgtgaacgagagaaacgcccgcgccgcagttgcaggagaggatggacgaatgatagcaggtcaggtgttagatattaacctcgctgctgaacccaaagtgaatagaggaaaagccggggttaaaagatcggcagccgaaatgtatggcagtagtttcgatctggactatgatttccagagagactactacgatcgcatgtacagctacccggctcgcgtgccaccacctcctccaattgcaagagccatcaaaaaagagctcactcagataaaacaaaaagtcgactctctgttggaaaaccttgagaagatagagaaagagcaatcaaagcaggccgtagaaatgaagaatgacaagagcgaggaagagcagtcaagctcttcggtgaaaaaggacgaaactaacgtgaaaatggaatccgagggcggagccgatgatagcgccgaggaaggagacctcctggatgatgacgacaatgaggaccgcggtgatgatcagttggagttaattaaagatgacgaaaaggaggcggaagagggggaagatgaccgagatagcgcgaatggggaggacgacagctag

SEQ ID NO: 331654 - DNA, 366 bp, Artificial Sequence
  derived and/or modified sequence
atggccagcaacgtgaccaacaagaccgacccccggagcatgaactctagagtttttataggtaatctgaacaccctggtggtgaaaaagtctgacgtggaagccatcttttctaagtacggcaagattgtgggctgctctgtgcacaagggatttgctttcgtgcaatacgtgaatgaaagaaacgcacgcgcagccgttgccggtgaagatggtcgcatgatcgccgggcaggtgctggatatcaacctcgctgccgaacccaaggtgaatagaggcaaagccggggtgaaaaggagcgccgcggagatgtatggcagcagcttcgatttagactacgacttccagcgcgactattatgattag

SEQ ID NO: 331655 - DNA, 681 bp, Artificial Sequence
  derived and/or modified sequence
atggccagcaacgtgaccaacaagaccgacccccggagcatgaacagtagggtcttcattgggaacctgaataccttagtcgtgaaaaaatctgatgtggaggcaattttttctaactcctcttttgatctggactatgatttccaacgggactactacgatcgcatgtacagctatcctgcccgggttcccccgccccccccgattgcgagggctgtggttcctagcaaacgccagagggtgagtggcaacacaagtaggaggggaaagtccggctttaattctaagtcaggacaaaggggatcctccaaaagcggtaagctgaaaggagacgacctccaagctataaagaaggaactgactcagattaaacagaaggttgattcattgctcgagaatttggaaaagatcgaaaaggagcagtcaaaacaagccgttgagatgaaaaatgataagagcgaggaggagcagagttcttcctctgttaaaaaagacgagacaaatgtcaaaatggaatcagaggggggggctgacgattccgccgaggaaggagacttgctcgacgatgatgataacgaggatcggggggacgaccaactggagctgatcaaggacgatgagaaggaggccgaggaaggcgaagatgatagggactcagccaacggtgaggacgactcatag

SEQ ID NO: 331656 - DNA, 882 bp, Artificial Sequence
  derived and/or modified sequence
atggccagcaacgtgaccaacaagaccgacccccggagcatgaactcgcgcgttttcatcggcaacctgaataccctcgttgtgaagaaatccgacgttgaagccatattctcaaaatacggaaagattgtgggatgtagcgtgcacaagggatttgctttcgtgcagtacgtcaacgagcgcaacgctcgggccgcagtggctggagaggatgggcgcatgatcgccggccaagtgctggatattaacttggcggcagaaccaaaagtcaatcgcggcaaggcaggggtcaaacgaagcgccgctgagatgtatggatcttccttcgacctggattacgattttcagagggattactacgacaggatgtattcctatcccgcccgcgttccaccccccccccctattgctcgggcagttgtcccttccaagagacagagggtgagcggaaacaccagccgcagggggaaatcagggtttaacagtaaatctggacagcgaggcagctccaagtctgggaaactcaaaggtgacgatctgcaggcaataaagaaggaattaactcaaatcaagcaaaaggtcgatagtcttctggagaatctagaaaagattgagaaagagcaaagcaaacaggccgtagagatgaagaacgacaagtcagaggaggagcagagttctagcagcgtgaagaaagatgaaaccaatgtcaaaatggaaagcgaggggggtgctgatgatagtgcagaggaaggcgatcttctcgatgacgacgacaacgaggatcgaggagatgaccagctggagcttataaaagatgatgagaaagaggccgaggagggcgaggacgatcgggactccgctaatggcgaggacgacagttag

SEQ ID NO: 331657 - DNA, 201 bp, Artificial Sequence
  derived and/or modified sequence
atggccagcaacgtgaccaacaagaccgacccccggagcatgaacagtcgggtgtttattgggaatctgaatacacttgtggtgaaaaagtcagacgtagaagctatcttcagtaaatacggaaagatcgtagggtgttctgtgcataagggcttcgccttcgttcagtacgtgaatgagaggaatgccagagctgcctag

SEQ ID NO: 331658 - DNA, 165 bp, Artificial Sequence
  derived and/or modified sequence
atggccagcaacgtgaccaacaagaccgacccccggagcatgaactccagggtgtttattgggaacctgaataccctggtcgtgaagaagagcgatgttgaagccattttctccaaatatggaaagattgttggctgtagcgtccacaaaggctttgctttttag

SEQ ID NO: 331659 - DNA, 309 bp, Artificial Sequence
  derived and/or modified sequence
atggcttctaatgtcactaacaaaactgaccctaggtcaatgaactcaagggtcttcatcggcaatctgaataccctggtggtgaaaaagtcagatgtggaggcaatttttagcaagaaagacgagaccaatgtgaaaatggaatctgaaggtggcgctgacgactccgccgaggagggcgacctcctggacgatgatgataacgaggatagaggtgacgatcagcttgaactcataaaggatgacgagaaagaagctgaggaaggcgaagacgaccgggactccgccaacggcgaagatgatagttag

SEQ ID NO: 331660 - DNA, 882 bp, Artificial Sequence
  derived and/or modified sequence
atggccagtaatgtcaccaataagactgatccacgctcaatgaattctcgagtgttcataggaaatttaaatacactggtggtgaaaaaatccgatgtcgaggccatcttcagtaagtatggtaaaattgtcggctgttcagtgcacaagggttttgcgttcgtgcagtacgtgaacgagcgcaatgctagagctgccgtcgcaggtgaagatggacgcatgatagcaggacaagttttggacattaatctggccgctgagcctaaggtcaacaggggaaaggccggagtgaaaaggagcgccgctgagatgtacggttcttcatttgatctggattacgacttccaaagggactactacgaccggatgtacagctatccagccagagtgcctccccctcctcctatagctagagcagtcgtgccaagcaaaaggcaacgagtgtctggcaacacttcacgcaggggaaagtctggattcaactctaagtcagggcagagaggtagctccaagagcgggaaattgaagggcgacgacttgcaggcaattaagaaggagctgactcagatcaaacagaaagttgactcactcctggagaacttggagaagatcgaaaaggagcagtcaaaacaggcggtggagatgaagaatgacaagagtgaggaggagcagtctagcagctccgtgaaaaaggatgagacgaatgtgaaaatggagtcagaagggggagctgatgactcagccgaagaaggggacctcctggatgatgacgacaacgaagaccgaggagatgaccaactggagctgattaaggacgacgaaaaggaagccgaagagggcgaggacgaccgcgattccgctaatggtgaggatgattcatag

SEQ ID NO: 331661 - DNA, 882 bp, Artificial Sequence
  derived and/or modified sequence
atggcctcgaatgtcactaacaaaactgacccaagatcgatgaatagcagagtgttcattggaaacctgaatacgctagtggttaaaaagagcgatgttgaggccattttttctaaatatggaaagattgtgggctgtagtgtgcacaagggcttcgcctttgtgcagtatgtcaacgagcgcaatgcccgagcagccgtcgcaggagaagacgggagaatgattgcaggccaggtgctggacatcaatctcgccgctgagcccaaagtgaacagaggcaaagccggtgttaagaggtccgccgctgagatgtacggctcttccttcgacctggattacgattttcaacgggattattacgataggatgtactcttatcctgctagagtccctccccctccaccaatcgccagagcagttgtgcccagtaaacgacaacgagtgagcggaaacacctctcgcagggggaagagtgggtttaatagtaaaagcggacagcgaggctcgtctaaaagtggcaagctaaagggcgatgacctgcaggcaattaagaaggaacttacgcagatcaaacagaaggtcgatagcctgctggagaatctggagaaaattgaaaaagaacagtctaagcaggccgtcgagatgaagaatgataagtccgaagaggagcagagctcgtcgagcgtcaaaaaggatgaaacaaatgtcaaaatggagtctgaaggcggagccgatgattccgctgaggagggcgacttgttggatgacgatgacaatgaggaccgaggtgacgaccagctggagctgatcaaggacgacgagaaagaggctgaggaaggggaggacgacagagatagcgccaatggggaggatgattcttag

SEQ ID NO: 331662 - DNA, 882 bp, Artificial Sequence
  derived and/or modified sequence
atggcctccaatgtgacaaataagacggacccccgtagcatgaacagcagagttttcataggaaatttgaatactttggtcgtgaaaaagtctgacgtggaggccatcttcagcaaatacggcaaaattgtggggtgttcagttcataagggatttgcattcgttcagtatgtgaatgaaaggaatgcaagggctgccgtggctggggaggacggacgtatgatagccggacaggtactcgacatcaatctggccgcagagccaaaggtcaacaggggcaaagccggtgtcaaaagatctgccgcagaaatgtacgggagctccttcgaccttgactacgatttccagcgagactattacgataggatgtacagctatcctgcaagggtaccaccaccaccgccaattgccagggccgttgtcccaagcaaacgccagcgcgtatccgggaacactagcagacgcggaaaatctgggttcaacagcaagagcggccaaagaggatctagtaaatcgggcaagctcaagggcgatgatctccaggcaatcaagaaggaactgacgcaaatcaagcagaaggtcgatagcttgctggaaaatttggaaaagattgagaaagagcagtcaaaacaggctgtggagatgaaaaatgataagtcagaagaggaacagtccagcagctccgttaaaaaggatgaaacgaacgtgaagatggagagcgaaggcggtgctgacgatagcgctgaggaaggcgacctgctggatgacgatgacaatgaggatagaggcgacgaccaacttgaactcatcaaagacgatgaaaaagaggcggaagaaggtgaagacgaccgcgattctgctaacggggaagacgactcatag

SEQ ID NO: 331663 - DNA, 789 bp, Artificial Sequence
  derived and/or modified sequence
atggcctctaacgtgaccaataaaacagaccctaggtctatgaattcacgggtttttattggcaatctgaacaccctcgttgtaaagaagtcagatgttgaggccattttcagtaagtacggcaagatcgtgggatgctccgtccataaggggttcgctttcgttcaatatgtaaatgagcgaaatgcccgagccgctgtggcaggtgaagatggcagaatgatcgcagggcaagtccttgacattaacctcgcagctgaaccaaaggtcaaccgtggaaaagctggcgtgaagagaagcgccgctgagatgtacggcagctcctttgatcttgattatgattttcagagggattattacgatcggatgtactcatatcccgcacgcgtaccccctccccctcccattgctagagctgtcgttccttctaagcgccagcgcgtgtccggcaataccagcagaagaggcaagtcgggttttaatagcaagagtggacaacggggaagctctaaaagcggtaaactaaaaggcgacgacctccaagctatcaagaaggaacttacacaaatcaaacagaaagtcgacagtctgctggagaatcttgagaaaattgaaaaagaacaatcaaagcaagccgttgagatgaagaatgataagtccgaggaggaacaatcaagctcctccgttaagaaagacgagacgaatgtgaagatggagtccgaaggcggtgcagacgattccgcggaggagggcgacctcctggacgatgatgataacgaagaccggtag

SEQ ID NO: 331664 - DNA, 381 bp, Artificial Sequence
  derived and/or modified sequence
atggccagcaatgtgacaaataagaccgaccctcgatccatgaacagccgcgtgtttataggtaatctaaacactctggtggtgaagaagtcagacgtggaggccattttctctaaatacggtaagattgtgggttgcagcgttcataagggatttgctttcgttcagtacgtaaatgagcggaatgctagagccgcagtcgctggcgaggacggtaggatgatcgccggacaggtgctcgacatcaacttagcggctgaacctaaggtgaaccgcggtaaagcgggagtcaaaagatctgccgctgagatgtacgggtccagttttgacctggactacgatttccaaagagattattacgataggatgtattcgtactag

SEQ ID NO: 331665 - DNA, 882 bp, Artificial Sequence
  derived and/or modified sequence
atggcttccaacgtgaccaataagactgatcctaggtctatgaacagtcgcgtctttattgggaacctaaacacgttagtggtcaaaaagtccgatgtggaggctatctttagcaaatacggaaagattgtcggatgctccgtccacaaaggtttcgctttcgtccagtatgtgaacgagcgtaatgctagagctgctgtggcgggagaagatgggcgaatgatcgccggacaggtgctggatataaatctggcagctgagcccaaagtaaatagaggcaaagcaggagtcaaacgctctgcggctgagatgtacggcagcagctttgatctggactacgatttccagcgtgactattatgatcgcatgtactcatatccagccagagtgcctcctcctccccctatagcaagggctgtggtgcctagtaagcggcaacgggtctctggcaacacttctcggagaggcaaatcagggtttaatagtaagtctggtcagagaggctcgtccaagtctggcaaacttaaaggggacgatctacaggcaatcaaaaaggagctcacacagattaagcaaaaggtagactctctactcgagaatctggagaagatcgagaaggagcagagtaaacaggcagtggaaatgaaaaatgataaatcagaagaagagcagagtagtagctctgtcaagaaagatgaaactaacgtcaagatggagtctgaagggggagcagacgactcagccgaggagggggacctgttagacgacgacgacaatgaagatcggggtgacgatcagcttgaactgattaaagatgatgaaaaagaggcagaggagggagaagacgacagggactcagccaatggagaggacgacagctag

SEQ ID NO: 331666 - DNA, 354 bp, Artificial Sequence
  derived and/or modified sequence
atggctagcaacgtaacgaacaagacagaccccaggtcaatgaattcgcgagtctttataggaaacttgaacacgcttgtagtaaagaagtccgatgtggaggccattttctctaagtatggcaagatcgtcggctgttctgtgcataagggttttgccttcgtgcagtacgttaacgagagaaacgccagggccgctgtcgccggtgaggatggacgtatgatcgcaggccaggttttagacatcaatctcgccgcagagcctaaggtgaaccggggaaaagctggcgtcaagagaagcgccgcagagatgtacggctcaagtttcgacctggactatgattttcagaggtag

SEQ ID NO: 331667 - DNA, 753 bp, Artificial Sequence
  derived and/or modified sequence
atggcctcgaacgtgacaaacaagactgaccctaggtctatgaattccagggtttttatcggtaacctaaacaccttggttgtgaagaagtccgatgtggaggccattttctccaagtatgggaaaatcgttggatgttcggttcataagggatttgcctttgtccaatatgtgaacgagcgcaacgccagagcagccgtcgctggtgaggatggacgcatgatcgccggtcaggttctggatatcaatctggccgcagagcctaaggtgaaccgcggaaaggcgggtgttaagcggtccgcagccgaaatgtatggctcaagctttgatctggattacgatttccaaagggactactacgacagaatgtattcctatccagccagggtgccacctccgccacccattgccagggcaattaagaaagaactaacgcaaattaaacagaaggtcgattcattgctggagaacttggagaagatcgagaaggaacagagcaaacaggccgtcgagatgaaaaatgacaagagtgaggaagagcagtcttcaagtagcgtcaagaaggacgaaactaacgttaaaatggagtctgagggtggagcggacgactccgccgaagagggtgatctgctggacgacgatgacaatgaagatagaggggacgaccagcttgagttaattaaggatgacgagaaggaggctgaagaaggcgaggatgatcgcgacagtgccaacggagaggacgattcctag

SEQ ID NO: 331668 - DNA, 366 bp, Artificial Sequence
  derived and/or modified sequence
atggcaagcaacgtgacaaataaaacagaccctcgctccatgaactctcgagtgtttatcggcaatctgaacaccctcgttgtgaaaaagtctgacgtagaagcgatttttagtaagtacggcaagatcgtcgggtgcagcgtacacaaaggtttcgcgttcgtgcagtacgtgaacgagaggaatgccagagctgcagttgcgggagaagatgggagaatgatcgcaggtcaggtcttagatatcaatctggctgccgaacctaaggtgaaccgcggaaaagctggagtcaaaaggagcgcagccgagatgtacggaagcagcttcgatctggactacgacttccagcgagattattacgactag

SEQ ID NO: 331669 - DNA, 681 bp, Artificial Sequence
  derived and/or modified sequence
atggccagtaatgtaaccaacaagactgaccctaggagtatgaacagccgtgtctttattggcaacttgaacacactcgttgtaaagaagagtgatgtcgaagcaattttcagcaatagcagctttgatttggattacgactttcaacgcgattactacgatcgaatgtactcctatccggctcgggtgcccccacccccaccgattgcccgtgccgtggtgccatcaaagaggcagcgggtgagtggcaatacgagccgccgtggaaagtccggcttcaattcaaagagcggtcagaggggaagctctaagtctggcaaactcaagggggacgaccttcaggccattaaaaaagagctcacgcagataaaacagaaagtggatagcctgctggaaaacctggagaagattgagaaggaacaaagcaaacaggctgtggaaatgaagaacgacaagtcagaggaggagcaatccagctcctccgtgaaaaaagacgagaccaatgtgaagatggagtcagagggaggcgctgacgactccgctgaagaaggagaccttctagacgatgacgacaatgaggaccgaggcgacgatcagcttgaactgatcaaggatgacgagaaggaggctgaagagggcgaagatgaccgggatagtgccaatggtgaggatgacagctag

SEQ ID NO: 331670 - DNA, 882 bp, Artificial Sequence
  derived and/or modified sequence
atggcttctaacgtgaccaataagacagaccctaggtcaatgaacagccgagtttttataggcaatctgaacacactggtggtaaagaaatccgacgttgaagctatctttagcaagtatggtaagatcgttggctgcagtgtccacaaaggttttgccttcgtccagtacgtgaatgaacggaacgccagggcagccgtggccggagaggatggtagaatgatcgccggacaagtgctggacatcaatctggctgccgagcctaaggtcaataggggaaaggcaggagtgaaaagaagcgcggcagagatgtatggcagctctttcgatctggactatgactttcaacgggattactacgaccgcatgtactcatatccagccagggtgcccccaccacctcccattgccagagctgtggttcctagcaaacggcagagagttagtgggaatacatccagaaggggaaagagcggctttaatagcaaatcaggtcagcgtggtagcagtaagagcggaaagctgaagggcgacgacttgcaggcaatcaagaaggagctgactcagatcaagcaaaaagttgacagcctgttagaaaacctggaaaaaatcgagaaggaacagagcaaacaggctgtcgagatgaaaaatgataagagcgaggaagagcagtctagctcttcagtgaagaaggatgagacaaacgttaaaatggagtcggaaggcggtgctgatgacagtgctgaggaaggtgatctgctggacgatgacgacaatgaggataggggagacgatcaactggaattgattaaagacgacgaaaaggaggctgaagagggggaggatgatcgggacagcgcaaatggggaggacgattcatag

SEQ ID NO: 331671 - DNA, 201 bp, Artificial Sequence
  derived and/or modified sequence
atggccagtaacgtgacaaataagaccgacccaagaagtatgaattcgcgggtcttcatcggaaatctgaacacactggtcgtgaagaagtcagatgttgaagcaatcttcagtaaatacggcaaaattgttggatgctcggtgcataagggctttgcatttgtgcagtacgtcaatgagcgtaacgctcgagccgcttag

SEQ ID NO: 331672 - DNA, 165 bp, Artificial Sequence
  derived and/or modified sequence
atggcatctaacgtgacaaacaaaaccgatcccaggagcatgaatagccgcgtgtttattggaaacctcaacacattggtggtgaaaaagagcgacgtggaggccattttctccaaatatggtaagattgttgggtgcagtgttcataaaggctttgctttttag

SEQ ID NO: 331673 - DNA, 309 bp, Artificial Sequence
  derived and/or modified sequence
atggccagcaacgtgaccaacaagaccgaccccagaagcatgaacagcagagtgttcatcggcaacctgaacaccctggtggtgaagaagagcgacgtggaggccatcttcagcaagaaggacgagaccaacgtgaagatggagagcgagggcggcgccgacgacagcgccgaggagggcgacctgctggacgacgacgacaacgaggacagaggcgacgaccagctggagctgatcaaggacgacgagaaggaggccgaggagggcgaggacgacagagacagcgccaacggcgaggacgacagctag

SEQ ID NO: 331674 - DNA, 882 bp, Artificial Sequence
  derived and/or modified sequence
atggccagcaacgtgaccaacaagaccgaccccagaagcatgaacagcagagtgttcatcggcaacctgaacaccctggtggtgaagaagagcgacgtggaggccatcttcagcaagtacggcaagatcgtgggctgcagcgtgcacaagggcttcgccttcgtgcagtacgtgaacgagagaaacgccagagccgccgtggccggcgaggacggcagaatgatcgccggccaggtgctggacatcaacctggccgccgagcccaaggtgaacagaggcaaggccggcgtgaagagaagcgccgccgagatgtacggcagcagcttcgacctggactacgacttccagagagactactacgacagaatgtacagctaccccgccagagtgcccccccccccccccatcgccagagccgtggtgcccagcaagagacagagagtgagcggcaacaccagcagaagaggcaagagcggcttcaacagcaagagcggccagagaggcagcagcaagagcggcaagctgaagggcgacgacctgcaggccatcaagaaggagctgacccagatcaagcagaaggtggacagcctgctggagaacctggagaagatcgagaaggagcagagcaagcaggccgtggagatgaagaacgacaagagcgaggaggagcagagcagcagcagcgtgaagaaggacgagaccaacgtgaagatggagagcgagggcggcgccgacgacagcgccgaggagggcgacctgctggacgacgacgacaacgaggacagaggcgacgaccagctggagctgatcaaggacgacgagaaggaggccgaggagggcgaggacgacagagacagcgccaacggcgaggacgacagctag

SEQ ID NO: 331675 - DNA, 789 bp, Artificial Sequence
  derived and/or modified sequence
atggccagcaacgtgaccaacaagaccgaccccagaagcatgaacagcagagtgttcatcggcaacctgaacaccctggtggtgaagaagagcgacgtggaggccatcttcagcaagtacggcaagatcgtgggctgcagcgtgcacaagggcttcgccttcgtgcagtacgtgaacgagagaaacgccagagccgccgtggccggcgaggacggcagaatgatcgccggccaggtgctggacatcaacctggccgccgagcccaaggtgaacagaggcaaggccggcgtgaagagaagcgccgccgagatgtacggcagcagcttcgacctggactacgacttccagagagactactacgacagaatgtacagctaccccgccagagtgcccccccccccccccatcgccagagccgtggtgcccagcaagagacagagagtgagcggcaacaccagcagaagaggcaagagcggcttcaacagcaagagcggccagagaggcagcagcaagagcggcaagctgaagggcgacgacctgcaggccatcaagaaggagctgacccagatcaagcagaaggtggacagcctgctggagaacctggagaagatcgagaaggagcagagcaagcaggccgtggagatgaagaacgacaagagcgaggaggagcagagcagcagcagcgtgaagaaggacgagaccaacgtgaagatggagagcgagggcggcgccgacgacagcgccgaggagggcgacctgctggacgacgacgacaacgaggacagatag

SEQ ID NO: 331676 - DNA, 381 bp, Artificial Sequence
  derived and/or modified sequence
atggccagcaacgtgaccaacaagaccgaccccagaagcatgaacagcagagtgttcatcggcaacctgaacaccctggtggtgaagaagagcgacgtggaggccatcttcagcaagtacggcaagatcgtgggctgcagcgtgcacaagggcttcgccttcgtgcagtacgtgaacgagagaaacgccagagccgccgtggccggcgaggacggcagaatgatcgccggccaggtgctggacatcaacctggccgccgagcccaaggtgaacagaggcaaggccggcgtgaagagaagcgccgccgagatgtacggcagcagcttcgacctggactacgacttccagagagactactacgacagaatgtacagctactag

SEQ ID NO: 331677 - DNA, 354 bp, Artificial Sequence
  derived and/or modified sequence
atggccagcaacgtgaccaacaagaccgaccccagaagcatgaacagcagagtgttcatcggcaacctgaacaccctggtggtgaagaagagcgacgtggaggccatcttcagcaagtacggcaagatcgtgggctgcagcgtgcacaagggcttcgccttcgtgcagtacgtgaacgagagaaacgccagagccgccgtggccggcgaggacggcagaatgatcgccggccaggtgctggacatcaacctggccgccgagcccaaggtgaacagaggcaaggccggcgtgaagagaagcgccgccgagatgtacggcagcagcttcgacctggactacgacttccagagatag

SEQ ID NO: 331678 - DNA, 753 bp, Artificial Sequence
  derived and/or modified sequence
atggccagcaacgtgaccaacaagaccgaccccagaagcatgaacagcagagtgttcatcggcaacctgaacaccctggtggtgaagaagagcgacgtggaggccatcttcagcaagtacggcaagatcgtgggctgcagcgtgcacaagggcttcgccttcgtgcagtacgtgaacgagagaaacgccagagccgccgtggccggcgaggacggcagaatgatcgccggccaggtgctggacatcaacctggccgccgagcccaaggtgaacagaggcaaggccggcgtgaagagaagcgccgccgagatgtacggcagcagcttcgacctggactacgacttccagagagactactacgacagaatgtacagctaccccgccagagtgcccccccccccccccatcgccagagccatcaagaaggagctgacccagatcaagcagaaggtggacagcctgctggagaacctggagaagatcgagaaggagcagagcaagcaggccgtggagatgaagaacgacaagagcgaggaggagcagagcagcagcagcgtgaagaaggacgagaccaacgtgaagatggagagcgagggcggcgccgacgacagcgccgaggagggcgacctgctggacgacgacgacaacgaggacagaggcgacgaccagctggagctgatcaaggacgacgagaaggaggccgaggagggcgaggacgacagagacagcgccaacggcgaggacgacagctag

SEQ ID NO: 331679 - DNA, 366 bp, Artificial Sequence
  derived and/or modified sequence
atggccagcaacgtgaccaacaagaccgaccccagaagcatgaacagcagagtgttcatcggcaacctgaacaccctggtggtgaagaagagcgacgtggaggccatcttcagcaagtacggcaagatcgtgggctgcagcgtgcacaagggcttcgccttcgtgcagtacgtgaacgagagaaacgccagagccgccgtggccggcgaggacggcagaatgatcgccggccaggtgctggacatcaacctggccgccgagcccaaggtgaacagaggcaaggccggcgtgaagagaagcgccgccgagatgtacggcagcagcttcgacctggactacgacttccagagagactactacgactag

SEQ ID NO: 331680 - DNA, 681 bp, Artificial Sequence
  derived and/or modified sequence
atggccagcaacgtgaccaacaagaccgaccccagaagcatgaacagcagagtgttcatcggcaacctgaacaccctggtggtgaagaagagcgacgtggaggccatcttcagcaacagcagcttcgacctggactacgacttccagagagactactacgacagaatgtacagctaccccgccagagtgcccccccccccccccatcgccagagccgtggtgcccagcaagagacagagagtgagcggcaacaccagcagaagaggcaagagcggcttcaacagcaagagcggccagagaggcagcagcaagagcggcaagctgaagggcgacgacctgcaggccatcaagaaggagctgacccagatcaagcagaaggtggacagcctgctggagaacctggagaagatcgagaaggagcagagcaagcaggccgtggagatgaagaacgacaagagcgaggaggagcagagcagcagcagcgtgaagaaggacgagaccaacgtgaagatggagagcgagggcggcgccgacgacagcgccgaggagggcgacctgctggacgacgacgacaacgaggacagaggcgacgaccagctggagctgatcaaggacgacgagaaggaggccgaggagggcgaggacgacagagacagcgccaacggcgaggacgacagctag

SEQ ID NO: 331681 - DNA, 201 bp, Artificial Sequence
  derived and/or modified sequence
atggccagcaacgtgaccaacaagaccgaccccagaagcatgaacagcagagtgttcatcggcaacctgaacaccctggtggtgaagaagagcgacgtggaggccatcttcagcaagtacggcaagatcgtgggctgcagcgtgcacaagggcttcgccttcgtgcagtacgtgaacgagagaaacgccagagccgcctag

SEQ ID NO: 331682 - DNA, 165 bp, Artificial Sequence
  derived and/or modified sequence
atggccagcaacgtgaccaacaagaccgaccccagaagcatgaacagcagagtgttcatcggcaacctgaacaccctggtggtgaagaagagcgacgtggaggccatcttcagcaagtacggcaagatcgtgggctgcagcgtgcacaagggcttcgccttctag

SEQ ID NO: 331683 - DNA, 1152 bp, Artificial Sequence
  derived and/or modified sequence
gccattttgtgaagagacgaagactgagcggttgtggccgcgttgccgacctccagcagcagtcggcttctctacgcagaacccgggagtaggagactcagaatcgaatctcttctccctccccttcttgtatacttttttttgctttacagttttcggctttgtgagaaaccttaccatcaaacacgatggccagcaacgttaccaacaagacagatcctcgctccatgaactcccgtgtattcattgggaatctcaacactcttgtggtcaagaaatctgatgtggaggcaatcttttcgaagaaagatgagactaatgtgaagatggagtctgaggggggtgcagatgactctgctgaggagggggacctactggatgatgatgataatgaagatcggggggatgaccagctggagttgatcaaggatgatgaaaaagaggctgaggaaggagaggatgacagagacagcgccaatggcgaggatgactcttaagcacatagtggggtttagaaatcttatcccattatttctttacctaggcgcttgtctaagatcaaatttttcaccagatcctctcccctagtatcttcagcacatgctcactgttctccccatccttgtccttcccatgttcattaattcatattgccccgcgcctagtcccattttcacttcctttgacgctcctagtagttttgttaagtcttaccctgtaatttttgcttttaattttgatacctctttatgacttaacaataaaaaggatgtatggtttttatcaactgtctccaaaataatctcttgttatgcagggagtacagttcttttcattcatacataagttcagtagttgcttccctaactgcaaaggcaatctcatttagttgagtagctcttgaaagcagctttgagttagaagtatgtgtgttacaccctcacattagtgtgctgtgtggggcagttcaacacaaatgtaacaatgtatttttgtgaatgagagttggcatgtcaaatgcatcctctagaaaaataattagtgttatagtcttaagatttgttttctaaagttgatactgtgggttatttttgtgaacagcctgatgtttgggaccttttttcctcaaaataaacaagtccttattaaacc

SEQ ID NO: 331684 - DNA, 4501 bp, Artificial Sequence
  derived and/or modified sequence
ttcttgattgaaaatggtgctaaagttggtctttttatgagtggtagctcttcagtttaacataaataacatcttgggagatactgagctttttgatattgaaagatagaattggtttcttttcacatttttctttatttttaagcttatgtcttgtggcacctgtacaaaggacttggttgtggttgagctataaagttatgtatcttgaaaattgattaccaggtttgggctgtggctccaaataagaaaatgaaatgtttcaccataactgtatttcataaacaggaaaagaacattcagatgtatatttcttacaattcttcacaaactttttccgcaatttgtacattcatacagttttcacacatcaaatgtaaaaattaactgtcattcctacactgttctttttaaaaatgtatggtacttgttgctgctgtagtcattcatgtatagttggctcaaggaacacttctaaaagctcaattaaaaattttttttttgagacagggtctctctctggcctggctgaagtgcagtggcgtgatcagagctcactgcagcctcgaactcctgggctcaagtgatcctcgctcctcagactgctaagtagctgggatttcaggctaccacaccctgctaatgttttttgtttttaataaagtctcgtcatgtttcccaggctggtctcaaactactgagctcaagccgtgctctaccctggcctcccaaagtgttgggattacaggtgtgagccaccacacttggccttaaaatattttaatttcctcaaatttacaaaggagaataagacctcatggctaaattgaacagtgagtgcagctagttcattgtttgcacaaggaactacagtctaattgcagttcctattttagctgatgaaacaaccagtttgtcatggaaattattttagtgtggtattatgtaccagatttttagaatccataacttgaaattagctttacacgctacatagtaaatagtggactacagaaacaaaagtattaacataaggaccttaatttttttcacctattttatgaccttaaatattcagtatttttttaattccatctgtattttcgttttgtcagtgagtggaataatgtgctccttatttaaaacatcttttcccctaacagtagaacctattaggtcttgtggtttgatcactcactggttttgagaatagatgagtcatctctagtatagatcttcatggtaggccattcaccttcagtctattactcatagcaaaaactccacggacttttttaagtttaaaacccatgaatctgcttaggttttataatctcagtatttgacatttgctcactatttcatctctatttgttggcccggtttttctgtattttctttgcccaaactgctcattatcaagatgaacatttgggatatactctttttgagaccctcaagggcatattgacatgaatttagttaattttagtcatctattgatgttgaagaattgtgaagacagtcactggtagaggtgattctatggaggctatcccatcccagtggaatgttaatgctttaccaaaatgtgttagctgcagtagacagatgtttctgtcttgggggtttagggcacaacatttctgaggaactctgactcaatctgtcccttctcctttcacagggcagcaaggcgaaccccatccctactcactggagctcagctttgatttttaacctcccttccccacccttccagaacacacacattccattccaaaactgattttataaagacattttaaacataatgatgcaacttggtgtgcactacagcaaatgtacaggtgttttttttttaattgtttccaaaaccgggacctggatttaagatgtaatttttaaaatttctatttctattttttctgcagcagttgggttagaggaggaggagccttttagcctctcataaactgacctctctacttcctcgtgtatttttaagattgattgatgatgtggaaagggctttgcttgtctgctactgaaaactttatccttgcggtttttgtggaaactgcttttggaaagagaaaagaaatgaactttactgacttgacatttttgcacctcccgtttttctaatctgggctatttttatttttgtttttttacagtgagatttttttgatcttcagctacagtaagttattccaatttttttttaacatttttcctgactttccgctgatttcctttttattgttgttactagttactattacttattattattatattaatacttatgatggtgatgatgatgatgataatgacactgatgatttttaaccggattaaaatcgagtttttctgaatgtttctaagaatttctccggcctcctgattgactttggagttttgcatcttgggagagaaagcgaaggcattagtatttttaagtggtttgatcacgtaaaccttttctctcccaaccccacccttgccctcatccccttccccacactgaaaagaattttactggctgttaagtctatgaccttatttttcctgatctttaacttaactgttttagagcatctctggacgtctgtatttttaattttttttatttttgtttttttatttttaatctttcatttgttaaatttttaaactgtgctgcaataaaatgtgtgtggtactacttaacacttatgatcgtgatggcattttccctgaaagccatcttcctcctgtttcccttgaaatcccatcctgcttttcctgtacactacccctcacaaaccacaagctgcagcaacatggatgcccagcctggagcagcagcagccaggatgacctggagccaggggggccttcggaacagatgcacacccttcctgggtgatgttttcggctttgtgagaaaccttaccatcaaacacgatggccagcaacgttaccaacaagacagatcctcgctccatgaactcccgtgtattcattgggaatctcaacactcttgtggtcaagaaatctgatgtggaggcaatcttttcgaagtatggcaaaattgtgggctgctctgttcataagggctttgccttcgttcagtatgttaatgagagaaatgcccgggctgctgtagcaggagaggatggcagaatgattgctggccaggttttagatattaacctggctgcagagccaaaagtgaaccgaggaaaagcaggtgtgaaacgatctgcagcggagatgtacggctcctcttttgacttggactatgactttcaacgggactattatgataggatgtacagttacccagcacgtgtacctcctcctcctcctattgctcgggctgtagtgccctcgaaacgtcagcgtgtatcaggaaacacttcacgaaggggcaaaagtggcttcaattctaagagtggacagcggggatcttccaagtctggaaagttgaaaggagatgaccttcaggccattaagaaggagctgacccagataaaacaaaaagtggattctctcctggaaaacctggaaaaaattgaaaaggaacagagcaaacaagcagtagagatgaagaatgataagtcagaagaggagcagagcagcagctccgtgaagaaagatgagactaatgtgaagatggagtctgaggggggtgcagatgactctgctgaggagggggacctactggatgatgatgataatgaagatcggggggatgaccagctggagttgatcaaggatgatgaaaaagaggctgaggaaggagaggatgacagagacagcgccaatggcgaggatgactcttaagcacatagtggggtttagaaatcttatcccattatttctttacctaggcgcttgtctaagatcaaatttttcaccagatcctctcccctagtatcttcagcacatgctcactgttctccccatccttgtccttcccatgttcattaattcatattgccccgcgcctagtcccattttcacttcctttgacgctcctagtagttttgttaagtcttaccctgtaatttttgcttttaattttgatacctctttatgacttaacaataaaaaggatgtatggtttttatcaactgtctccaaaataatctcttgttatgcagggagtacagttcttttcattcatacataagttcagtagttgcttccctaactgcaaaggcaatctcatttagttgagtagctcttgaaagcagctttgagttagaagtatgtgtgttacaccctcacattagtgtgctgtgtggggcagttcaacacaaatgtaacaatgtatttttgtgaatgagagttggcatgtcaaatgcatcctctagaaaaataattagtgttatagtcttaagatttgttttctaaagttgatactgtgggttatttttgtgaacagcctgatgtttgggaccttttttcctcaaaataaacaagtccttattaaaccaggaatttggag

SEQ ID NO: 331685 - DNA, 3187 bp, Artificial Sequence
  derived and/or modified sequence
aggaatggggcggggactaggccttcgcctcggcggcagaggagactcgggggccattttgtgaagagacgaagactgagcggttgtggccgcgttgccgacctccagcagcagtcggcttctctacgcagaacccgggagtaggagactcagaatcgaatctcttctccctccccttcttgttttcggctttgtgagaaaccttaccatcaaacacgatggccagcaacgttaccaacaagacagatcctcgctccatgaactcccgtgtattcattgggaatctcaacactcttgtggtcaagaaatctgatgtggaggcaatcttttcgaagtatggcaaaattgtgggctgctctgttcataagggctttgccttcgttcagtatgttaatgagagaaatgcccgggctgctgtagcaggagaggatggcagaatgattgctggccaggttttagatattaacctggctgcagagccaaaagtgaaccgaggaaaagcaggtgtgaaacgatctgcagcggagatgtacggctcctcttttgacttggactatgactttcaacgggactattatgataggatgtacagttacccagcacgtgtacctcctcctcctcctattgctcgggctgtagtgccctcgaaacgtcagcgtgtatcaggaaacacttcacgaaggggcaaaagtggcttcaattctaagagtggacagcggggatcttccaagtctggaaagttgaaaggagatgaccttcaggccattaagaaggagctgacccagataaaacaaaaagtggattctctcctggaaaacctggaaaaaattgaaaaggaacagagcaaacaagcagtagagatgaagaatgataagtcagaagaggagcagagcagcagctccgtgaagaaagatgagactaatgtgaagatggagtctgaggggggtgcagatgactctgctgaggagggggacctactggatgatgatgataatgaagatcggggggatgaccagctggagttgatcaaggatgatgaaaaagaggctgaggaaggagaggatgacagagacagcgccaatggcgaggatgactcttaagcacatagtggggtttagaaatcttatcccattatttctttacctaggcgcttgtctaagatcaaatttttcaccagatcctctcccctagtatcttcagcacatgctcactgttctccccatccttgtccttcccatgttcattaattcatattgccccgcgcctagtcccattttcacttcctttgacgctcctagtagttttgttaagtcttaccctgtaatttttgcttttaattttgatacctctttatgacttaacaataaaaaggatgtatggtttttatcaactgtctccaaaataatctcttgttatgcagggagtacagttcttttcattcatacataagttcagtagttgcttccctaactgcaaaggcaatctcatttagttgagtagctcttgaaagcagctttgagttagaagtatgtgtgttacaccctcacattagtgtgctgtgtggggcagttcaacacaaatgtaacaatgtatttttgtgaatgagagttggcatgtcaaatgcatcctctagaaaaataattagtgttatagtcttaagatttgttttctaaagttgatactgtgggttatttttgtgaacagcctgatgtttgggaccttttttcctcaaaataaacaagtccttattaaaccaggaatttggagaaaaaaaaaaccctggttttttatttttgtattttattattgtttacttcaaactttgttttacagcgtcctccacaaaacctctagaatgcactagatatatttttcttggagtcataatcatgatgcataccaacacaacactactcaaattatatttcattgagatgcatgttgcattgaggagtcaacttgacatagagtggagactttttcaaaatggcttttacatcctaatgaaagtttgggaagtatatcctctctgccttttcatcagtgctttgtggtccagctggcaccctttctgaggtttgtgttttgtgctaaatggttttgtccttaaataggagaggctcaaaaacatcaagatttcaggaaaatggcgacagctgcataatggaacccccctgcttctattttgttcttttaattactatttatagccccagttaccttctgaattctgaagtgtatatacctccatgttcctgaaaacaagaaaactcttacttcctgatattccatagactgccttcccaggtgattgagaacatagagaatgttacacatttattttactctaaatgatcttttacccctgttagctaatctttgtgttttcctcaactttattaattacagtgattgcatttttagcatccagttgtaagatgaatatattaaacagctaccagtgttggtgatacctcatccttgaaaggcttagttcatttgtgttttatacttcagtttttccagcatagcagaaaatgccgcttataatttttgtgcacacaaaccttggattcccctgtaaagttgctattgtttcatagcatgcggcactggccttttttcatcctactcattacaggcaaaactcatgtcttatttatgaggattttatagatcattttctgtaacaggtgacaaaagcagaaaagaatgaagaggctgaagtatgaactacccttggagcccatatacatgatataggcaatttcttttgtatgttaattcagtcaaaaatactacccacttgatgttttctaatctgatgtgagctcatgttacacagacttttagtaagtaacccgtgactagaaaataaactggatgcttaggagagagtgtcagatgtataagatgctaataaaacctgtttaatattattgttagctgtaagtttttgggaaatactgaacaaattagtccacaatcaagtgtctacttttcccttcactgtagggcctctccctgcacagagcagtctgtttagctgtgaacaccacaatctgcagatgttcaagtcccttacataaaatggcatagtatttatatgtaacctatgcatattctcctgtatattttaaatcatctctacattaaaatacctgataaaatgtaaatggtatgtaaa

SEQ ID NO: 331686 - DNA, 1375 bp, Artificial Sequence
  derived and/or modified sequence
agaggagactcgggggccattttgtgaagagacgaagactgagcggttgtggccgcgttgccgacctccagcagcagtcggcttctctacgcagaacccgggagtaggagactcagaatcgaatctcttctccctccccttcttgtgagatttttttgatcttcagctacattttcggctttgtgagaaaccttaccatcaaacacgatggccagcaacgttaccaacaagacagatcctcgctccatgaactcccgtgtattcattgggaatctcaacactcttgtggtcaagaaatctgatgtggaggcaatcttttcgaagtatggcaaaattgtgggctgctctgttcataagggctttgccttcgttcagtatgttaatgagagaaatgcccgggctgctgtagcaggagaggatggcagaatgattgctggccaggttttagatattaacctggctgcagagccaaaagtgaaccgaggaaaagcaggtgtgaaacgatctgcagcggagatgtacggctcctcttttgacttggactatgactttcaacgggactattatgataggatgtacagttacccagcacgtgtacctcctcctcctcctattgctcgggctgtagtgccctcgaaacgtcagcgtgtatcaggaaacacttcacgaaggggcaaaagtggcttcaattctaagagtggacagcggggatcttccaagtctggaaagttgaaaggagatgaccttcaggccattaagaaggagctgacccagataaaacaaaaagtggattctctcctggaaaacctggaaaaaattgaaaaggaacagagcaaacaagcagtagagatgaagaatgataagtcagaagaggagcagagcagcagctccgtgaagaaagatgagactaatgtgaagatggagtctgaggggggtgcagatgactctgctgaggagggggacctactggatgatgatgataatgaagatcggggggatgaccagctggagttgatcaaggatgatgaaaaagaggctgaggaaggagaggatgacagagacagcgccaatggcgaggatgactcttaagcacatagtggggtttagaaatcttatcccattatttctttacctaggcgcttgtctaagatcaaatttttcaccagatcctctcccctagtatcttcagcacatgctcactgttctccccatccttgtccttcccatgttcattaattcatattgccccgcgcctagtcccattttcacttcctttgacgctcctagtagttttgttaagtcttaccctgtaatttttgcttttaattttgatacctctttatgacttaacaataaaaaggatgtatggttttta

SEQ ID NO: 331687 - DNA, 1039 bp, Artificial Sequence
  derived and/or modified sequence
agaggagactcgggggccattttgtgaagagacgaagactgagcggttgtggccgcgttgccgacctccagcagcagtcggcttctctacgcagaacccgggagtaggagactcagaatcgaatctcttctccctccccttcttggttacaaaacacttgaaatatataagttagtggaactttgcttgagtgagatttttttgatcttcagctacattttcggctttgtgagaaaccttaccatcaaacacgatggccagcaacgttaccaacaagacagatcctcgctccatgaactcccgtgtattcattgggaatctcaacactcttgtggtcaagaaatctgatgtggaggcaatcttttcgaagtatggcaaaattgtgggctgctctgttcataagggctttgccttcgttcagtatgttaatgagagaaatgcccgggctgctgtagcaggagaggatggcagaatgattgctggccaggttttagatattaacctggctgcagagccaaaagtgaaccgaggaaaagcaggtgtgaaacgatctgcagcggagatgtacggctcctcttttgacttggactatgactttcaacgggactattatgataggatgtacagttacccagcacgtgtacctcctcctcctcctattgctcgggctgtagtgccctcgaaacgtcagcgtgtatcaggaaacacttcacgaaggggcaaaagtggcttcaattctaagagtggacagcggggatcttccaagtctggaaagttgaaaggagatgaccttcaggccattaagaaggagctgacccagataaaacaaaaagtggattctctcctggaaaacctggaaaaaattgaaaaggaacagagcaaacaagcagtagagatgaagaatgataagtcagaagaggagcagagcagcagctccgtgaagaaagatgagactaatgtgaagatggagtctgaggggggtgcagatgactctgctgaggagggggacctactggatgatgatgataatgaagatcgg

SEQ ID NO: 331688 - DNA, 644 bp, Artificial Sequence
  derived and/or modified sequence
ggccgcgttgccgacctccagcagcagtcggcttctctacgcagaacccgggagtaggagactcagaatcgaatctcttctccctccccttcttggttacaaaacacttgaaatatataagttagtggaactttgcttgagtgagatttttttgatcttcagctacagtgtttccagtgtaaatgaattgattctatttattgccttttgaagaaaattatacttaatggttttcggctttgtgagaaaccttaccatcaaacacgatggccagcaacgttaccaacaagacagatcctcgctccatgaactcccgtgtattcattgggaatctcaacactcttgtggtcaagaaatctgatgtggaggcaatcttttcgaagtatggcaaaattgtgggctgctctgttcataagggctttgccttcgttcagtatgttaatgagagaaatgcccgggctgctgtagcaggagaggatggcagaatgattgctggccaggttttagatattaacctggctgcagagccaaaagtgaaccgaggaaaagcaggtgtgaaacgatctgcagcggagatgtacggctcctcttttgacttggactatgactttcaacgggactattatgataggatgtacagttac

SEQ ID NO: 331689 - DNA, 1924 bp, Artificial Sequence
  derived and/or modified sequence
cattttgtgaagagacgaagactgagcggttgtggccgcgttgccgacctccagcagcagtcggcttctctacgcagaacccgggagtaggagactcagaatcgaatctcttctccctccccttcttgggcagcaaggcgaaccccatccctactcactggagctcagctttgatttttaacctcccttccccacccttccagaacacacacattccattccaaaactgattttataaagacattttaaacataatgatgcaacttggtgtgcactacagcaaatgtacagtgagatttttttgatcttcagctacattttcggctttgtgagaaaccttaccatcaaacacgatggccagcaacgttaccaacaagacagatcctcgctccatgaactcccgtgtattcattgggaatctcaacactcttgtggtcaagaaatctgatgtggaggcaatcttttcgaagtatggcaaaattgtgggctgctctgttcataagggctttgccttcgttcagtatgttaatgagagaaatgcccgggctgctgtagcaggagaggatggcagaatgattgctggccaggttttagatattaacctggctgcagagccaaaagtgaaccgaggaaaagcaggtgtgaaacgatctgcagcggagatgtacggctcctcttttgacttggactatgactttcaacgggactattatgataggatgtacagttacccagcacgtgtacctcctcctcctcctattgctcgggctgtagtgccctcgaaacgtcagcgtgtatcaggaaacacttcacgaaggggcaaaagtggcttcaattctaagagtggacagcggggatcttccaagtctggaaagttgaaaggagatgaccttcaggccattaagaaggagctgacccagataaaacaaaaagtggattctctcctggaaaacctggaaaaaattgaaaaggaacagagcaaacaagcagtagagatgaagaatgataagtcagaagaggagcagagcagcagctccgtgaagaaagatgagactaatgtgaagatggagtctgaggggggtgcagatgactctgctgaggagggggacctactggatgatgatgataatgaagatcggggggatgaccagctggagttgatcaaggatgatgaaaaagaggctgaggaaggagaggatgacagagacagcgccaatggcgaggatgactcttaagcacatagtggggtttagaaatcttatcccattatttctttacctaggcgcttgtctaagatcaaatttttcaccagatcctctcccctagtatcttcagcacatgctcactgttctccccatccttgtccttcccatgttcattaattcatattgccccgcgcctagtcccattttcacttcctttgacgctcctagtagttttgttaagtcttaccctgtaatttttgcttttaattttgatacctctttatgacttaacaataaaaaggatgtatggtttttatcaactgtctccaaaataatctcttgttatgcagggagtacagttcttttcattcatacataagttcagtagttgcttccctaactgcaaaggcaatctcatttagttgagtagctcttgaaagcagctttgagttagaagtatgtgtgttacaccctcacattagtgtgctgtgtggggcagttcaacacaaatgtaacaatgtatttttgtgaatgagagttggcatgtcaaatgcatcctctagaaaaataattagtgttatagtcttaagatttgttttctaaagttgatactgtgggttatttttgtgaacagcctgatgtttgggaccttttttcctcaaaataaacaagtccttattaaaccaggaatttggagaaaaaaaaaaccctggtttttt

SEQ ID NO: 331690 - DNA, 531 bp, Artificial Sequence
  derived and/or modified sequence
atatataagttagtggaactttgcttgagtgagatttttttgatcttcagctacagaggacacgttactaagagtggaattaatccgtattgtgagtacgtctgtctttactgttgcctccatcttgaatttaagtcctcatattttcggctttgtgagaaaccttaccatcaaacacgatggccagcaacgttaccaacaagacagatcctcgctccatgaactcccgtgtattcattgggaatctcaacactcttgtggtcaagaaatctgatgtggaggcaatcttttcgaagtatggcaaaattgtgggctgctctgttcataagggctttgccttcgttcagtatgttaatgagagaaatgcccgggctgctgtagcaggagaggatggcagaatgattgctggccaggttttagatattaacctggctgcagagccaaaagtgaaccgaggaaaagcaggtgtgaaacgatctgcagcggagatgtacggctcctcttttgacttggactatgactttcaacggg

SEQ ID NO: 331691 - DNA, 1182 bp, Artificial Sequence
  derived and/or modified sequence
gcggttgtggccgcgttgccgacctccagcagcagtcggcttctctacgcagaacccgggagtaggagactcagaatcgaatctcttctccctccccttcttgttttcggctttgtgagaaaccttaccatcaaacacgatggccagcaacgttaccaacaagacagatcctcgctccatgaactcccgtgtattcattgggaatctcaacactcttgtggtcaagaaatctgatgtggaggcaatcttttcgaagtatggcaaaattgtgggctgctctgttcataagggctttgccttcgttcagtatgttaatgagagaaatgcccgggctgctgtagcaggagaggatggcagaatgattgctggccaggttttagatattaacctggctgcagagccaaaagtgaaccgaggaaaagcaggtgtgaaacgatctgcagcggagatgtacggctcctcttttgacttggactatgactttcaacgggactattatgataggatgtacagttacccagcacgtgtacctcctcctcctcctattgctcgggccattaagaaggagctgacccagataaaacaaaaagtggattctctcctggaaaacctggaaaaaattgaaaaggaacagagcaaacaagcagtagagatgaagaatgataagtcagaagaggagcagagcagcagctccgtgaagaaagatgagactaatgtgaagatggagtctgaggggggtgcagatgactctgctgaggagggggacctactggatgatgatgataatgaagatcggggggatgaccagctggagttgatcaaggatgatgaaaaagaggctgaggaaggagaggatgacagagacagcgccaatggcgaggatgactcttaagcacatagtggggtttagaaatcttatcccattatttctttacctaggcgcttgtctaagatcaaatttttcaccagatcctctcccctagtatcttcagcacatgctcactgttctccccatccttgtccttcccatgttcattaattcatattgccccgcgcctagtcccattttcacttcctttgacgctcctagtagttttgttaagtcttaccctgtaatttttgcttttaattttgatacctctttatgacttaacaataaaaaggatgtatggtttttatcaa

SEQ ID NO: 331692 - DNA, 629 bp, Artificial Sequence
  derived and/or modified sequence
acgaagactgagcggttgtggccgcgttgccgacctccagcagcagtcggcttctctacgcagaacccgggagtaggagactcagaatcgaatctcttctccctccccttcttgtgagatttttttgatcttcagctacagaggacacgttactaagagtggaattaatccgtattgtgagtacgtctgtctttactgttgcctccatcttgaatttaagtcctcatattttcggctttgtgagaaaccttaccatcaaacacgatggccagcaacgttaccaacaagacagatcctcgctccatgaactcccgtgtattcattgggaatctcaacactcttgtggtcaagaaatctgatgtggaggcaatcttttcgaagtatggcaaaattgtgggctgctctgttcataagggctttgccttcgttcagtatgttaatgagagaaatgcccgggctgctgtagcaggagaggatggcagaatgattgctggccaggttttagatattaacctggctgcagagccaaaagtgaaccgaggaaaagcaggtgtgaaacgatctgcagcggagatgtacggctcctcttttgacttggactatgactttcaacgggactattatgatag

SEQ ID NO: 331693 - DNA, 1156 bp, Artificial Sequence
  derived and/or modified sequence
cgaagactgagcggttgtggccgcgttgccgacctccagcagcagtcggcttctctacgcagaacccgggagtaggagactcagaatcgaatctcttctccctccccttcttgtgagatttttttgatcttcagctacattttcggctttgtgagaaaccttaccatcaaacacgatggccagcaacgttaccaacaagacagatcctcgctccatgaactcccgtgtattcattgggaatctcaacactcttgtggtcaagaaatctgatgtggaggcaatcttttcgaactcctcttttgacttggactatgactttcaacgggactattatgataggatgtacagttacccagcacgtgtacctcctcctcctcctattgctcgggctgtagtgccctcgaaacgtcagcgtgtatcaggaaacacttcacgaaggggcaaaagtggcttcaattctaagagtggacagcggggatcttccaagtctggaaagttgaaaggagatgaccttcaggccattaagaaggagctgacccagataaaacaaaaagtggattctctcctggaaaacctggaaaaaattgaaaaggaacagagcaaacaagcagtagagatgaagaatgataagtcagaagaggagcagagcagcagctccgtgaagaaagatgagactaatgtgaagatggagtctgaggggggtgcagatgactctgctgaggagggggacctactggatgatgatgataatgaagatcggggggatgaccagctggagttgatcaaggatgatgaaaaagaggctgaggaaggagaggatgacagagacagcgccaatggcgaggatgactcttaagcacatagtggggtttagaaatcttatcccattatttctttacctaggcgcttgtctaagatcaaatttttcaccagatcctctcccctagtatcttcagcacatgctcactgttctccccatccttgtccttcccatgttcattaattcatattgccccgcgcctagtcccattttcacttcctttgacgctcctagtagttttgttaagtcttaccctgtaatttttgcttttaattttgatacctctttatgacttaacaataaaaaggatgtatggtttttatcaactgtctccaa

SEQ ID NO: 331694 - DNA, 1252 bp, Artificial Sequence
  derived and/or modified sequence
gcctggagcagcagcagccaggatgacctggagccaggggggccttcggaacagatgcacacccttcctgggtgatgttttcggctttgtgagaaaccttaccatcaaacacgatggccagcaacgttaccaacaagacagatcctcgctccatgaactcccgtgtattcattgggaatctcaacactcttgtggtcaagaaatctgatgtggaggcaatcttttcgaagtatggcaaaattgtgggctgctctgttcataagggctttgccttcgttcagtatgttaatgagagaaatgcccgggctgctgtagcaggagaggatggcagaatgattgctggccaggttttagatattaacctggctgcagagccaaaagtgaaccgaggaaaagcaggtgtgaaacgatctgcagcggagatgtacggctcctcttttgacttggactatgactttcaacgggactattatgataggatgtacagttacccagcacgtgtacctcctcctcctcctattgctcgggctgtagtgccctcgaaacgtcagcgtgtatcaggaaacacttcacgaaggggcaaaagtggcttcaattctaagagtggacagcggggatcttccaagtctggaaagttgaaaggagatgaccttcaggccattaagaaggagctgacccagataaaacaaaaagtggattctctcctggaaaacctggaaaaaattgaaaaggaacagagcaaacaagcagtagagatgaagaatgataagtcagaagaggagcagagcagcagctccgtgaagaaagatgagactaatgtgaagatggagtctgaggggggtgcagatgactctgctgaggagggggacctactggatgatgatgataatgaagatcggggggatgaccagctggagttgatcaaggatgatgaaaaagaggctgaggaaggagaggatgacagagacagcgccaatggcgaggatgactcttaagcacatagtggggtttagaaatcttatcccattatttctttacctaggcgcttgtctaagatcaaatttttcaccagatcctctcccctagtatcttcagcacatgctcactgttctccccatccttgtccttcccatgttcattaattcatattgccccgcgcctagtcccattttcacttcctttgacgctcctagtagttttgttaagtcttaccctgtaatttttgcttttaattttgatacctctttatgac

SEQ ID NO: 331695 - DNA, 580 bp, Artificial Sequence
  derived and/or modified sequence
gactgagcggttgtggccgcgttgccgacctccagcagcagtcggcttctctacgcagaacccgggagtaggagactcagaatcgaatctcttctccctccccttcttgggcagcaaggcgaaccccatccctactcactggagctcagctttgatttttaacctcccttccccacccttccagaacacacacattccattccaaaactgattttataaagacattttaaacataatgatgcaacttggtgtgcactacagcaaatgtacagtgagatttttttgatcttcagctacagaatactagtcaagtgactgaagattgatgtggatttgggagaggagttttcggctttgtgagaaaccttaccatcaaacacgatggccagcaacgttaccaacaagacagatcctcgctccatgaactcccgtgtattcattgggaatctcaacactcttgtggtcaagaaatctgatgtggaggcaatcttttcgaagtatggcaaaattgtgggctgctctgttcataagggctttgccttcgttcagtatgttaatgagagaaatgcccgggctgctg

SEQ ID NO: 331696 - DNA, 599 bp, Artificial Sequence
  derived and/or modified sequence
cattttgtgaagagacgaagactgagcggttgtggccgcgttgccgacctccagcagcagtcggcttctctacgcagaacccgggagtaggagactcagaatcgaatctcttctccctccccttcttgcagttgggttagaggaggaggagccttttagcctctcataaactgacctctctacttcctcgtgtatttttaagattgattgatgatgtggaaagggctttgcttgtctgctactgaaaactttatccttgcggtttttgtggaaactgcttttggaaagagaaaagaaatgaactttactgacttgacatttttgcacctcccgtttttctaatctgggctatttttatttttgtttttttacagtgagatttttttgatcttcagctacattttcggctttgtgagaaaccttaccatcaaacacgatggccagcaacgttaccaacaagacagatcctcgctccatgaactcccgtgtattcattgggaatctcaacactcttgtggtcaagaaatctgatgtggaggcaatcttttcgaagtatggcaaaattgtgggctgctctgttcataagggctttgccttcg

SEQ ID NO: 331697 - protein, 417 aa, Artificial Sequence
  derived and/or modified sequence
MASYLYGVLFAVGLCAPIYCVSPANAPSAYPRPSSTKSTPASQVYSLNTDFAFRLYRRLVLETPSQNIFFSPVSVSTSLAMLSLGAHSVTKTQILQGLGFNLTHTPESAIHQGFQHLVHSLTVPSKDLTLKMGSALFVKKELQLQANFLGNVKRLYEAEVFSTDFSNPSIAQARINSHVKKKTQGKVVDIIQGLDLLTAMVLVNHIFFKAKWEKPFHPEYTRKNFPFLVGEQVTVHVPMMHQKEQFAFGVDTELNCFVLQMDYKGDAVAFFVLPSKGKMRQLEQALSARTLRKWSHSLQKRWIEVFIPRFSISASYNLETILPKMGIQNVFDKNADFSGIAKRDSLQVSKATHKAVLDVSEEGTEATAATTTKFIVRSKDGPSYFTVSFNRTFLMMITNKATDGILFLGKVENPTKS

SEQ ID NO: 331698 - protein, 337 aa, Artificial Sequence
  derived and/or modified sequence
MLSLGAHSVTKTQILQGLGFNLTHTPESAIHQGFQHLVHSLTVPSKDLTLKMGSALFVKKELQLQANFLGNVKRLYEAEVFSTDFSNPSIAQARINSHVKKKTQGKVVDIIQGLDLLTAMVLVNHIFFKAKWEKPFHPEYTRKNFPFLVGEQVTVHVPMMHQKEQFAFGVDTELNCFVLQMDYKGDAVAFFVLPSKGKMRQLEQALSARTLRKWSHSLQKRWIEVFIPRFSISASYNLETILPKMGIQNVFDKNADFSGIAKRDSLQVSKATHKAVLDVSEEGTEATAATTTKFIVRSKDGPSYFTVSFNRTFLMMITNKATDGILFLGKVENPTKS

SEQ ID NO: 331699 - DNA, 1254 bp, Artificial Sequence
  derived and/or modified sequence
atggcttcctacttgtatggtgtgcttttcgcggttggcctgtgtgcccctatctattgtgtaagcccggcaaatgcaccgtccgcgtatccccgtccatcatcgactaaatctaccccggcttctcaggtgtacagcctcaatactgacttcgctttccggttgtaccggagactggtactggagaccccaagccagaatattttcttctcacccgtgtcagtcagtaccagtctggccatgctgtcccttggggctcattcagttactaaaactcagatattacaaggacttggatttaacctcactcatacacccgagagcgctatacatcagggcttccagcatctggtgcactcccttacggttccctccaaggacttgaccctgaagatgggatcggctctattcgttaagaaggagctccaattgcaggcgaacttcctgggcaatgttaaaagactgtatgaggcagaggtgttctccaccgatttctccaatccatcgatcgctcaagccaggatcaattcccatgtgaagaagaagacacagggtaaggtagttgatattattcaagggctggacctattaaccgcaatggtgctggtcaatcatatctttttcaaagccaagtgggagaaaccgtttcatccagagtacactcgtaagaactttcccttccttgtgggcgagcaggtgacggtacatgttcctatgatgcatcagaaagaacagtttgcttttggtgttgacactgaactcaactgctttgtactgcagatggattacaagggcgatgcagtcgcattttttgtacttccatctaaagggaaaatgagacagttggaacaggctttgtctgcgagaactctacgaaaatggagtcacagtctgcagaaacggtggatcgaagtgttcattcccagattctcaataagtgcatcgtacaacctggagacgatcctgcctaagatgggaattcagaatgtctttgataaaaacgctgatttctccggcattgcaaagcgcgattctcttcaagtgtccaaagccacccataaagccgtattagacgtatcagaagagggtaccgaggccaccgcagcaaccaccacgaaatttatcgtgagaagcaaagacgggccttcttacttcacagtgtctttcaacaggacatttctgatgatgataactaataaggcaactgatgggatcttgttccttggtaaagtcgagaatccaaccaaatcctag

SEQ ID NO: 331700 - DNA, 1254 bp, Artificial Sequence
  derived and/or modified sequence
atggccagctacctttatggggttttgttcgctgtgggactgtgcgccccgatctattgtgtgtcccccgcaaacgctccatctgcttatcctcgtccatcttcgaccaaatccacaccggctagccaggtctactcgctgaacactgacttcgcatttcgcctatatcggcgcctcgtgttagagactccttctcaaaacattttcttctctcccgtgagcgtttcaacctctctggcaatgctgtccttaggcgcccattcagtgaccaagacccagatcctccaggggctcgggtttaatctgacccataccccagaatcagccatccatcagggatttcagcacctggttcacagcctgactgtgccttctaaggacctgacgcttaaaatgggcagcgccctttttgtgaagaaggaactacaactgcaggccaatttcctgggaaacgttaagcgcctgtacgaggcggaagtgttctctactgatttttctaacccctcaatcgctcaagctcgtatcaatagccacgtgaaaaagaagacacagggtaaggtcgtcgatatcatacagggcttggatctgcttactgcaatggtgctcgtgaatcatatcttcttcaaggcaaaatgggagaaacctttccatccagaatatacaaggaagaactttccttttctggttggcgaacaggtcacagtgcacgtgccgatgatgcaccagaaagagcagttcgcttttggggtggatacagagttaaattgctttgttctgcaaatggattataaaggggacgccgtcgccttctttgtgctgccgtccaaaggcaaaatgcgccaactcgaacaggccctgagcgcacgcacgctccgtaagtggagccattccctgcaaaagagatggatcgaagttttcattccaagattctctatctcagcttcgtataatctagaaaccatcctgcctaaaatgggaatccagaacgtgtttgataaaaacgcagatttttccggaatagcaaagcgggattcactgcaggtttcaaaagcaacacataaggcagtgcttgacgtgtcggaggagggaacagaagcaactgctgctaccacaacaaaatttatagtccgtagcaaggatgggcccagctactttacagtgtcatttaatagaacatttctaatgatgattactaataaggcgactgatgggatactgttcctcggaaaggtcgagaacccaactaaaagttag

SEQ ID NO: 331701 - DNA, 1254 bp, Artificial Sequence
  derived and/or modified sequence
atggcctcttacttatatggcgtgctgttcgccgtcgggctctgcgctcccatctactgcgtgtcccctgcaaatgccccatccgcctatcccaggccatcgtcaaccaaatctacgcctgcaagccaggtctacagcctgaacacggattttgctttccgcctttaccgccgtcttgttcttgaaacccctagccagaatatctttttctctcccgtcagcgtttccactagcctcgccatgctctccttaggagctcactctgtcactaagacacagatcctgcaagggttaggatttaatctgacccatacacccgaatctgccatacaccaaggttttcagcacctcgtgcattctctgacagtgcctagcaaagatttaacgttaaagatgggctcggccctgtttgtcaaaaaagagcttcaactgcaagccaacttcctcggaaatgtcaaacgcctttacgaagctgaggtcttctcgaccgacttttccaatccaagcattgcacaagcacgcatcaattctcacgtcaaaaaaaagactcaagggaaggttgttgatatcatacagggtctggatctgcttaccgccatggtcttggttaaccatatattttttaaggctaaatgggaaaaacctttccatccagagtatacccgtaaaaacttcccgttcttagtgggcgagcaggttaccgttcacgtccccatgatgcaccagaaggagcagttcgcatttggggtagacactgagctcaattgtttcgtattgcagatggattataaaggcgacgcagtggcattttttgtactcccatctaaaggcaagatgcggcagctggaacaggccctcagtgcacggactctgagaaaatggtcacactcactgcagaagagatggatcgaagttttcattccaagattctctatctcagcttcgtataatctagaaaccatcctgcctaaaatgggaatccagaacgtgtttgataaaaacgcagatttttccggaatagcaaagcgggattcactgcaggtttcaaaagcaacacataaggcagtgcttgacgtgtcggaggagggaacagaagcaactgctgctaccacaacaaaatttatagtccgtagcaaggatgggcccagctactttacagtgtcatttaatagaacatttctaatgatgattactaataaggcaacagacggcatcctattccttggaaaagttgaaaaccccactaaaagttag

SEQ ID NO: 331702 - DNA, 1254 bp, Artificial Sequence
  derived and/or modified sequence
atggccagctacctgtacggcgtgctgttcgccgtgggcctgtgcgcccccatctactgcgtgagccccgccaacgcccccagcgcctaccccagacccagcagcaccaagagcacccccgccagccaggtgtacagcctgaacaccgacttcgccttcagactgtacagaagactggtgctggagacccccagccagaacatcttcttcagccccgtgagcgtgagcaccagcctggccatgctgagcctgggcgcccacagcgtgaccaagacccagatcctgcagggcctgggcttcaacctgacccacacccccgagagcgccatccaccagggcttccagcacctggtgcacagcctgaccgtgcccagcaaggacctgaccctgaagatgggcagcgccctgttcgtgaagaaggagctgcagctgcaggccaacttcctgggcaacgtgaagagactgtacgaggccgaggtgttcagcaccgacttcagcaaccccagcatcgcccaggccagaatcaacagccacgtgaagaagaagacccagggcaaggtggtggacatcatccagggcctggacctgctgaccgccatggtgctggtgaaccacatcttcttcaaggccaagtgggagaagcccttccaccccgagtacaccagaaagaacttccccttcctggtgggcgagcaggtgaccgtgcacgtgcccatgatgcaccagaaggagcagttcgccttcggcgtggacaccgagctgaactgcttcgtgctgcagatggactacaagggcgacgccgtggccttcttcgtgctgcccagcaagggcaagatgagacagctggagcaggccctgagcgccagaaccctgagaaagtggagccacagcctgcagaagagatggatcgaggtgttcatccccagattcagcatcagcgccagctacaacctggagaccatcctgcccaagatgggcatccagaacgtgttcgacaagaacgccgacttcagcggcatcgccaagagagacagcctgcaggtgagcaaggccacccacaaggccgtgctggacgtgagcgaggagggcaccgaggccaccgccgccaccaccaccaagttcatcgtgagaagcaaggacggccccagctacttcaccgtgagcttcaacagaaccttcctgatgatgatcaccaacaaggccaccgacggcatcctgttcctgggcaaggtggagaaccccaccaagagctag

SEQ ID NO: 331703 - DNA, 1254 bp, Artificial Sequence
  derived and/or modified sequence
atggcctcatatctgtatggggtgttatttgccgtggggttgtgcgcaccgatttattgtgtctctcctgctaacgctcctagtgcttatcctaggcccagctccaccaagagtacccctgcatcacaagtgtacagcctgaatacagactttgcttttagactgtatcgccggctcgtactggagacgccaagccagaacatcttcttttctcctgtgtctgtgagtacgtccttggcgatgctgtccctgggagcacatagtgtcaccaaaacacagattctccaggggctcggtttcaatctaactcatacacctgaaagcgccatccaccagggatttcaacaccttgttcacagtctgacggtgccgtccaaagatcttacgctgaaaatgggctcagctctgttcgtgaaaaaggaactgcagctacaggccaactttctgggcaatgtgaagcggctatatgaggccgaggttttctctactgatttctccaacccgtccatcgcacaagctcggatcaactctcatgttaagaaaaagacacagggtaaagtcgttgatatcattcagggacttgacctactgacggcaatggtcctggtgaaccatattttcttcaaagcgaagtgggaaaagcccttccaccctgaatatactcgaaagaattttcctttcctagtgggcgaacaggtgactgtgcacgtaccaatgatgcaccagaaggaacaatttgccttcggagtagatactgagctgaactgcttcgtgctacagatggattacaaaggggatgctgtcgctttctttgtgttaccctctaaaggtaagatgcggcagttggaacaggctttgtccgcccggaccttgagaaaatggagtcacagtcttcagaagagatggatcgaagtgtttatcccacgcttcagcattagtgcaagctataatctcgagactatcttacccaaaatgggaatccagaacgtgttcgataaaaatgcagattttagcggcatcgcgaagcgcgacagcctgcaggtctctaaggctacacacaaggctgtccttgatgtctcagaagaaggaaccgaggctacagctgcaaccactactaaattcattgtgagatctaaggatggaccaagctattttaccgtttcctttaatcgaacctttctgatgatgattaccaacaaggctactgacggaatactttttctcggaaaagtcgagaatccaacgaagtcctag

SEQ ID NO: 331704 - DNA, 1254 bp, Artificial Sequence
  derived and/or modified sequence
atggccagctacctgtatggagtgctgtttgctgtgggcctgtgtgcccccatctactgtgtgtccccagccaatgcccccagcgcctacccccggcccagcagcaccaagagcaccccagccagccaggtgtacagcctgaacacagactttgccttccggctgtacagaaggctggtgctggagacccccagccagaacatcttcttcagccctgtgtctgtgtccaccagcctggccatgctgagcctgggcgcccacagcgtgaccaagacccagatcctgcagggcctgggcttcaacctgacccacaccccagagagcgccatccaccagggcttccagcacctggtgcacagcctgactgtgcccagcaaggacctgaccctgaagatgggcagcgccctgtttgtgaagaaggagctgcagctgcaggccaacttcctgggcaatgtgaagaggctgtatgaggccgaggtgttcagcacagacttcagcaaccccagcatcgcccaggcccgcatcaacagccacgtgaagaagaagacccagggcaaggtggtggacatcatccagggcctggacctgctgacagccatggtgctggtgaaccacatcttcttcaaggccaagtgggagaagcccttccaccctgagtacaccaggaagaacttccccttcctggtgggggagcaggtgacagtgcacgtgcccatgatgcaccagaaggagcagtttgccttcggcgtggacacagagctgaactgctttgtgctgcagatggactacaagggagatgctgtggccttctttgtgctgcccagcaagggcaagatgaggcagctggagcaggccctgagcgcccggaccctgaggaagtggagccacagcctgcagaagcgctggattgaggtgttcatcccccgcttcagcatcagcgccagctacaacctggagaccatcctgcccaagatgggcatccagaatgtgtttgacaagaatgctgacttcagcggcatcgccaagagggacagcctgcaggtgtccaaggccacccacaaggctgtgctggatgtgtctgaggagggcacagaggccacagctgccaccaccaccaagttcatcgtgcgcagcaaggatggccccagctacttcaccgtgtccttcaacagaaccttcctgatgatgatcaccaacaaggccacagatggcatcctcttcctgggcaaggtggagaaccccaccaagagctag

SEQ ID NO: 331705 - DNA, 1254 bp, Artificial Sequence
  derived and/or modified sequence
atggccagctacctgtacggcgtgctgttcgccgtgggcctgtgcgcgcccatttattgcgtaagccctgccaacgctccatccgcataccctcgccctagctcaacaaagagcaccccagcctcacaggtgtattccctgaacaccgatttcgcgttccgattgtacaggaggctagtgctggagacaccgtcccagaatatttttttttctcccgtgtcagtgtcgacatccctggctatgctgtccttgggcgcccactcggtcactaagactcaaattctccaaggtttaggttttaatctgacccatacgccagagtccgcaatacaccagggcttccagcatctggtccacagtttaactgtgccatcaaaagatctcactctgaagatgggatcagctctgtttgtcaagaaggaattgcagctgcaagcaaacttccttggcaacgtcaagaggctgtacgaggccgaagtgttctcaaccgacttcagtaacccatcaatcgctcaagcaaggattaattcccacgtaaagaaaaagactcaggggaaggtcgtcgatatcatccagggattggatctgctgacagctatggtcctagtcaaccatatcttttttaaagccaagtgggagaaacctttccatcccgaatacacccgaaagaattttccctttctcgtcggggagcaagtgactgttcatgtaccaatgatgcaccagaaggaacagtttgcctttggtgtagatacagagctcaactgcttcgttttacagatggattacaagggggacgccgtggctttttttgtccttccctcaaaggggaaaatgagacagttggaacaggccctatccgccagaaccctcagaaagtggtcccactctctccagaagcgctggatcgaggttttcattcctagattttccatcagtgcctcatacaacttagaaactattctacctaaaatgggtatccaaaacgtgttcgacaaaaatgctgacttttcgggaatcgctaagcgggatagcctgcaagtgtctaaagccactcataaagctgtgctcgacgtttcagaagagggcaccgaggccactgcagcaacaactacgaagttcattgtgagaagcaaagacggccctagctactttacagtgtcattcaaccgaacttttctgatgatgatcacgaacaaggcaactgacggaattttatttctgggcaaagtcgagaaccctaccaagagctag

SEQ ID NO: 331706 - RNA, 1254 nt, Artificial Sequence
  derived and/or modified sequence
auggccagcuaccuuuaugggguuuuguucgcugugggacugugcgccccgaucuauugugugucccccgcaaacgcuccaucugcuuauccucguccaucuucgaccaaauccacaccggcuagccaggucuacucgcugaacacugacuucgcauuucgccuauaucggcgccucguguuagagacuccuucucaaaacauuuucuucucucccgugagcguuucaaccucucuggcaaugcuguccuuaggcgcccauucagugaccaagacccagauccuccaggggcucggguuuaaucugacccauaccccagaaucagccauccaucagggauuucagcaccugguucacagccugacugugccuucuaaggaccugacgcuuaaaaugggcagcgcccuuuuugugaagaaggaacuacaacugcaggccaauuuccugggaaacguuaagcgccuguacgaggcggaaguguucucuacugauuuuucuaaccccucaaucgcucaagcucguaucaauagccacgugaaaaagaagacacaggguaaggucgucgauaucauacagggcuuggaucugcuuacugcaauggugcucgugaaucauaucuucuucaaggcaaaaugggagaaaccuuuccauccagaauauacaaggaagaacuuuccuuuucugguuggcgaacaggucacagugcacgugccgaugaugcaccagaaagagcaguucgcuuuugggguggauacagaguuaaauugcuuuguucugcaaauggauuauaaaggggacgccgucgccuucuuugugcugccguccaaaggcaaaaugcgccaacucgaacaggcccugagcgcacgcacgcuccguaaguggagccauucccugcaaaagagauggaucgaaguuuucauuccaagauucucuaucucagcuucguauaaucuagaaaccauccugccuaaaaugggaauccagaacguguuugauaaaaacgcagauuuuuccggaauagcaaagcgggauucacugcagguuucaaaagcaacacauaaggcagugcuugacgugucggaggagggaacagaagcaacugcugcuaccacaacaaaauuuauaguccguagcaaggaugggcccagcuacuuuacagugucauuuaauagaacauuucuaaugaugauuacuaauaaggcgacugaugggauacuguuccucggaaaggucgagaacccaacuaaaaguuag

SEQ ID NO: 331707 - RNA, 1254 nt, Artificial Sequence
  derived and/or modified sequence
auggccucuuacuuauauggcgugcuguucgccgucgggcucugcgcucccaucuacugcguguccccugcaaaugccccauccgccuaucccaggccaucgucaaccaaaucuacgccugcaagccaggucuacagccugaacacggauuuugcuuuccgccuuuaccgccgucuuguucuugaaaccccuagccagaauaucuuuuucucucccgucagcguuuccacuagccucgccaugcucuccuuaggagcucacucugucacuaagacacagauccugcaaggguuaggauuuaaucugacccauacacccgaaucugccauacaccaagguuuucagcaccucgugcauucucugacagugccuagcaaagauuuaacguuaaagaugggcucggcccuguuugucaaaaaagagcuucaacugcaagccaacuuccucggaaaugucaaacgccuuuacgaagcugaggucuucucgaccgacuuuuccaauccaagcauugcacaagcacgcaucaauucucacgucaaaaaaaagacucaagggaagguuguugauaucauacagggucuggaucugcuuaccgccauggucuugguuaaccauauauuuuuuaaggcuaaaugggaaaaaccuuuccauccagaguauacccguaaaaacuucccguucuuagugggcgagcagguuaccguucacguccccaugaugcaccagaaggagcaguucgcauuugggguagacacugagcucaauuguuucguauugcagauggauuauaaaggcgacgcaguggcauuuuuuguacucccaucuaaaggcaagaugcggcagcuggaacaggcccucagugcacggacucugagaaaauggucacacucacugcagaagagauggaucgaaguuuucauuccaagauucucuaucucagcuucguauaaucuagaaaccauccugccuaaaaugggaauccagaacguguuugauaaaaacgcagauuuuuccggaauagcaaagcgggauucacugcagguuucaaaagcaacacauaaggcagugcuugacgugucggaggagggaacagaagcaacugcugcuaccacaacaaaauuuauaguccguagcaaggaugggcccagcuacuuuacagugucauuuaauagaacauuucuaaugaugauuacuaauaaggcaacagacggcauccuauuccuuggaaaaguugaaaaccccacuaaaaguuag

SEQ ID NO: 331708 - DNA, 1014 bp, Artificial Sequence
  derived and/or modified sequence
atgttgagcctcggtgctcatagtgtgaccaagacccagatcctgcagggactgggcttcaacttgacccacacccccgaatcagctatccaccaggggttccagcacctggtgcacagcctgactgtgccatcaaaagaccttactttaaaaatgggctccgccctcttcgtaaaaaaggaattgcaacttcaggccaattttctggggaatgtgaaacgtctgtatgaagctgaggttttcagcacagactttagcaatccgtctatcgctcaagctcgaatcaatagccacgtcaagaaaaaaacgcaaggtaaggtggtggacatcattcagggtttagacttgctgacagctatggtcctcgtaaatcatatctttttcaaggccaagtgggaaaaacctttccaccccgaatacacgaggaagaacttcccgtttctggtgggggaacaggttacggtacatgttcccatgatgcaccagaaggaacagttcgcctttggtgtggatactgagcttaattgcttcgtgttacagatggattacaaaggcgacgccgtggcttttttcgttctgccaagcaaagggaagatgcggcaactggaacaggcgctcagtgctaggactctgcggaaatggtcgcacagcctgcagaagcggtggattgaggtgtttatacccagattttctatttcggcaagctacaatcttgagaccatcttacctaaaatggggatacaaaacgtttttgacaagaatgcggacttttccggcatagccaagcgagactcgcttcaggtatctaaggccacccacaaggccgtgctggatgtgtctgaagaagggactgaagcaaccgctgccactaccacgaaatttatcgtgagaagcaaggacgggccaagctactttacagtgtcattcaatcggacgtttttgatgatgatcactaacaaagccaccgatggaatcctgttcctcggaaaggtggaaaatcccactaagagctag

SEQ ID NO: 331709 - DNA, 1462 bp, Artificial Sequence
  derived and/or modified sequence
tggagggagaggagagattaaagtgaggagagagctacaaccaagtaagcaagtgtcagggctcaccaaccatgcaaggacagggcaggagaagaggaacctgcaaagtccatgaagcagaaacatcaaaaagcatgggatttggaatttgagacctgactttgaagcccacacagaacacagacaagtcaaccatgctatttgggcaaagacctgaccttgaagatgggaagtgccctcttcgtcaagaaggagctgcagctgcaggcaaatttcttgggcaatgtcaagaggctgtatgaagcagaagtcttttctacagatttctccaacccctccattgcccaggcgaggatcaacagccatgtgaaaaagaagacccaagggaaggttgtagacataatccaaggccttgaccttctgacggccatggttctggtgaaccacattttctttaaagccaagtgggagaagccctttcaccctgaatatacaagaaagaacttcccattcctggtgggcgagcaggtcactgtgcatgtccccatgatgcaccagaaagagcagttcgcttttggggtggatacagagctgaactgctttgtgctgcagatggattacaagggagatgccgtggccttctttgtcctccctagcaagggcaagatgaggcaactggaacaggccttgtcagccagaacactgagaaagtggagccactcactccagaaaaggtggatagaggtgttcatccccagattttccatttctgcctcctacaatctggaaaccatcctcccgaagatgggcatccaaaatgtctttgacaaaaatgctgatttttctggaattgcaaagagagactccctgcaggtttctaaagcaacccacaaggctgtgctggatgtcagtgaagagggcactgaggccacagcagctaccaccaccaagttcatagtccgatcgaaggatggcccctcttacttcactgtctccttcaataggaccttcctgatgatgattacaaataaagccacagacggtattctctttctagggaaagtggaaaatcccactaaatcctaggtgggaaatggcctgttaactgatggcacattgctaatgcacaagaaataacaaaccacatccctctttctgttctgagggtgcatttgaccccagtggagctggattcgctggcagggatgccacttccaaggctcaatcaccaaaccatcaacagggaccccagtcacaagccaacacccattaaccccagtcagtgcccttttccacaaattctcccaggtaactagcttcatgggatgttgctgggttaccatatttccattccttggggctcccaggaatggaaatacgccaacccaggttaggcacctctattgcagaattacaataacacattcaataaaactaaaatatgaattcatctgtcaacaga

SEQ ID NO: 331710 - DNA, 1014 bp, Artificial Sequence
  derived and/or modified sequence
atgttgtcacttggtgcccacagcgtgaccaaaacccagatcctccagggccttggcttcaacctgactcatactcccgagtccgcaatacatcaggggtttcagcatttagtgcattcactgacggtgcctagcaaggatttgactctgaagatgggctccgccttattcgtaaaaaaagaactgcaattacaggcgaatttcttaggaaatgtcaagaggttgtatgaagccgaggttttttcaacagattttagcaatcctagtatcgctcaggcaagaattaatagccacgttaaaaaaaagacgcagggcaaagtggtggacatcattcaaggccttgacctcttgaccgcaatggtgctcgtgaatcatatcttttttaaggctaaatgggaaaagccatttcaccctgagtacacgagaaaaaactttccatttctagtcggcgagcaggttacagtgcacgtgccaatgatgcaccagaaggaacagtttgcattcggagtcgatacggagttgaactgttttgtactgcaaatggattataaaggcgatgctgttgctttcttcgttctgccaagtaaagggaagatgcgccagctggaacaggcactttcggctcgaacacttcggaagtggtcacacagcttacagaagcgctggattgaggtttttataccgagatttagtatcagtgcctcctacaatctggaaactatcctaccaaagatgggcattcaaaatgtgtttgacaagaacgccgacttctccggcatcgcaaagcgggatagtctgcaagtcagcaaagccactcataaagcagtgcttgatgtgagtgaggaggggactgaggccactgctgccacaacaacaaagtttatcgtgcgatccaaggacggcccttcctactttacagtgtctttcaacaggaccttcctcatgatgatcactaacaaagctactgatgggattctgtttctgggcaaggttgagaaccccacaaagagctag

SEQ ID NO: 331711 - DNA, 1014 bp, Artificial Sequence
  derived and/or modified sequence
atgctgagcctcggcgctcattccgtaacgaagacccaaattcttcagggtctcggctttaacctcacccacacccccgagtccgcaattcaccaaggcttccaacatctagttcactctcttaccgtgccctctaaggatctaaccctaaaaatgggctcagccctatttgttaagaaagaactccagttgcaggctaacttcctggggaacgtgaagcgcctatacgaagcagaggtcttttctaccgacttttccaacccgtctatcgcccaggcccgaattaatagtcatgtgaagaaaaaaactcagggaaaagtggtcgatattattcagggcctggacctgctgaccgctatggtacttgttaatcatatcttctttaaggcaaagtgggagaaacctttccatcccgaatacacacgaaagaacttcccatttctggtgggcgaacaagttactgtgcacgtgccaatgatgcatcagaaagagcagttcgcctttggggttgatacagaattgaattgttttgtcttacaaatggattacaagggcgacgccgtggccttctttgtcctcccttcgaaaggaaaaatgcgccagctggagcaggccctgagcgcccgtacactgcgaaaatggtcccattcattacaaaaacgctggattgaagtattcattccacgattcagtatttcagcttcttacaaccttgagacaattcttccaaaaatggggatccagaacgttttcgacaaaaatgcagatttctccgggatcgcaaaacgggactccctgcaggtttcaaaggctactcataaagcagtgctcgatgtgagtgaggaagggaccgaggcaaccgccgctacgactactaagtttattgttagaagcaaggacggtccttcatatttcacagtttcctttaatagaactttcctcatgatgattacaaataaagccaccgacgggatattgtttctgggcaaggtcgaaaatccaaccaagagctag

SEQ ID NO: 331712 - DNA, 1014 bp, Artificial Sequence
  derived and/or modified sequence
atgctgagcctgggcgcccacagcgtgaccaagacccagatcctgcagggcctgggcttcaacctgacccacacccccgagagcgccatccaccagggcttccagcacctggtgcacagcctgaccgtgcccagcaaggacctgaccctgaagatgggcagcgccctgttcgtgaagaaggagctgcagctgcaggccaacttcctgggcaacgtgaagagactgtacgaggccgaggtgttcagcaccgacttcagcaaccccagcatcgcccaggccagaatcaacagccacgtgaagaagaagacccagggcaaggtggtggacatcatccagggcctggacctgctgaccgccatggtgctggtgaaccacatcttcttcaaggccaagtgggagaagcccttccaccccgagtacaccagaaagaacttccccttcctggtgggcgagcaggtgaccgtgcacgtgcccatgatgcaccagaaggagcagttcgccttcggcgtggacaccgagctgaactgcttcgtgctgcagatggactacaagggcgacgccgtggccttcttcgtgctgcccagcaagggcaagatgagacagctggagcaggccctgagcgccagaaccctgagaaagtggagccacagcctgcagaagagatggatcgaggtgttcatccccagattcagcatcagcgccagctacaacctggagaccatcctgcccaagatgggcatccagaacgtgttcgacaagaacgccgacttcagcggcatcgccaagagagacagcctgcaggtgagcaaggccacccacaaggccgtgctggacgtgagcgaggagggcaccgaggccaccgccgccaccaccaccaagttcatcgtgagaagcaaggacggccccagctacttcaccgtgagcttcaacagaaccttcctgatgatgatcaccaacaaggccaccgacggcatcctgttcctgggcaaggtggagaaccccaccaagagctag

SEQ ID NO: 331713 - DNA, 1014 bp, Artificial Sequence
  derived and/or modified sequence
atgctgagcctcggggctcactccgtcaccaagacgcagattctgcagggactcggcttcaacctgactcatacccctgagagcgccatccaccaggggttccaacacctagtccattctctgacagtgcccagtaaggacctgacgctgaagatgggcagtgctttgttcgtgaagaaggaattacagcttcaggctaactttctggggaatgtcaagcgcctttatgaagcagaggttttttccactgacttttctaatcccagcatcgctcaagcccgcattaatagccacgttaaaaaaaagacccagggtaaggtggtggatataattcagggcttagatctgctaactgctatggttctagtaaatcacatttttttcaaagctaaatgggagaaacctttccacccagaatacacaaggaagaattttccatttctggtgggagaacaggtcaccgtgcacgttccaatgatgcatcagaaggagcagtttgcattcggagtggataccgagctcaactgtttcgtgctgcagatggactacaagggcgacgccgttgcctttttcgtacttccttcaaaaggaaagatgcgccagttagagcaggctctaagcgctaggactctgaggaaatggtcccacagcctccagaaaaggtggattgaagtgtttattccccggttcagtattagtgcctcttacaatctcgagactatcctgccaaagatgggaatccaaaatgtgttcgataagaacgccgatttttctggcatcgctaagcgcgactcccttcaagtgtcaaaagcaacccacaaggccgtcttggatgtttctgaggaagggactgaggcaacagccgcaaccacgactaagttcatcgtgagaagtaaagatgggccttcttatttcaccgtcagctttaaccgcacattcctgatgatgatcactaataaagctaccgacggaatcctgtttttgggcaaagtggaaaatcccacaaagtcttag

SEQ ID NO: 331714 - DNA, 1014 bp, Artificial Sequence
  derived and/or modified sequence
atgctgagcctgggcgcccacagcgtgaccaagacccagatcctgcagggcctgggcttcaacctgacccacaccccagagagcgccatccaccagggcttccagcacctggtgcacagcctgactgtgcccagcaaggacctgaccctgaagatgggcagcgccctgtttgtgaagaaggagctgcagctgcaggccaacttcctgggcaatgtgaagaggctgtatgaggccgaggtgttcagcacagacttcagcaaccccagcatcgcccaggcccgcatcaacagccacgtgaagaagaagacccagggcaaggtggtggacatcatccagggcctggacctgctgacagccatggtgctggtgaaccacatcttcttcaaggccaagtgggagaagcccttccaccctgagtacaccaggaagaacttccccttcctggtgggggagcaggtgacagtgcacgtgcccatgatgcaccagaaggagcagtttgccttcggcgtggacacagagctgaactgctttgtgctgcagatggactacaagggagatgctgtggccttctttgtgctgcccagcaagggcaagatgaggcagctggagcaggccctgagcgcccggaccctgaggaagtggagccacagcctgcagaagcgctggattgaggtgttcatcccccgcttcagcatcagcgccagctacaacctggagaccatcctgcccaagatgggcatccagaatgtgtttgacaagaatgctgacttcagcggcatcgccaagagggacagcctgcaggtgtccaaggccacccacaaggctgtgctggatgtgtctgaggagggcacagaggccacagctgccaccaccaccaagttcatcgtgcgcagcaaggatggccccagctacttcaccgtgtccttcaacagaaccttcctgatgatgatcaccaacaaggccacagatggcatcctcttcctgggcaaggtggagaaccccaccaagagctag

SEQ ID NO: 331715 - DNA, 1014 bp, Artificial Sequence
  derived and/or modified sequence
atgctgagcctgggcgcccacagcgtgaccaagacccagatcctgcagggcctggggttcaacctgactcataccccagagagcgctatccatcagggttttcagcacctagtgcattctctgaccgtcccgagcaaggaccttactttgaagatgggctccgcgctattcgtcaaaaaggaacttcaactccaagctaattttcttggaaacgtaaagaggctgtacgaggccgaggtttttagtacggatttcagtaacccatcgattgcccaggcaaggattaatagccacgtgaaaaagaaaacccagggtaaggtggtcgacatcattcagggcttagacctgctgacagccatggtgctcgtgaatcacattttttttaaagcgaaatgggagaaacctttccaccccgagtatacacgcaaaaatttcccattcctcgttggggagcaggtgaccgttcatgttcccatgatgcaccagaaagagcaattcgccttcggagtggatacagagctgaactgctttgtgctacaaatggactacaaaggagacgctgtggctttctttgtcctccctagcaaaggaaagatgcggcaactggagcaggctctaagtgcccggaccctgcgaaaatggagccatagcctgcagaagcggtggatcgaggtttttattccacgcttttctatctctgcgtcctataacctggagacgatcctgcctaagatggggatacagaatgtgtttgataaaaatgcagattttagcggcatcgccaaacgggactcattgcaagttagcaaggctacccacaaagcagtgttggacgtctccgaagagggtaccgaagcgaccgccgcaaccactacaaagtttatagtcaggtccaaggacggacctagctattttactgtgagctttaatcgaacttttctcatgatgatcacaaacaaagccacagacggtattttgttcttagggaaggtcgagaaccccaccaaatcgtag

SEQ ID NO: 331716 - RNA, 1014 nt, Artificial Sequence
  derived and/or modified sequence
auguugucacuuggugcccacagcgugaccaaaacccagauccuccagggccuuggcuucaaccugacucauacucccgaguccgcaauacaucagggguuucagcauuuagugcauucacugacggugccuagcaaggauuugacucugaagaugggcuccgccuuauucguaaaaaaagaacugcaauuacaggcgaauuucuuaggaaaugucaagagguuguaugaagccgagguuuuuucaacagauuuuagcaauccuaguaucgcucaggcaagaauuaauagccacguuaaaaaaaagacgcagggcaaagugguggacaucauucaaggccuugaccucuugaccgcaauggugcucgugaaucauaucuuuuuuaaggcuaaaugggaaaagccauuucacccugaguacacgagaaaaaacuuuccauuucuagucggcgagcagguuacagugcacgugccaaugaugcaccagaaggaacaguuugcauucggagucgauacggaguugaacuguuuuguacugcaaauggauuauaaaggcgaugcuguugcuuucuucguucugccaaguaaagggaagaugcgccagcuggaacaggcacuuucggcucgaacacuucggaaguggucacacagcuuacagaagcgcuggauugagguuuuuauaccgagauuuaguaucagugccuccuacaaucuggaaacuauccuaccaaagaugggcauucaaaauguguuugacaagaacgccgacuucuccggcaucgcaaagcgggauagucugcaagucagcaaagccacucauaaagcagugcuugaugugagugaggaggggacugaggccacugcugccacaacaacaaaguuuaucgugcgauccaaggacggcccuuccuacuuuacagugucuuucaacaggaccuuccucaugaugaucacuaacaaagcuacugaugggauucuguuucugggcaagguugagaaccccacaaagagcuag

SEQ ID NO: 331717 - RNA, 1014 nt, Artificial Sequence
  derived and/or modified sequence
augcugagccucggcgcucauuccguaacgaagacccaaauucuucagggucucggcuuuaaccucacccacacccccgaguccgcaauucaccaaggcuuccaacaucuaguucacucucuuaccgugcccucuaaggaucuaacccuaaaaaugggcucagcccuauuuguuaagaaagaacuccaguugcaggcuaacuuccuggggaacgugaagcgccuauacgaagcagaggucuuuucuaccgacuuuuccaacccgucuaucgcccaggcccgaauuaauagucaugugaagaaaaaaacucagggaaaaguggucgauauuauucagggccuggaccugcugaccgcuaugguacuuguuaaucauaucuucuuuaaggcaaagugggagaaaccuuuccaucccgaauacacacgaaagaacuucccauuucuggugggcgaacaaguuacugugcacgugccaaugaugcaucagaaagagcaguucgccuuugggguugauacagaauugaauuguuuugucuuacaaauggauuacaagggcgacgccguggccuucuuuguccucccuucgaaaggaaaaaugcgccagcuggagcaggcccugagcgcccguacacugcgaaaauggucccauucauuacaaaaacgcuggauugaaguauucauuccacgauucaguauuucagcuucuuacaaccuugagacaauucuuccaaaaauggggauccagaacguuuucgacaaaaaugcagauuucuccgggaucgcaaaacgggacucccugcagguuucaaaggcuacucauaaagcagugcucgaugugagugaggaagggaccgaggcaaccgccgcuacgacuacuaaguuuauuguuagaagcaaggacgguccuucauauuucacaguuuccuuuaauagaacuuuccucaugaugauuacaaauaaagccaccgacgggauauuguuucugggcaaggucgaaaauccaaccaagagcuag

SEQ ID NO: 331718 - DNA, 1701 bp, Artificial Sequence
  derived and/or modified sequence
atgacggggaaagcaggggaagcgctgagcaagcccaaatccgagacagtggccaagagtacctcggggggcgccccggccaggtgcactgggttcggcatccaggagatcctgggcttgaacaaggagcccccgagctcccacccgcgggcagcgctcgacggcctggcccccgggcacttgctggcggcgcgctcagtgctcagccccgcgggggtgggcggcatggggcttctggggcccggggggctccctggcttctacacgcagcccaccttcctggaagtgctgtccgacccgcagagcgtccacttgcagccattgggcagagcatcggggccgctggacaccagccagacggccagctcggggtttcggccccaagcgtttcgggcggccgcgcagttctccagtccccgcgtcgggcagggctcggccacggcactctgttggagccccactgaaaactgggtttggggtgtcggagcccgtggtgcagagtcgccggccgtgtcggagggccccagcaccgctgctccactgcggccccggcctggtgatccgcactcctcgagcccgatgctgttccggctccggccccatccctggtgtccaaagttgtctgattcccaaatcccgcgctggtcaactggggtttatttttcacccccacgagctcagacaacccggccatcgcggcagctaaagcggccgccatcctctcccacgccaactttccggcccggggcattggggctggccgcgcagggcagggcgcagcagggtcgcgagcgctgccggggatctctgcggccccctaaggctgcctcgctctccgtcgtcccggtcccaagcgcgccggggcctttgcctctcttacaacgaaatctgttcaaaacctccggattcgggccccggcgcgggagagattctgaagatgtttcctccagcgatcgaaaaatgtccaaatctgctttaaaccagaccaagaaacggaagaagcggcgacacaggacaatctttacctcctaccagctagaggagctggagaaggcattcaacgaagcccactacccagacgtctatgcccgggagatgctggccatgaaaacggagctgccggaagacaggatacaggtctggttccagaaccgtcgagccaagtggaggaagcgggagaagtgctggggccggagcagtgtcatggcggagtatgggctctacggggccatggtgcggcactccatccccctgcccgagtccatcctcaagtcagccaaggatggcatcatggactcctgtgccccgtggctactggttcaagatggctttcccaggcgcttttctaaacccgaataccaacaattctttctagggatgcacaaaaagtcgctggaggcagcagccgagtcggggaggaagcccgagggggaacgccaggccctgcccaagctcgacaagatggagcaggacgagcggggccccgacgctcaggcggccatctcccaggaggaactgagggagaacagcattgcggtgctccgggccaaagctcaggagcacagcaccaaagtgctggggactgtgtctgggccggacagcctggcccggagtaccgagaagccagaggaggaggaggccatggatgaagacaggccggcggagaggctcagtccaccgcagctggaggacatggcttag

SEQ ID NO: 331719 - protein, 521 aa, Artificial Sequence
  derived and/or modified sequence
MDELLLDLFHKLTSGRQLAAGNGLCGISHKEQEVWKPGHNILVKMRKEDKSLVWLIHSTLARYTQVTNFLGTSRSSVTRCKPGANCPSSHSGISRQLSPLSVTEDSSAPILELQNQGSSGVCGHRVERQNRSADDGTQTHSENSSQENRIKARCLSCTSMVLKGIWGLLIILSVSSSWVGTTQIVKITYKNFYCPFFMTWFSTNWNIMFFPVYYSGHLATAQEKQSPMKKFRECSRIFGEDGLTLKLFLKRTAPFSILWTLTNYLYLLALKKLTATDVSALFCCNKAFVFLLSWIVLKDRFMGVRIVAAIMAITGIVMMAYADNFHADSIIGVAFAVGSASTSALYKVLFKMFLGSANFGEAAHFVSTLGFFNLIFISFTPVILYFTKVEHWSSFAALPWGCLCGMAGLWLAFNILVNVGVVLTYPILISIGTVLSVPGNAAVDLLKQEVIFNVVRLAATIIICIGFLLMLLPEEWDEITLRFINSLKEKKSEEHVDDVTDPSIHLRGRGRANGTVSIPLA

SEQ ID NO: 331720 - DNA, 1566 bp, Artificial Sequence
  derived and/or modified sequence
atggacgagctgctgctggacctgttccacaagctgaccagcggcagacagctggccgccggcaacggcctgtgcggcatcagccacaaggagcaggaggtgtggaagcccggccacaacatcctggtgaagatgagaaaggaggacaagagcctggtgtggctgatccacagcaccctggccagatacacccaggtgaccaacttcctgggcaccagcagaagcagcgtgaccagatgcaagcccggcgccaactgccccagcagccacagcggcatcagcagacagctgagccccctgagcgtgaccgaggacagcagcgcccccatcctggagctgcagaaccagggcagcagcggcgtgtgcggccacagagtggagagacagaacagaagcgccgacgacggcacccagacccacagcgagaacagcagccaggagaacagaatcaaggccagatgcctgagctgcaccagcatggtgctgaagggcatctggggcctgctgatcatcctgagcgtgagcagcagctgggtgggcaccacccagatcgtgaagatcacctacaagaacttctactgccccttcttcatgacctggttcagcaccaactggaacatcatgttcttccccgtgtactacagcggccacctggccaccgcccaggagaagcagagccccatgaagaagttcagagagtgcagcagaatcttcggcgaggacggcctgaccctgaagctgttcctgaagagaaccgcccccttcagcatcctgtggaccctgaccaactacctgtacctgctggccctgaagaagctgaccgccaccgacgtgagcgccctgttctgctgcaacaaggccttcgtgttcctgctgagctggatcgtgctgaaggacagattcatgggcgtgagaatcgtggccgccatcatggccatcaccggcatcgtgatgatggcctacgccgacaacttccacgccgacagcatcatcggcgtggccttcgccgtgggcagcgccagcaccagcgccctgtacaaggtgctgttcaagatgttcctgggcagcgccaacttcggcgaggccgcccacttcgtgagcaccctgggcttcttcaacctgatcttcatcagcttcacccccgtgatcctgtacttcaccaaggtggagcactggagcagcttcgccgccctgccctggggctgcctgtgcggcatggccggcctgtggctggccttcaacatcctggtgaacgtgggcgtggtgctgacctaccccatcctgatcagcatcggcaccgtgctgagcgtgcccggcaacgccgccgtggacctgctgaagcaggaggtgatcttcaacgtggtgagactggccgccaccatcatcatctgcatcggcttcctgctgatgctgctgcccgaggagtgggacgagatcaccctgagattcatcaacagcctgaaggagaagaagagcgaggagcacgtggacgacgtgaccgaccccagcatccacctgagaggcagaggcagagccaacggcaccgtgagcatccccctggcctag

SEQ ID NO: 331721 - DNA, 1566 bp, Artificial Sequence
  derived and/or modified sequence
atggacgagctactgcttgatctatttcacaagctaactagtgggagacagctggctgcaggaaatggtctctgcggtatttcgcataaagagcaggaagtgtggaagccgggccacaacatccttgtaaaaatgcgtaaggaggataaatcattagtctggctgatccatagtacgctggcccgttatacccaggttactaactttctgggtacctctagaagctctgttacaaggtgtaaacccggtgccaattgcccttctagtcacagcgggattagcaggcaactgagccctttgtctgtgactgaagattcctcagcccctatacttgagttgcagaaccaagggtcctctggcgtttgtgggcaccgggtggagagacagaatcgtagcgcagacgacggaacacaaacccactcggagaactccagtcaggaaaacaggatcaaggcccgatgtctcagctgcacatcaatggtgctgaaaggcatttgggggttgctgattattctatccgtctctagctcttgggtcggcaccacacagattgtgaagataacctacaagaatttctactgccccttttttatgacatggttcagcactaactggaacattatgttcttccccgtttactattccggtcatctcgccactgcacaggagaaacagagccccatgaagaaattcagagaatgctcaagaatctttggggaggatggcttaacattgaaactttttttgaaacgcaccgcaccgtttagtatactttggactctgacaaactacctatatttgctggcactgaaaaagttaaccgccactgatgtttctgccctcttctgctgtaacaaggcgtttgtgttccttctgtcgtggatcgtgctcaaggaccgattcatgggtgttcgtatagttgccgcaatcatggcgatcactgggatcgtcatgatggcctacgcagataacttccacgccgatagcattatcggggtggcattcgcggtcgggtctgcttcgacctccgcactgtacaaagtgctctttaaaatgttcctgggcagtgcgaatttcggggaagccgctcatttcgtaagcacgttgggcttctttaatctcatcttcattagcttcacaccggtcatcttatactttacaaaagtggagcactggagtagttttgcggcgctgccttggggttgtttatgcggaatggccgggttgtggctcgcttttaacattcttgttaatgtgggcgtggtgctcacgtacccgatcctaatttccattggaacggtgctcagcgtacccggtaatgccgcagtcgatctcttgaagcaagaggttatctttaacgtggtgcgtctggcggcgaccataattatatgcatcggctttctgctcatgctgcttcccgaagaatgggacgagatcacactgcgctttataaacagcctgaaggaaaagaaaagtgaagaacacgtggacgacgtgacggaccccagcattcaccttcgggggcgtggtagggccaacgggaccgttagcattcccttggcctag

SEQ ID NO: 331722 - DNA, 1566 bp, Artificial Sequence
  derived and/or modified sequence
atggatgagctgctgctggacctcttccacaagctgaccagcggccggcagctggccgctggaaatggcctgtgtggcatcagccacaaggagcaggaggtgtggaagccaggccacaacatcctggtgaagatgaggaaggaggacaagagcctggtgtggctgatccacagcaccctggcccgctacacccaggtgaccaacttcctgggcaccagccgcagctctgtgacccgctgcaagccaggggccaactgccccagcagccacagcggcatcagccggcagctgagccccctgtctgtgacagaggacagcagcgcccccatcctggagctgcagaaccagggcagcagtggagtgtgtggccaccgggtggagcggcagaacagatctgcagatgatggcacccagacccacagcgagaacagcagccaggagaaccgcatcaaggcccgctgcctgagctgcacctccatggtgctgaagggcatctggggcctgctgatcatcctgtctgtgagcagctcctgggtgggcaccacccagatcgtgaagatcacctacaagaacttctactgccccttcttcatgacctggttcagcaccaactggaacatcatgttcttccctgtgtactacagcggccacctggccacagcccaggagaagcagagccccatgaagaagttcagagaatgtagccgcatctttggagaagatggcctgaccctgaagctgttcctgaagaggacagcccccttcagcatcctgtggaccctgaccaactacctgtacctgctggccctgaagaagctgacagccacagatgtgtctgccctcttctgctgcaacaaggcctttgtgttcctgctgtcctggatcgtgctgaaggaccgcttcatgggcgtgcgcatcgtggccgccatcatggccatcaccggcatcgtgatgatggcctatgctgacaacttccacgccgacagcatcattggagtggcctttgctgtgggcagcgccagcaccagcgccctgtacaaggtgctcttcaagatgttcctgggcagcgccaactttggagaggccgcccactttgtgtccaccctgggcttcttcaacctgatcttcatctccttcacccctgtgatcctgtacttcaccaaggtggagcactggagcagctttgctgccctgccctggggctgcctgtgtggcatggccggcctgtggctggccttcaacatcctggtgaatgtgggcgtggtgctgacctaccccatcctgatcagcattggaacagtgctgtctgtgcctggaaatgctgctgtggacctgctgaagcaggaggtgatcttcaacgtggtgcggctggccgccaccatcatcatctgcatcggcttcctgctgatgctgctgcctgaggagtgggatgagatcaccctgcgcttcatcaacagcctgaaggagaagaagtctgaggagcacgtggatgatgtgacagaccccagcatccacctgcggggccggggccgggccaatggaacagtgtccatccccctggcctag

SEQ ID NO: 331723 - DNA, 1566 bp, Artificial Sequence
  derived and/or modified sequence
atggacgagctgctgctggacctgttccacaagctgaccagcggcaggcagcttgccgccggaaacggtctttgtggaattagtcataaggagcaggaagtgtggaagcctggtcacaatatcctggtgaagatgaggaaagaagacaaaagcctggtgtggctaatacattccacactcgcacggtatacacaggtgaccaactttctgggaacatccagatccagcgtgactcgatgtaagccaggtgccaactgtccatctagccacagtggcattagtcgccaactctccccactgtcagtgacggaggattcgtccgcacctatcttggagctacaaaaccagggctcctctggcgtctgtggtcacagggtcgaacggcaaaaccggtctgccgatgatggcactcagacccactcagaaaattcgagtcaggagaacagaatcaaagctcgatgcctatcttgcacctccatggtactgaaggggatctgggggcttctgatcatcctgtcagtgtccagcagctgggttggtactacacaaatagttaagattacttacaaaaacttttactgccccttcttcatgacttggttctcgacaaattggaatattatgttttttccagtgtactactctggccatctggctactgcccaggagaagcaatcccctatgaagaagttccgggagtgttctaggatattcggagaggatggcctgactctaaaactgtttcttaaacggacagcaccgttttctatactgtggacactgactaattacctctaccttctggctcttaaaaagctgacggccacggatgtgagcgccctcttctgttgcaacaaagcgtttgtcttcctgttgtcctggattgttctcaaagacagatttatgggtgtccgcattgttgctgcaataatggcaattactgggattgtaatgatggcatatgcagataactttcacgccgattccataattggagtcgcatttgccgtggggtcggccagcacgagcgccttatacaaagtgctgtttaaaatgttcctgggatccgcgaattttggagaagccgcacactttgtgagtacactgggattttttaacctaattttcatcagctttacacccgtcatcctgtatttcacaaaagtggagcattggagctcatttgccgctctgccatggggctgtttgtgcggaatggccggcctctggctcgcctttaacattttggtcaacgtgggcgtggtgctcacctaccccattctcatctctattggcactgtgctgagtgtgcctgggaacgctgccgttgacttgttgaagcaagaagttatctttaatgttgtgcgcctggctgctacgatcattatttgtatcggtttcctgttgatgctcctgcctgaagagtgggatgagataacgctacgttttattaattccctgaaggagaagaaatccgaggagcacgtagacgatgtgaccgatccatccatccacctccggggtagaggcagggctaacggaactgtttccattcctctggcctag

SEQ ID NO: 331724 - DNA, 1566 bp, Artificial Sequence
  derived and/or modified sequence
atggatgagctgttgcttgatttgtttcataaacttacgtctggtcgccaacttgcagctggcaatgggctctgcggcatttcccacaaggaacaggaagtctggaagccagggcataatattcttgtgaagatgaggaaagaagataagagtttggtgtggcttatccattcaacattggccagatatacacaggtcaccaacttcctgggtacatcccggtcctctgttacacggtgcaagcctggcgctaactgcccgtcatcccattcaggtatttcgcggcaactgagccccctatctgtcaccgaggacagcagcgcacccatcctggagctccagaatcaaggaagctctggggtgtgtgggcacagggtggagcgccagaaccgctccgccgatgacggaacccagacccacagcgagaactcaagtcaagaaaataggatcaaagctcggtgcctgtcctgtacttctatggtgctgaaaggaatttggggcctgcttatcatcctctcagtgtcctcttcttgggtaggcaccacccagatcgtaaaaatcacctataaaaatttctactgcccttttttcatgacttggttttcaaccaactggaatataatgttctttccagtttactactccggacaccttgcaacagctcaggagaagcaaagtccaatgaagaaattccgagaatgtagccgaatattcggcgaagatggcctcacgctgaagctgtttctaaaaaggacggccccattctcaatcttgtggacattaactaattacctatacctgctggcactgaaaaagttaaccgccactgacgtaagcgcgcttttctgctgcaacaaagcttttgtgttcctgctatcctggatcgtattgaaagataggtttatgggtgttcggattgtggcggctatcatggctatcactggtatagtgatgatggcctacgctgataattttcatgcggattctatcattggggtagcatttgcagtcggaagcgcatctacgagcgctttgtacaaggttttgttcaaaatgtttttgggatccgccaatttcggcgaagctgcgcacttcgtttcaacgttgggtttctttaacctgattttcatcagctttacacccgttatcctgtacttcactaaggtggaacactggtcttcatttgcagccttgccctggggctgcctctgcggcatggctgggttgtggcttgcttttaatatcctggtgaatgttggagtggtcctgacatacccaatcctgatttcgatcggcaccgttctgagcgtacctggaaacgccgcagtggatctcctgaagcaggaggttattttcaacgtggtgcggctagcggcaaccattattatctgtatcgggtttttattgatgctgctgcccgaagagtgggatgagattacacttaggttcatcaacagcctcaaagagaagaagtccgaggaacacgtggatgatgttactgatccctcaatacacctcagggggagaggccgtgccaatggcaccgtctctattccactggcgtag

SEQ ID NO: 331725 - DNA, 1779 bp, Artificial Sequence
  derived and/or modified sequence
atggatgaactactcttggatctcttccacaaactgaccagtgggaggcagctggcagcaggcaatgggctttgcggtatatcacataaggaacaggaggtatggaagccaggacataatattttagtgaaaatgagaaaggaagataaatcactggtgtggcttatacattcaacacttgctcgctacacacaagttaccaactttttaggtacctccagatcatcagtcactagatgtaaaccaggagccaactgccccagttcacacagtggcatcagtagacaactgtccccactgtctgtcaccgaagattcctctgctcctattcttgaacttcaaaaccaaggatcctcaggagtttgtggacacagagttgagagacagaacagatcagcagacgatgggacacagactcattctgagaacagcagccaagaaaacagaatcaaggctcgctgcctgtcctgcacgtccatggttctgaagggcatctggggactcttgatcatcttgtcagtatcatcatcttgggttggaactacacagattgtaaaaattacttataagaacttctattgcccatttttcatgacttggttttcaacaaactggaacattatgtttttcccagtctattattctggtcatctagccactgctcaagaaaagcaatctccaatgaaaaaattcagggaatgcagtcggatttttggtgaagatggtctgacgctgaaactctttcttaaaagaactgctcccttttctattctatggactttgactaattacctttatttactggctttaaagaagctgacggccacggatgtctccgctctgttctgttgtaacaaagcctttgtcttcttgctgtcatggattgtgctgaaagacaggttcatgggagtgaggatagttgctgcaataatggcaattaccggcattgtcatgatggcatatgcagataatttccacgctgattccatcataggagtggcatttgcggtgggctcagcctctacatctgcattatataaggtcttgtttaaaatgtttcttggaagtgccaactttggggaagctgcacactttgtctccaccttgggtttcttcaatttgatcttcatctccttcaccccagtcatcttgtatttcaccaaggtggagcactggtcctcttttgctgctctgccatggggctgtctctgtgggatggcagggctgtggctggccttcaacatcctggtgaatgttggggtggtgctgacatacccaatcctaatctccattgggacagtgctcagcgttcctggaaatgcagctgtggatctcctaaagcaggaggtgatattcaatgttgtccgcctggctgctaccatcatcatctgcattgggtttctgctgatgctgttgcctgaggaatgggatgaaatcaccctgaggttcatcaacagcctgaaggaaaagaagagtgaggagcatgtggatgatgtgactgatcccagcatacacctgcggggcagaggcagagccaatgggacagtgtctataccactggcttagagagggacatattttgaatgcacgtgtatgtatattctgtgaatataacaaaattttctcactacctgtacactcaaacgacagtattaactctgaatttggataaatcatatgtgaaataatgccaacaataaaagtttacatttatatgcttatcaaggaattggtgtaaataatcataatggatttttttattaaaacacatttgtcctt

SEQ ID NO: 331726 - protein, 249 aa, Artificial Sequence
  derived and/or modified sequence
ADNFSLHDALSGSGNPNPQGWPGAWGNQPAGAGGYPGASYPGAYPGQAPPGAYPGQAPPGAYPGAPGAYPGAPAPGVYPGPPSGPGAYPSSGQPSATGAYPATGPYGAPAGPLIVPYNLPLPGGVVPRMLITILGTVKPNANRIALDFQRGNDVAFHFNPRFNENNRRVIVCNTKLDNNWGREERQSVFPFESGKPFKIQVLVEPDHFKVAVNDAHLLQYNHRVKKLNEISKLGISGDIDLTSASYTMI

SEQ ID NO: 331727 - protein, 250 aa, Artificial Sequence [sequence omitted]

SEQ ID NO: 331728 - DNA, 750 bp, Artificial Sequence
  derived and/or modified sequence
atggcagataactttagcctccatgatgcactgagcgggtcaggtaaccccaacccccaaggatggccgggtgcttggggcaaccagcccgcaggcgccggcggttaccctggagcatcgtacccaggcgcatatcctggtcaggcaccgcctggggcataccctgggcaagcacctccaggagcctaccctggcgctcctggtgcatacccaggtgcgcctgcaccgggtgtctaccccgggccgccatcggggcctggcgcatacccctcgtcaggccaaccatccgcaacgggagcctaccccgccacgggaccatacggcgcaccggcaggcccactcatagtgccttataacttgcctctccccgggggcgtggtgccacgcatgctcattaccattcttggaaccgtcaaacctaatgcaaaccgtatagcgcttgatttccagagaggaaatgacgtcgcgttccatttcaatcccagatttaacgaaaacaacagacgcgtgatcgtgtgtaatactaagctggataacaattggggccgggaggaacggcagtcggtgtttccttttgaatcgggaaagccgttcaagatacaagtgcttgtggagcccgatcatttcaaggttgcggtcaacgatgcacaccttcttcaatacaaccatcgagtgaaaaaactgaacgaaatttccaaacttggtattagcggcgatatcgacctgactagcgcatcatatacgatgatt

SEQ ID NO: 331729 - DNA, 750 bp, Artificial Sequence
  derived and/or modified sequence
atggccgataacttttccttgcacgacgcactgagcggatctggcaatcccaatcctcaaggttggcctggcgcgtggggaaaccaacccgctggtgctgggggctacccaggggccagttatccaggtgcgtacccaggccaagccccgcctggggcctatcccggtcaggcaccaccaggcgcttatcccggagcccctggtgcatatcccggggccccagctccaggggtgtaccctgggcctccttccggccccggtgcctacccatcctcaggccagccgtccgccactggagcctatcccgccaccggaccctacggagctccagcgggaccactgattgtgccttacaatctccccctgccaggcggcgtggtgcctcggatgcttatcacgattctgggcaccgttaagcccaacgcaaaccggatcgctcttgatttccaacgggggaacgacgttgctttccactttaaccctagattcaatgaaaataaccgccgcgtcatcgtgtgtaatacgaagttggataacaactggggaagggaagaaaggcagagcgttttcccttttgagagcggtaaaccctttaagatccaggtgcttgtggagccagatcactttaaggtggccgtgaatgatgcacacctccttcaatataaccaccgggttaagaagctcaatgagatctcaaagctcggaatcagtggagacatagatctcacctccgccagctacaccatgatc

SEQ ID NO: 331730 - DNA, 750 bp, Artificial Sequence
  derived and/or modified sequence
atggcagacaacttctctcttcatgacgccctctcaggatcgggcaaccctaacccgcagggatggccaggcgcatggggaaatcaaccggctggagcaggtggttaccctggtgcctcctaccccggggcgtacccaggacaggcccctccaggcgcatacccaggtcaggcgcctcctggcgcgtatccgggagcccccggcgcttacccgggggccccggctcctggagtgtaccctggtccgccctcgggacccggagcctacccatcatcagggcaaccatccgcgacgggggcataccccgcgaccggcccgtacggagccccggccggaccgctcatcgtcccgtataatctgccattgccaggaggtgtcgtcccgcgcatgttgatcaccattttgggtactgttaaaccaaacgccaaccgaatcgccctggactttcagcgcggcaacgatgtggcgttccacttcaatccacgcttcaacgaaaataaccggcgggtcattgtgtgcaacactaagctggacaataactggggacgggaggaaagacaatcggtcttcccattcgagtcgggtaaaccgtttaagatacaggtgctggtggagcctgaccactttaaggtggccgtgaatgatgctcatcttctgcaatacaatcaccgcgtgaagaagctcaacgaaatatccaagctcggaatctcgggagacatcgatctcaccagcgcaagctatactatgatc

SEQ ID NO: 331731 - DNA, 750 bp, Artificial Sequence
  derived and/or modified sequence
atggctgataacttctctctccacgacgctttgtcaggctcaggaaaccccaacccacagggttggcccggagcctggggcaaccagcccgccggcgctggaggctaccccggcgccagctatccaggtgcttaccctggtcaggcccctcctggagcctaccctggacaagccccacccggcgcttaccctggtgctcctggagcttacccaggagctcctgccccaggcgtctaccccggccctccctctggccctggagcttatccttctagcggacaaccttccgccaccggtgcctaccctgctaccggtccctacggcgctcccgcaggtcccttgatcgtcccatacaatctccctttgcctggcggcgtggtaccccgcatgctcatcacaatactgggcacagtgaaaccaaatgcaaaccgcatcgccctggattttcaaagaggtaatgatgttgccttccattttaaccctagattcaatgaaaataatcgccgcgttattgtttgcaatactaaactcgataataattggggcagagaggagcgccaaagcgttttcccattcgaatctggcaagccattcaagattcaggttctggtcgagcccgaccacttcaaagttgcagtaaatgatgctcatctcttgcagtataatcaccgcgttaaaaagctcaacgagatctccaaactgggcatctctggcgacatcgaccttacttccgcctcctatactatgatc

SEQ ID NO: 331732 - DNA, 750 bp, Artificial Sequence
  derived and/or modified sequence
atggctgataacttttccctccacgatgcgctgtccggttcggggaacccgaacccccaagggtggccaggagcgtggggtaatcaaccggccggagcaggcggatacccgggagcgagctacccgggtgcctatcccggccaggcacccccgggtgcttaccccgggcaggcccctccaggtgcgtacccgggcgccccaggagcctacccaggagccccggccccgggggtgtacccaggcccgccctcgggccctggagcgtacccgtcctcaggccagccatccgcgactggagcctaccctgccaccgggccttacggagcaccagccgggccgctgatcgtcccgtacaacctgcctctgcccggcggcgtcgtgccaaggatgctgatcacgatcctcggcaccgtcaaacctaacgctaaccgcatcgcgctggacttccagcgcggaaatgatgtcgccttccatttcaatcctaggttcaacgaaaacaaccgcagggtgatcgtgtgcaacactaagctggacaataactggggaagggaggaaaggcaatcagtctttcctttcgaatccggcaagccgtttaagattcaggtgctggtggagccggatcactttaaggtggcagtgaatgacgcccatctgctgcaatacaatcacagagtgaagaaactgaacgagatttcaaaactgggaattagcggggacattgatttgacctcggcctcgtacactatgatc

SEQ ID NO: 331733 - DNA, 750 bp, Artificial Sequence
  derived and/or modified sequence
atggctgacaatttctcgctgcatgacgcactttcgggatccggcaacccaaaccctcaaggatggccaggagcttgggggaaccagcccgcaggagctggaggttacccgggtgcatcctatccgggggcttaccctggtcaagcaccacccggagcataccctggacaggcacctcctggtgcatatccaggggcaccaggagcataccccggagcgccagcgcccggcgtgtacccgggtcctccttcgggtcctggagcatatccgtcctccggacagccatcggcgaccggggcataccctgcgaccggcccatacggagcaccagcgggtccattgatcgtcccatacaacctccctctcccggggggtgtcgtcccacgcatgctgataaccatacttgggactgtgaagccaaacgcgaatcgcatcgcgctggactttcagcgaggaaacgatgtcgcgtttcactttaatccaaggtttaacgagaataacagaagagtcatcgtctgtaacaccaagctggacaacaactggggtagagaagaacgccaatccgtttttccattcgagtcaggaaagcctttcaaaattcaagtgctcgtggaaccagatcactttaaagtcgcagtgaacgatgcgcatcttcttcagtacaatcaccgtgtgaaaaaacttaacgagataagcaagctgggcattagcggggacattgatcttaccagcgcctcttacactatgatt

SEQ ID NO: 331734 - DNA, 750 bp, Artificial Sequence
  derived and/or modified sequence
atggccgacaatttctcccttcatgatgctctctctggctccggcaatccaaaccctcaaggatggcccggagcatggggtaatcaaccagcaggagctggtggttaccctggtgcttcttaccccggagcttatcccggtcaagcacctcccggcgcttatcctggtcaagccccacctggggcttaccctggtgcccctggagcttatcccggtgccccagcccctggagtgtatccaggtccaccgtccggaccaggagcttatccgtcgtctggccagccctcagctaccggagcttatccagcaaccgggccttatggagcacctgctggtccgcttatagttccatataatctcccattacctggtggtgtggtacctcgtatgctaattactatattgggcaccgtcaagcctaacgccaataggatcgctttggactttcaaaggggtaatgatgttgcttttcatttcaatcccaggtttaatgaaaataacaggcgagtgatcgtttgcaacactaagttggataacaattggggacgggaagagcgccagtcggtttttccattcgaatctggtaaaccattcaaaattcaagtccttgttgaaccggatcattttaaagttgcagttaatgatgcccacttactccagtacaatcatagggtcaaaaagctgaatgagatctctaagctcggaatatcaggagatatcgatttaacttccgcatcgtataccatgata

SEQ ID NO: 331735 - DNA, 750 bp, Artificial Sequence
  derived and/or modified sequence
atggcagacaatttctcactgcatgacgctttgtccggctcggggaacccaaacccgcagggatggccaggagcttggggcaaccaaccggcaggagcgggagggtaccctggtgcttcgtaccccggagcctacccgggacaggccccgccgggcgcttacccaggccaggccccaccgggggcatacccgggagccccgggagcataccccggagcacccgcccccggggtgtatccgggaccaccatccggaccaggagcgtacccctcgtctggacaaccgtcagcgaccggcgcgtaccccgccaccgggccatacggagctccggccggaccactcatcgtcccttacaacctgccgctccccggtggagtggtgccgcgcatgcttatcactatcctggggactgtgaagcccaacgccaacaggatcgcgctggattttcagcggggcaacgacgtcgcgttccatttcaatccacgcttcaatgaaaacaatcgcagggtgatcgtgtgcaacactaagctggataacaattggggaagggaagaacgccaatctgtgtttcctttcgagtcaggaaaacctttcaaaattcaagtcctcgtggagccggaccatttcaaggtggcggtgaatgacgcgcacctgctgcagtacaaccaccgtgtgaagaagctgaacgagatctccaaacttggaatctcgggtgacatcgacctgacctccgcgtcgtatactatgatt

SEQ ID NO: 331736 - DNA, 750 bp, Artificial Sequence
  derived and/or modified sequence
atggccgataacttctcgcttcacgacgccctgagcgggtcgggaaatccgaatcctcagggttggcctggggcctggggcaaccagcccgccggcgctggtgggtatcctggagcaagctacccaggcgcgtaccccggccaggcacctcctggggcatatccaggccaagcccctcctggcgcctatccaggcgcccccggagcctatccaggcgcccctgccccaggcgtgtaccccggtccccctagtgggccgggcgcatatcccagcagcggacagccaagtgctactggggcttatcccgccactgggccatacggcgctccggccggccctcttattgtaccgtacaacctcccactgcctggaggcgtggtgcccagaatgttgataaccatcttgggaaccgtgaagccgaacgccaaccggatcgcgctggactttcagagaggaaacgacgttgcgttccactttaacccacggttcaatgagaacaaccggcgtgtgatcgtctgcaacactaagttggataataactggggaagagaggagcggcagtctgtcttcccgttcgagtctggaaagccctttaaaatccaggttctcgttgaaccggatcactttaaagtggcggtcaatgacgcacacctcttacagtataatcatcgagtgaaaaagttgaacgagatcagtaaactagggatttctggcgatatcgacctgacctccgcttcttacaccatgatc

SEQ ID NO: 331737 - DNA, 750 bp, Artificial Sequence
  derived and/or modified sequence
atggcagacaatttctccctgcacgacgccctgtctggtagtggaaatcccaacccccaggggtggcccggggcttggggcaaccagccagcgggcgccgggggatatccaggggccagctatcctggggcataccccggtcaggcccctccgggcgcctaccctggtcaggctccacccggcgcatacccgggcgctcctggtgcataccccggcgcacctgcacctggagtctatccaggtccaccatcggggcctggcgcttaccctagctctggccagcctagcgcgacaggtgcgtaccccgctacgggaccctacggggcccccgcaggacccttaatcgtcccttataatcttccgctgccagggggcgtggtccctcggatgttgattaccattctgggcacggtgaagccaaacgccaaccgaattgccttggatttccagaggggtaacgacgttgccttccacttcaatccccgttttaatgaaaataatcgcagagttatcgtttgtaatacaaaattggataataactgggggagagaggagcggcagtccgtgtttccattcgagagtggtaagccgttcaagatacaggtgttggtggaacctgaccacttcaaggttgcagtgaacgacgcccaccttttgcagtacaaccatagggtgaaaaagctgaatgagatcagcaagctgggaataagcggcgatattgatctcacatctgcttcttatacgatgata

SEQ ID NO: 331738 - DNA, 750 bp, Artificial Sequence
  derived and/or modified sequence
atggccgacaatttcagcctccacgacgccctttccggatcaggcaaccctaacccacagggctggccgggtgcatggggaaaccaacctgccggggcaggaggttaccccggcgcatcatacccgggggcatatccgggacaagcgccacctggggcctaccccggccaagctccgcctggagcatacccgggcgcaccgggagcgtacccgggagcaccagcccctggagtctacccagggccgccctccggacctggagcgtatccatcttccggccagccgtcggccaccggagcttacccagccactggaccatacggagcaccagcaggcccgttgatcgtgccgtacaacctgcccctccccggaggagtggtgccacggatgctgatcaccattttgggcactgttaagcccaacgctaaccgcatcgcactcgacttccagcggggtaatgatgtggcattccacttcaatccaagattcaacgaaaacaaccgcagagtgatcgtgtgcaacactaaactcgataacaactgggggcgggaggagcgtcaaagcgtgtttccgttcgaaagcgggaagcctttcaagatccaggtgctggtggagccggatcactttaaggtcgccgtgaatgatgcacatctgttgcagtacaatcaccgggtgaagaagctcaacgaaatcagcaaactgggcatttcgggagacattgacctgacctcggcttcatacaccatgatc

SEQ ID NO: 331739 - DNA, 750 bp, Artificial Sequence
  derived and/or modified sequence
atggcagataacttctctcttcacgatgcattgtccggatctggtaacccgaatccgcagggctggccaggcgcttggggaaatcaacctgcaggcgctgggggctatcccggcgctagctatcctggagcatatcccggacaagcaccgccgggagcttatccgggacaggcgccgccgggagcatatccgggagcgcctggagcctatccgggcgcgccggcgcctggagtctatccaggcccgccttcgggtcctggcgcatacccttcctcgggccaaccttcagcgacgggagcatacccggcgacaggaccgtatggggctccggccggacctttgattgtgccttataacttaccgctccctggtggagttgtcccaagaatgcttataacaatccttggtacagtcaaaccgaacgctaatagaattgccctggattttcaacgagggaatgatgtggcattccattttaacccgagatttaacgaaaacaaccggcgcgtaatcgtatgtaatacaaagctggacaacaactggggccgcgaagagcgccagagcgtctttccgttcgaatcgggcaagccttttaagatccaggtccttgtagagccggaccactttaaagttgcggttaatgatgctcatctattacaatataatcacagagtgaaaaaactgaatgagatcagcaaacttgggatatcaggggatattgacctgacgagcgcatcatatacaatgatt

SEQ ID NO: 331740 - DNA, 750 bp, Artificial Sequence
  derived and/or modified sequence
atggccgataacttctcactgcatgacgccttatcgggatccggtaaccccaaccctcaggggtggccaggcgcctggggcaaccagccggccggagcaggaggttatcctggggcctcttatcccggggcttatccagggcaagctccacccggagcctacccagggcaagctccgcccggcgcgtacccaggggccccgggggcctacccaggggcaccagcgcccggcgtataccctggtccgccttcggggcctggcgcttatccttcttcagggcagccgtctgcaaccggcgcatatcccgcaactggcccgtacggcgcacctgccggccccttaattgttccctataacctcccactgcctgggggggttgttccccggatgctcatcaccatattggggaccgtaaagccaaacgcaaacagaatagccctggatttccagagaggtaatgatgtggcctttcactttaaccctaggtttaatgaaaacaaccgccgtgttattgtgtgtaataccaaattagacaacaattgggggagagaagaaaggcagtctgtatttccttttgaatccgggaaacccttcaagattcaggttctcgtagaaccagaccatttcaaggtagctgtcaacgatgcccacttactccagtataaccacagggtgaaaaaactgaatgaaatctcgaaactggggattagcggcgatatcgatttgacctcagcaagttacaccatgatt

SEQ ID NO: 331741 - DNA, 750 bp, Artificial Sequence
  derived and/or modified sequence
atggccgacaacttcagcctacacgacgctctgtctgggtcaggcaaccccaatccccagggatggcccggagcttggggaaatcagccagcgggggctggtggttacccaggagcatcctaccccggcgcttatccggggcaggcgcctccaggggcctatccagggcaggcacctccaggggcttacccaggtgctccgggcgcttatccaggagcgcccgcccccggggtttaccccggccctccttccggtcctggggcttacccctctagcggacagccctcagccaccggcgcataccctgcgaccgggccatatggggctcctgccggacccctcatagtgccatataatctacccctgcccgggggcgtcgttcctcgcatgctgatcaccatactgggaaccgtaaaacccaatgctaatcggattgcactcgacttccagcgggggaacgacgtcgcctttcatttcaacccaagattcaacgagaataatcggagagttatcgtctgcaacaccaagctggacaataattggggtagagaagagagacagtccgtgttccctttcgaatctggcaaaccatttaagatacaggtgttggtggagcccgaccacttcaaagtggccgtgaacgacgcccacttactccagtacaaccaccgggttaagaaactgaatgagatctcgaaactgggtatctctggcgacatcgatctgacaagcgcctcttacactatgatc

SEQ ID NO: 331742 - DNA, 750 bp, Artificial Sequence
  derived and/or modified sequence
atggcagataatttcagtcttcatgacgcactcagcgggtctggcaatccgaatcctcagggctggccgggcgcctgggggaatcaaccggccggggcaggcggctaccctggcgcctcttatcctggggcctaccctgggcaggccccccccggcgcctacccaggacaagccccaccgggcgcctatcctggagcacctggagcttatcccggagcccccgctcctggggtgtatcccggccccccttctggacctggcgcatacccctccagtggacagccatccgcgaccggagcctatcccgccaccggaccatatggggcccctgccgggcccctcattgttccctataatctgccactgccaggaggcgtggttcctcggatgctcattaccattctgggcaccgtgaagccaaacgctaatcggatcgcactggactttcagcgtgggaatgatgtggcctttcacttcaaccctcgctttaatgagaacaatcgtcgcgtcatcgtgtgtaatacaaagcttgataataactggggccgagaggagcgccagtccgtgtttccattcgaaagcggaaagcctttcaagatccaggtgctggttgaacctgaccatttcaaggtggctgtgaacgatgcacatctgctgcaatataatcaccgggtaaagaaactcaatgagatcagcaagttgggcatttctggcgacatcgatctcaccagtgcatcatacactatgatc

SEQ ID NO: 331743 - DNA, 750 bp, Artificial Sequence
  derived and/or modified sequence
atggctgataacttctctttgcacgacgccttgagcggatcaggaaacccaaatcctcaaggatggccgggagcctggggaaaccagccagcaggcgctggcggttacccaggggcaagctacccaggtgcgtaccccggacaagcgcctcctggggcatatccgggtcaggcaccacctggggcgtacccaggagcaccaggtgcatatcccggagcacctgcaccgggcgtttaccctggaccaccttcggggccaggagcatatccctcctcagggcaaccgagcgcaactggcgcatacccagccaccggaccttatggtgcgcctgccggtccactgatcgtgccctacaacctccctctgccgggaggagtggtccctcgcatgttgatcactatcctcggtactgtgaaacctaatgctaacagaatagctcttgattttcagcgcggcaacgatgtggcatttcatttcaacccccggtttaatgaaaacaatagacgggtgattgtgtgtaatacgaagctggataacaattggggacgcgaagagagacaaagcgtattcccttttgagtccggaaaaccatttaagattcaagtgctcgtggaacctgatcactttaaggtggcagtgaatgacgcacatttgctgcagtacaaccatcgagtgaagaagctgaacgagatttcgaagttgggaatctcaggcgatatcgatcttacttcggcttcctacaccatgatt

SEQ ID NO: 331744 - DNA, 750 bp, Artificial Sequence
  derived and/or modified sequence
atggctgacaatttctccttgcacgatgcactttctggatcgggtaatccaaatcctcagggctggcccggagcatggggcaaccaaccggctggagccgggggatacccgggtgcatcgtaccctggagcataccccggacaagccccacctggtgcctacccaggtcaagcccctcctggtgcatacccaggcgcacccggagcttacccaggagcaccggcccccggtgtgtaccctggacctccatccgggccgggtgcttacccttcctcaggacaaccttccgcaactggcgcctaccctgcaaccggaccttacggggcacctgccggccctcttattgtcccctacaaccttcctctcccaggaggagtggttcctagaatgctgatcaccattcttggaactgtgaagccaaacgcaaacagaattgcactggactttcagcgaggcaacgatgtggcgttccatttcaaccctcggtttaatgaaaacaaccgtagagtgattgtgtgtaacactaagctggataacaactgggggcgggaggaaagacagagcgtgttccctttcgaatccggcaagccattcaagattcaggtgctggtggaacctgaccactttaaggtcgccgtgaatgatgcacacctgctccaatacaatcatcgcgtcaagaagctcaacgagatctccaagctgggcatttcgggtgacatagatcttacttcggcaagctacactatgatt

SEQ ID NO: 331745 - DNA, 750 bp, Artificial Sequence
  derived and/or modified sequence
atggcagacaacttctcgttgcatgatgcactgtcgggaagcggtaatccaaatccccaaggatggcccggcgcgtggggcaatcaaccagccggcgcagggggctaccccggggcaagctaccccggtgcataccctggtcaggcaccaccaggggcatatccagggcaagcgccaccaggtgcatacccaggagctccaggtgcgtaccctggagcaccagcgcctggtgtgtacccaggaccccctagcggtccgggagcatacccctcgtcgggtcaaccgtcggccactggcgcatacccagccactggaccctacggtgccccggccggtccactgattgttccctacaatcttcctcttccaggtggtgtggtgcctcgcatgctgattactattctgggtactgtgaaacctaacgccaacagaattgccctggactttcaaagaggaaatgatgtcgcattccatttcaatccacggttcaatgaaaacaacagaagagtgatagtgtgtaacactaagctcgacaacaattgggggcgtgaagagcgccaaagcgtgtttccttttgagtccggaaaaccgttcaaaattcaagtcctggtggagcccgatcatttcaaggtggcagtgaacgacgcacaccttcttcagtacaaccatcgggtcaagaagttgaatgaaatctccaagctgggaatttccggcgacatagaccttacctccgcatcttacacgatgatc

SEQ ID NO: 331746 - DNA, 750 bp, Artificial Sequence
  derived and/or modified sequence
atggcagataacttctcgctgcatgatgctttgagcggaagcgggaaccctaaccctcaaggatggccgggagcctggggcaatcagccagccggcgcaggaggctacccgggagccagctacccaggagcttaccctggacaggcaccgcccggagcctacccgggacaagccccgcctggagcgtaccctggagctcccggcgcttacccgggagcgccagccccaggcgtgtacccgggaccgccatcgggtcctggcgcatatccgtcatcgggccaaccgtcagcgacgggcgcgtacccagctaccggaccctatggcgctccggctggcccattgatcgtgccatacaatctgccgctgccgggcggagtggttccacgcatgcttatcactatcctgggcacggtcaagccgaatgcaaatcggattgcactggactttcagcggggtaatgatgtcgctttccatttcaacccacgctttaatgagaacaaccgcagagtgatcgtctgcaacaccaagttggacaacaactgggggcgggaagagcgccagagcgtgttccctttcgagtccgggaagccatttaagattcaggtgcttgtggagcccgaccacttcaaagtcgccgttaatgatgcacacctcctgcagtacaatcacagggtcaagaaactcaacgaaatctcgaagctcggaatctccggagacatcgacctgacttcggcttcctacaccatgatc

SEQ ID NO: 331747 - DNA, 750 bp, Artificial Sequence
  derived and/or modified sequence
atggcagacaattttagcctgcatgatgctttgagcggttcggggaaccctaatcctcaggggtggccaggggcatggggcaaccagccagctggagcaggcgggtacccaggagccagttatcccggagcgtacccgggccaggcccccccaggggcgtaccccggccaggcgccaccaggtgcttatccgggcgctccaggagcctacccgggggctcccgcaccgggcgtgtatcccggtccccctagcggaccgggagcctacccctccagcggacaaccatcagccaccggagcataccccgccaccggtccatatggcgctcctgccggtccattgattgtgccttacaatttgccattgcccgggggtgtggtaccccgcatgttgattaccattctgggtacagtgaaacctaacgccaatagaattgcccttgactttcagcggggcaatgacgtggccttccattttaacccacgttttaatgaaaataatcgcagggtcattgtctgcaacaccaagctcgataataactggggtcgagaggagaggcagagtgtcttccctttcgaaagcggaaagcccttcaaaattcaggtcctagtggagcctgaccactttaaggtggctgtgaatgacgcacatcttttgcaatataaccatcgggtgaaaaagttgaacgagatctcgaagctcggcatctctggggacatcgacctcacatctgcgtcttataccatgatc

SEQ ID NO: 331748 - DNA, 750 bp, Artificial Sequence
  derived and/or modified sequence
atggcggacaatttcagcctccatgatgcactttccggatcgggaaaccctaaccctcagggttggccgggcgcctggggaaaccaaccagcaggcgcaggtggttaccctggagcttcctacccgggcgcctacccaggccaagcacctccaggagcctacccaggtcaagccccgcctggagcataccctggtgccccaggagcttacccaggcgcacctgcccctggggtgtaccctggacccccgtcggggccaggagcatatccctcttcgggtcagccatctgctactggtgcatacccagccaccggaccctacggcgcacccgcaggacctttgatagtgccctacaatcttccactgccaggcggagtcgtgccccgcatgttgattactatcctgggcaccgtgaagcccaacgctaatagaatcgcactggactttcagaggggcaatgacgtcgcttttcactttaaccctagattcaacgaaaacaatcgacgagtcatcgtgtgcaacactaaacttgacaataactggggtagggaagagcggcagtcagtctttccatttgaatccggaaagccatttaagatccaagtcctggttgaacctgatcactttaaggtggccgtgaacgatgcccatctgctccagtacaaccaccgggtcaagaaactcaacgagatttctaagctcggtatttcaggtgacattgatctcacctcagcctcctacaccatgatc

SEQ ID NO: 331749 - DNA, 750 bp, Artificial Sequence
  derived and/or modified sequence
atggctgacaacttttccctgcatgacgccctctctggttcaggaaacccaaatccgcagggatggcctggagcctggggtaaccagcctgccggggccggaggctacccgggagcttcgtacccgggagcgtacccaggacaagcgccgccgggcgcatacccgggacaggcccctcccggggcgtatccgggcgcgccgggcgcgtacccgggggcgccggctcccggcgtgtacccaggtccgccgtcgggaccaggtgcttacccgtcatcaggacagccttcggccacgggcgcctacccggcgaccggtccgtacggtgcgccagccggaccgctgatcgtgccatacaacctcccactccccggaggagttgtcccaagaatgttgatcaccatccttggcacggtcaagcccaatgccaataggattgcgctggacttccagcggggcaacgacgtggcgttccatttcaatcctagattcaacgagaataaccggcgcgtcattgtgtgcaataccaagctggacaacaattggggacgcgaagagagacagtccgtctttcctttcgaaagcggaaagcctttcaagatccaggtgctggtggaaccggaccactttaaggtggctgtcaatgacgctcatctcctgcaatacaaccaccgggtcaagaagctgaatgagatctcaaaactgggtatctcgggcgacatcgacctgacttcagcctcgtacactatgatt

SEQ ID NO: 331750 - DNA, 750 bp, Artificial Sequence
  derived and/or modified sequence
atggcggataacttctctctgcacgatgccttgtccggctcaggaaatccaaacccccagggatggccgggagcctggggtaaccaacccgccggggccggcggataccctggggcctcctatccgggtgcttatccagggcaggcaccccccggcgcgtatccaggtcaagctcccccaggggcctatccaggggcccccggtgcctatcccggcgccccggctcctggcgtgtatcccgggccaccttcagggccgggtgcttatcccagctctggacaaccatctgcaaccggcgcctatccagccaccgggccatacggcgccccagccggacctctgattgtgccttataacttgccactccctggaggcgtggtgccccggatgcttatcacaatcctggggaccgtgaagcctaacgcaaatagaatcgctctggactttcaacgagggaacgacgtcgccttccacttcaatccccgcttcaacgagaataacagacgggtaattgtatgcaatacaaagttggataataactgggggcgggaggagcggcaatccgttttccctttcgagagcggtaagccctttaaaatacaggtgctggtggagcccgaccacttcaaggttgcagtgaacgacgcccacctcctacagtataaccaccgagtgaaaaaactgaatgaaattagcaagctgggaatttctggcgacatcgatctgactagtgcgtcctacacaatgatc

SEQ ID NO: 331751 - DNA, 750 bp, Artificial Sequence
  derived and/or modified sequence
atggccgacaacttttccctgcatgacgccctttcgggaagcggcaacccaaaccctcaaggctggccaggagcatggggaaatcagccggccggggccgggggttacccaggcgcatcttacccaggggcttaccctggacaggcaccgccaggagcatacccgggtcaggctccaccgggggcctacccgggggcgccaggtgcttaccctggcgcgcccgcccctggagtgtaccccgggccgcctagcggcccaggcgcgtacccctcctcgggacagccgtcggccactggcgcctatcccgccactggaccgtacggagcgccagcaggtcccctcatcgtgccatacaacctccccctgcctggtggagttgtcccgagaatgctgatcaccattttgggtacggtgaaacccaacgccaaccgcatcgcccttgacttccaacgcggaaatgacgtggcttttcacttcaatcccaggttcaacgaaaacaacagacgggtgatcgtgtgcaatactaagctcgataacaattggggccgagaggaaagacaatcggttttcccgttcgagtcaggcaagccgttcaagatacaagtcctggttgagcctgaccatttcaaggtcgccgtgaacgatgctcacctcctgcagtataaccaccgggtgaaaaaactcaacgaaatcagcaagctcgggatctcgggcgacatcgatctgacctcggcatcctataccatgatc

SEQ ID NO: 331752 - DNA, 750 bp, Artificial Sequence
  derived and/or modified sequence
atggccgataatttcagcctccacgacgcactttccggtagcggcaatcccaacccacaggggtggccaggggcctggggcaaccagccggcaggagccggaggttaccccggtgccagctatcctggtgcttatcctggccaggctcctcctggcgcataccctggacaggcccctcctggtgcgtacccaggcgctccaggagcatacccgggcgctcccgctccgggagtgtatcctggccctccctctggaccaggagcctatccttctagcggccagcctagtgccaccggggcgtacccagcaactggaccttacggcgctcccgcaggtcctcttattgtcccatataatctgccacttccaggcggagtggtgccaaggatgctgatcaccatactgggcaccgtaaaacccaacgccaacaggatagctctggattttcagcggggaaatgacgtggctttccacttcaacccaaggttcaatgaaaataaccggcgggtgatcgtttgtaacaccaagctcgacaataattggggtcgcgaggaaagacagtctgtgtttccatttgagagtggaaaaccgttcaaaatccaagtgcttgtcgagccagaccattttaaagttgccgtgaacgatgcacaccttcttcagtacaatcacagggtgaagaagttgaatgagatctccaagctgggtatttccggggacatcgaccttactagtgcctcctacactatgatt

SEQ ID NO: 331753 - DNA, 750 bp, Artificial Sequence
  derived and/or modified sequence
atggcggacaacttctcgttgcacgatgcccttagcggtagtggcaacccgaatccacagggctggcccggagcttgggggaaccagccagccggcgccggagggtacccaggggcctcttatcccggggcctacccagggcaggcccctcccggggcctatccagggcaagccccacccggggcttatcctggtgcgcctggggcataccccggggcccccgcgccaggcgtctatccgggcccccctagtggacccggggcatatccaagttctggtcaacccagcgccacaggagcatacccagctactgggccgtacggcgcgcccgctgggcccctcatcgtcccttataatctacccctgcccggtggggtggttccacggatgctcatcacgatcctaggcactgttaaaccgaatgcgaacagaatcgccttggattttcaaaggggtaatgacgtggcctttcactttaacccccggtttaacgaaaataaccggcgcgtgatcgtctgcaacaccaagctggacaataactggggacgagaggaacggcagtccgtttttcccttcgagagtggaaagccattcaagatccaggtgctcgtcgagccagaccacttcaaagtggctgtaaatgatgcccacttgctgcagtataatcatcgagttaagaagctcaacgagataagtaaactcggcatctccggcgatattgacttaacaagtgccagttatactatgatc

SEQ ID NO: 331754 - DNA, 750 bp, Artificial Sequence
  derived and/or modified sequence
atggctgacaacttctccctgcacgatgccctgagcggatcagggaaccccaacccacagggctggcccggtgcctgggggaaccaacctgcaggagccgggggataccccggagctagctatccgggagcctacccgggccaggcgccaccaggagcctatccaggccaggccccaccaggcgcttaccctggagctcccggcgcatatccaggagcacctgctccaggcgtctaccccggaccacccagcggtccaggagcttaccccagcagtggccagccctcggccaccggggcctaccctgcaaccggcccctacggcgctcctgccggcccactgattgtaccctacaatctccccctccctggaggcgtggtccctcgaatgctaattacgatactgggcactgttaaacccaacgccaaccgaatagcacttgactttcagaggggcaatgacgttgcatttcattttaacccacgcttcaacgaaaataaccgccgtgtgatcgtgtgtaacaccaagctcgacaacaattggggcagagaagaacgccagtctgtgttccctttcgaatcaggaaagcccttcaagatccaggttctggtcgagcctgaccatttcaaggtggcagtgaacgatgcccatcttctgcaatacaatcatcgggtgaagaagctgaatgaaatcagcaagctgggtatcagtggtgacatcgatctgacttcagcttcttacacaatgatt

SEQ ID NO: 331755 - DNA, 750 bp, Artificial Sequence
  derived and/or modified sequence
atggccgataatttttctctccacgacgccctaagcgggtcaggcaaccccaacccccagggatggcctggggcctggggcaatcagcccgcaggcgcaggcggttatcctggggctagctacccaggcgcctaccctggtcaagctccacctggcgcttacccaggtcaggcccccccaggcgcataccccggggcaccgggcgcctacccgggcgccccagcgcctggggtgtaccctggcccacctagcgggcccggcgcctacccttcaagtggacaaccaagtgcaacgggcgcctaccccgccacaggcccatatggtgcccctgccgggccccttatcgtgccatacaatctgccgctgccaggcggcgtggtgccgcggatgctgatcacaattctgggaacggtcaaacccaacgcgaatcggattgctttagactttcaacgtggcaacgacgttgcctttcacttcaatccaagatttaatgagaataaccggcgtgttatcgtgtgtaataccaaacttgacaacaactggggtcgtgaagaacgtcagtctgtattcccatttgagtcaggcaagccatttaaaatccaagtgttggtggaaccagaccatttcaaggtggctgtaaacgatgctcacctcttgcagtacaaccaccgggtgaaaaaacttaatgagatctctaaactgggcattagcggagacatagatctgacgagtgctagctatacgatgatc

SEQ ID NO: 331756 - DNA, 750 bp, Artificial Sequence
  derived and/or modified sequence
atggcggataatttttcgctacatgatgcgttatcgggttcgggtaatccgaatccgcaaggttggccgggtgcgtggggtaatcaaccggcgggtgcgggtggttatccgggtgcgtcgtatccgggtgcgtatccgggtcaagcgccgccgggtgcgtatccgggtcaagcgccgccgggtgcgtatccgggtgcgccgggtgcgtatccgggtgcgccggcgccgggtgtttatccgggtccgccgtcgggtccgggtgcgtatccgtcgtcgggtcaaccgtcggcgacgggtgcgtatccggcgacgggtccgtatggtgcgccggcgggtccgctaatagtaccgtataatttaccgttaccgggtggtgtagtaccgcgtatgttaataacgatattaggtacggtaaaaccgaatgcgaatcgtatagcgttagattttcaacgtggtaatgatgtagcgtttcattttaatccgcgttttaatgaaaataatcgtcgtgtaatagtatgtaatacgaaattagataataattggggtcgtgaagaacgacaatcggtatttccgtttgaatcgggtaaaccgtttaaaatacaagtattagttgaaccggatcattttaaagtagcggtaaatgatgcgcatctattacaatataatcatcgtgttaaaaaattaaatgaaatatcgaaactaggtatatcgggtgatatagatttaacgtcggcgtcgtatacgatgata

SEQ ID NO: 331757 - DNA, 750 bp, Artificial Sequence
  derived and/or modified sequence
atggctgataatttttctctacatgatgccttatccgggtcagggaatcctaaccctcaggggtggcctggagcgtggggaaaccagcctgctggggccggagggtatccaggagcttcctatcccggagcgtatcctgggcaggcccctcccggagcctaccccggacaggccccacctggagcctatcctggggcaccaggggcttatccaggggcccccgctccaggggtgtatcccggaccacctagtggaccgggggcctatccaagttccgggcagccctcagccactggagcttaccctgccacagggccttacggggcgccagccggaccactgattgtgccatacaatttgcccctacccgggggagtcgttccacgaatgctaataactatactggggacagttaaacccaatgcaaaccggattgccttagatttccagagagggaacgatgttgctttccattttaaccctaggttcaacgaaaacaatcgccgggtcatagtgtgcaatacgaaactggataataactggggaagggaagaacgtcagtcagtcttccctttcgagtctgggaagcctttcaaaatccaggttctggtcgaacccgatcatttcaaagtagcagtgaacgacgcccatctgttacagtataatcatagagttaaaaaactgaacgaaataagtaaactggggatcagtggagacatagatctgacatctgcgtcatatactatgatc

SEQ ID NO: 331758 - DNA, 750 bp, Artificial Sequence
  derived and/or modified sequence
atggctgacaatttctcattgcatgatgccctctctgggtccgggaaccctaatccccaggggtggccaggtgcctggggaaaccagcctgcgggggccggcgggtatccgggggctagctacccgggagcttacccagggcaggccccacccggcgcttatcccggacaggcccctcctggagcctatcccggggctccaggcgcctatcccggggcaccggcccccggggtttaccccggccccccttcaggccccggagcctatccttccagcggtcagccatcagcaaccggcgcgtaccccgctacggggccgtacggcgcgccagctgggcccttaattgttccttataacctgccgctaccaggcggggtggttccacgaatgctcatcactatcctaggaacagtcaaacccaacgccaacagaattgcgctggattttcagagggggaatgacgtggcattccactttaaccccagatttaacgagaataataggcgcgtgatcgtatgcaatacaaagctagataataattggggacgcgaggagcggcagagtgtgttcccctttgaatcaggaaaaccattcaaaatacaggtgctggtggaacctgaccacttcaaagtggcagtgaacgacgcgcacctcttacagtataatcatagggtgaagaaactgaatgagattagcaagctgggcatttctggcgacatcgaccttacctcagcctcctacacaatgatc

SEQ ID NO: 331759 - DNA, 750 bp, Artificial Sequence
  derived and/or modified sequence
atggcggataatttttcactccacgatgcattgtcgggatctggcaacccaaatccacagggctggcccggcgcatggggcaaccagccagctggagctgggggttatcccggcgctagctatccaggggcctaccctgggcaagctcctcccggcgcttaccccggacaggcaccccctggcgcttatccaggcgccccaggagcttatcctggcgcgcccgcacctggagtctaccccggtccaccatcgggacctggcgcttacccttcaagcggacagccatccgccaccggagcgtaccctgccaccggcccctacggggcccctgccggtcccttgattgtcccctacaacctgccattgcccgggggcgttgtgccaaggatgcttattactatcctgggaacagtcaagccaaacgcaaatagaatcgccttagactttcaacgggggaatgatgttgcgtttcactttaacccacgctttaatgaaaacaacagacgcgtcatcgtctgcaatactaagctggacaataactggggacgcgaagaacgacagtcagtcttcccattcgaaagcggaaagccattcaaaattcaggtgctcgttgagcctgaccatttcaaagtggccgtcaatgatgcgcatcttctacagtacaatcatcgggtgaaaaaacttaatgaaatcagtaaactggggatttcaggtgacatagatcttacctctgcctcctacacaatgatt

SEQ ID NO: 331760 - DNA, 750 bp, Artificial Sequence
  derived and/or modified sequence
atggccgacaacttcagccttcatgatgccttgtctggtagcggtaatcccaatcctcaaggctggcctggtgcatggggcaatcaacccgcaggagcgggcggttaccctggggcctcataccctggagcatacccaggccaggcacctccaggagcataccccggacaagcacctcctggcgcatacccgggagcgcctggcgcctatcctggagcaccagctcctggcgtctacccaggaccaccttcaggacccggtgcctacccatcgtcagggcaaccatccgccaccggcgcgtacccggctactggaccctacggtgcacctgcaggaccgctgatcgtcccatataacttgcctcttccaggcggtgtggtccctcgaatgctcatcaccatactgggtactgtaaagccgaacgcaaatcgtattgcgctggattttcagagaggaaatgatgtggcatttcactttaaccctcgttttaacgagaataaccggagagtgattgtgtgtaatactaaacttgacaacaattggggacgcgaggaaagacagagcgtgtttccattcgagagtggtaagccattcaaaatacaggtgttggtggaaccagaccatttcaaggtagctgtgaacgatgctcaccttctgcaatacaaccatagagtcaaaaaacttaacgaaatttcgaaacttggaatttccggcgacatcgatctcacctccgcttcctacacgatgatt

SEQ ID NO: 331761 - DNA, 750 bp, Artificial Sequence
  derived and/or modified sequence
atggcagataatttctcactccatgatgccctgagtgggtctgggaatcccaatcctcagggatggcccggggcatggggaaaccagccagcgggggcaggagggtaccccggagcatcatatcctggagcgtaccccggacaggccccacccggggcctaccccggacaagcccctcctggagcataccctggggcgcctggagcctatcccggggcacccgcacccggggtgtatcctggaccaccgtccgggcccggggcctatccttcctctgggcagccttcagcaacaggagcatatcccgcgacagggccctatggagcccctgccgggcccctcatcgtgccttacaatttgccccttccagggggggtggttccccgcatgctcatcacaatcctggggacagtcaaacccaacgccaaccgaattgccctggatttccagcgcgggaatgatgtagcttttcatttcaatccacggttcaatgagaacaatcggagagttatcgtctgtaatactaaacttgataataactggggaagagaagagagacagtctgtttttccttttgaatcagggaaaccatttaaaatacaggtgctcgtggaacccgatcattttaaagtggcggtgaacgatgctcatcttctgcagtacaaccacagggtgaaaaaacttaatgaaataagtaagcttgggatttccggagatatagatctgacatctgcttcctatacaatgatc

SEQ ID NO: 331762 - DNA, 750 bp, Artificial Sequence
  derived and/or modified sequence
atggcagataacttctcacttcacgatgccctgtcgggcagtggaaaccctaaccctcagggctggccgggagcttggggaaaccagccagccggggcaggcggataccccggggccagttacccaggggcctaccccggacaagccccgccgggtgcatatcctggtcaggccccgccgggggcctatcctggcgcccctggagcgtatcctggagccccggcccccggggtatatccaggaccgccgagcgggcccggagcatacccatctagcggacaaccaagtgcaacaggggcctaccctgcaaccggcccttacggcgcgccagcaggccctctgatcgtgccctataaccttccccttcctggcggagtagtcccaaggatgctgattaccattctgggcacagttaagcccaacgctaacagaatcgccctggacttccagagggggaacgatgtcgcctttcattttaaccctcggtttaacgagaacaatagaagggtgattgtttgtaatacgaagctggataacaactggggccgcgaagaaaggcagtctgttttcccatttgagtcgggcaagccctttaagattcaggtcctggtggaaccggatcacttcaaggttgcagttaacgacgcccacctgctgcagtacaaccacagagtgaaaaaattgaatgaaatctccaagcttggcatctctggggatattgatttgaccagtgcctcctatacgatgatt

SEQ ID NO: 331763 - DNA, 750 bp, Artificial Sequence
  derived and/or modified sequence
atggccgacaacttttctcttcacgacgccttgtccggttccggcaaccccaatccacagggatggcctggagcatggggaaaccaaccagctggagccggcggctatcccggagcttcatacccaggcgcttatcccggacaggctcctcccggagcatacccaggtcaagcacctcctggcgcctaccctggtgcccccggagcttaccccggagcccccgcacccggcgtctaccccggtcccccctcaggtcctggagcttatccatcctcaggccaaccttccgcaaccggtgcctaccccgccacgggaccatacggtgccccagcgggacccctcatcgtgccttacaacctgccactgcctggtggcgtcgtacccaggatgctgatcaccatcctcggaactgtgaagccaaatgcaaataggatagcactggacttccaacgcggtaacgacgtcgccttccactttaacccaagattcaatgaaaacaataggcgcgtgattgtgtgtaacactaagctggataataactggggaagggaggaacgccaatcagtgttcccgttcgaatctggaaaaccatttaaaatccaggtactggtcgagcccgatcactttaaggtggccgttaatgacgcgcacctcctgcagtacaaccatcgcgtgaagaaactgaatgagatatcaaagctgggtatcagcggcgatatagacttgacttccgctagctacacaatgata

SEQ ID NO: 331764 - DNA, 750 bp, Artificial Sequence
  derived and/or modified sequence
atggctgataactttagcctccacgatgccctgtccggctcagggaatccaaatccccagggatggcctggcgcctggggtaatcaacctgccggagccggagggtatcctggggcctcatatccgggagcgtaccccggtcaggcgccccctggcgcgtaccctgggcaggcaccgcccggtgcgtacccaggcgccccaggcgcttaccccggagcaccagccccaggtgtgtaccccggacctccctccggaccgggggcttatccttcatctggtcagccctctgccacaggagcttacccagctacaggcccatacggcgctcccgcaggcccgctcatagtcccgtataacctgcccctccccggaggagtggtgcctagaatgctgataaccatccttggcacagttaagcccaacgctaacagaatcgcattggacttccagcggggcaacgatgtagcctttcacttcaacccccgatttaatgaaaataaccgccgggtgattgtatgtaacaccaagctggacaataactggggacgcgaagaacgacagtccgttttccctttcgagtcgggcaagcccttcaagattcaggtactggtggagccagatcacttcaaagtcgcggtcaacgacgctcatctgctacagtacaaccaccgggtaaagaaacttaatgagatctctaaactcggcatttccggcgacattgacctgacaagcgctagctacaccatgatt

SEQ ID NO: 331765 - DNA, 750 bp, Artificial Sequence
  derived and/or modified sequence
atggcagacaatttctctctccatgacgccctgtccggctctggtaacccaaaccctcaaggttggccaggtgcatgggggaatcagccggccggagcaggaggctatcctggggcatcctatccaggtgcatacccgggacaggcaccaccaggcgcttatcccggccaggcaccaccaggcgcctaccctggagcgcccggggcttaccccggcgcccctgcgcccggggtctaccccgggcccccatccggtcctggtgcatacccatcttccggacagccgtccgcgaccggcgcatacccggcaaccggcccttacggggctcctgcagggcccctgattgttccgtataatctccctctcccggggggcgtggtgccccgaatgctgatcacaatcctcggtacggtgaagccgaacgctaacagaatcgctctggatttccagcggggaaatgacgtggctttccatttcaatccacggttcaatgagaataaccgacgggtgattgtatgcaatacaaaactcgataacaactggggccgggaggagaggcagtccgtgttcccctttgagtcggggaagccttttaagattcaggtcctggtggagccagatcatttcaaagtcgctgtgaacgacgcgcacctgctgcagtacaatcaccgagtgaaaaagctgaatgagatttccaagctcggtattagcggagacatcgaccttactagcgcatcctacaccatgatc

SEQ ID NO: 331766 - DNA, 750 bp, Artificial Sequence
  derived and/or modified sequence
atggccgacaacttctctttgcatgacgctctaagcggaagcggcaatccaaacccacagggatggccaggcgcgtggggcaaccagccagcgggagccgggggttatcctggtgcgtcttatcccggtgcttaccccggacaagcccctccgggtgcgtaccctggtcaggcgccacctggcgcttaccctggcgcgccgggtgcgtatccgggcgcgccagcaccaggggtgtaccctggcccaccatccggtcctggtgcatacccaagctccggccagccgtctgcgactggtgcttatccggctaccggtccttacggtgcgcctgctggacccctcatcgtaccgtacaacctgccgctccccggtggtgttgttccgcggatgctgattactatcctgggaactgttaaaccaaatgcgaaccgcattgcactggacttccagcgcggcaacgatgtcgcttttcacttcaacccgcggtttaacgagaacaaccgccgcgtgattgtttgcaacactaaactggataacaattgggggcgcgaggagcgtcaatctgtatttccgttcgagtcaggtaagcctttcaagattcaagttctggttgaacctgaccatttcaaagtggctgtgaacgacgcccacttgctgcaatacaatcatcgagtcaagaaactgaatgaaatcagcaagctgggtatttccggcgatattgatctgacgagcgccagctacaccatgatt

SEQ ID NO: 331767 - DNA, 750 bp, Artificial Sequence
  derived and/or modified sequence
atggcagacaacttttcattgcacgatgcactgtcgggatcgggcaacccaaaccctcagggatggccaggagcttgggggaatcaaccagccggggcaggaggataccctggagcctcgtacccgggagcgtatccaggtcaggccccgccgggtgcctaccccggacaggctccgccaggagcgtaccccggagccccaggcgcttacccaggagccccggccccgggggtgtaccctggccctccatctggccctggagcctacccgtcctccggccagccaagcgccaccggcgcctaccccgccaccggcccatacggcgcccctgcaggccctttgatcgtgccatacaaccttccgctgcctggtggagtcgtccccagaatgctgatcactatcctggggactgtgaagccgaacgccaacaggatcgcgcttgactttcagcgcggaaatgacgtggcattccactttaatccgcgcttcaacgaaaacaacaggcgggtgatcgtctgtaacactaaactggacaacaattggggccgggaggaacgccagtcagtgttcccgtttgagtctgggaaaccattcaagatccaagtgctggtcgagccagaccacttcaaggttgcagtgaatgacgctcacctgctgcaatacaatcacagagtcaagaagctcaatgagatctccaagctgggcatctcaggagatatcgacctgacttccgcctcgtacaccatgatc

SEQ ID NO: 331768 - DNA, 750 bp, Artificial Sequence
  derived and/or modified sequence
atggcagataacttctctctgcacgacgcgctgtccggaagtggtaatccaaaccctcagggctggccgggggcttggggcaatcagcctgccggagccggtggttatcccggagcctcttatccaggcgcgtatccgggacaggcgccaccaggtgcgtaccccgggcaagcaccgcctggcgcctacccaggtgcgccgggcgcgtacccaggagcaccagcaccgggagtctacccgggaccgccgtcaggcccaggagcttacccatcaagcggacagccctcagctactggggcttacccggccaccggtccgtacggtgcacctgcgggccccctcattgtgccttacaacttgccactccctggaggagtcgtgccccggatgctcattactatccttggaaccgtcaaaccgaacgcgaatagaatcgccctggacttccagcgtggaaatgatgtcgcctttcacttcaacccacggtttaacgaaaacaacagacgcgtgatcgtgtgcaacaccaagctggacaacaattggggcagggaggaacgccaatcggtgttcccgttcgagtccgggaagccattcaaaatccaggttctggtagagccggatcactttaaagtagctgtcaacgatgctcacttgctccaatacaatcaccgagtgaagaagctgaatgaaatctcgaagctcggcatctccggagacatcgacctgaccagcgcgtcatacactatgatc

SEQ ID NO: 331769 - DNA, 750 bp, Artificial Sequence
  derived and/or modified sequence
atggcagacaacttctcgctgcatgacgcactttccggatccggtaatccgaacccacaaggatggcctggcgcatggggaaaccagccagcaggagccggaggttaccctggagccagctacccaggagcatacccgggccaagctcccccaggggcctaccccggacaggcgccccccggagcttaccctggcgcaccgggagcgtatccaggagcgccagcacctggagtctacccaggacccccgagcggacctggcgcgtacccttcttctggacagccttcagccaccggtgcgtacccagcaaccgggccttacggagcccctgctggacctctgatcgttccttataacctgccactgcccggtggcgtggtcccaagaatgctgataactattctcggtactgtgaagccaaatgcaaacaggattgctctcgactttcagcggggtaacgatgtggccttccacttcaaccctaggtttaacgagaataacagacgagtgatcgtctgtaacactaaacttgataacaactgggggcgtgaggaacgtcagagcgtgtttccatttgaatccggaaagccattcaagatacaggtgcttgtcgagcccgaccatttcaaggtggctgtgaatgatgctcatctcttgcaatacaaccacagagtgaagaagctgaacgaaatctcaaagctgggcatctccggcgatatcgacctgacgtccgcatcctacaccatgatc

SEQ ID NO: 331770 - DNA, 750 bp, Artificial Sequence
  derived and/or modified sequence
atggcagataactttagcctgcatgatgcactgagtggatctggcaacccaaatcctcagggctggcccggggcctggggaaatcagccggccggtgccggcggctacccaggcgcatcctaccctggtgcctatccgggccaagcaccgccaggtgcgtatcctggccaggcgccgcctggagcctaccctggagcccccggagcgtacccgggagcacctgcgccgggtgtgtacccaggtcccccctccggtccgggagcttatccctcctcggggcagccatcggccaccggagcatacccggctactggtccgtacggggccccagccgggccactcattgtgccgtacaacttgccgcttccgggtggagtggtgccgcgcatgctgatcaccattttgggtactgtgaagcccaatgcaaacagaatagccctggacttccaacgggggaatgacgtggccttccactttaatcctagatttaacgagaataaccgccgcgtgatcgtgtgcaataccaagctcgacaacaactggggcagggaggaacggcagtcggtctttcctttcgagtcaggcaagcccttcaagatccaggtccttgtcgagccggaccatttcaaagtggccgtgaacgatgcgcacctccttcagtacaaccacagagtgaagaaattgaacgagatctccaagctgggaatctccggcgatatcgacctcacgtcagcttcgtacactatgatc

SEQ ID NO: 331771 - DNA, 750 bp, Artificial Sequence
  derived and/or modified sequence
atggctgacaacttctctttgcacgatgccttgtctgggagcggcaatcctaacccacagggctggcccggagcgtggggcaatcagccggccggcgcggggggctaccctggggcctcctatcccggggcgtatccgggacaggcgccacccggagcataccctggccaggcccccccaggcgcgtatccaggcgcaccaggtgcctaccccggcgcgcccgcccccggcgtgtatcccggacccccctcaggtcccggggcatacccaagttcgggccagccctctgccactggcgcctacccagctactggtccttatggggctccagccggtcctctgatcgttccatataatttgcccctacccggaggcgttgtcccccgtatgttgatcactatcctggggactgtcaagcccaacgcaaatcgcatcgctttggacttccagcggggtaacgacgtggccttccatttcaaccccagatttaacgagaacaaccgacgggtgatcgtgtgtaacacaaagctggacaacaattggggccgcgaagagagacagagcgtgttcccttttgagagcggaaaaccctttaagattcaggtgctggttgagcccgatcacttcaaggtcgccgtgaacgacgcccatctgcttcagtacaatcaccgcgtgaaaaagctgaatgaaatcagcaaactggggataagcggagacatcgacttaacatctgcctcatataccatgatt

SEQ ID NO: 331772 - DNA, 750 bp, Artificial Sequence
  derived and/or modified sequence
atggcagataacttctcactccacgacgcgctgtcgggatctggcaatcccaacccgcagggatggcctggagcctggggtaatcaaccagccggggcaggcggatacccgggagcgtcctacccaggagcatacccagggcaggcgcctcctggcgcttaccctggacaagcgccgcccggagcctatccaggagccccaggagcctaccctggggcaccagcaccgggggtgtacccaggaccgccgtcaggaccaggcgcttaccccagctctgggcagccatcagcgactggagcatacccggccactggcccgtacggcgcgccagccggcccgctcatcgtgccctataacctgcctttgccgggtggggtcgtgccgcgaatgctcattaccatcttgggcaccgtgaagcctaacgcaaaccggatcgccctggacttccaacgtggaaacgacgtcgccttccatttcaacccgaggttcaacgagaataaccgcagagtgatcgtgtgcaatactaagttggacaacaactggggccgcgaggaacgacagtcagttttcccgttcgagtcgggaaaacctttcaagatccaggtactggtcgaacccgatcatttcaaggttgccgtcaatgacgcgcacctgctgcagtacaaccaccgcgtgaaaaaactgaatgaaataagcaagctcggaatctccggagacatcgatctgacttcggccagctacactatgatt

SEQ ID NO: 331773 - DNA, 750 bp, Artificial Sequence
  derived and/or modified sequence
atggcagataacttctcgctgcacgatgccctctcgggatctgggaatcccaatccccaggggtggccgggggcttggggcaaccaaccggccggtgctggcggataccctggggccagctacccgggtgcttatccgggacaggcgccgccgggcgcgtaccccggccaggctccacccggcgcctacccgggagccccgggtgcgtacccgggcgcacctgcgcccggtgtgtacccgggtccgccttccggccccggtgcatacccatcgtccggacagccaagcgccactggggcgtacccggcaactgggccttacggtgcacctgccggcccactcattgtcccgtacaacttgccgttgcctggaggagtggtcccacggatgctgattaccattctgggaacggtcaaaccgaacgctaaccgcatcgcactggactttcaacgcggcaacgacgtggcctttcatttcaacccaaggttcaatgagaataatcgtagagtgattgtgtgtaataccaaacttgacaacaactggggaagggaggaacgccagtccgttttcccgttcgaaagcggtaagccgtttaagattcaagtgttggtggagccggatcacttcaaggtcgccgtgaacgatgctcacctcctccagtacaaccatagagtgaagaaactgaacgaaatatcaaagctgggtatctcgggagacatcgacctcacctcggcgtcgtatactatgatc

SEQ ID NO: 331774 - DNA, 750 bp, Artificial Sequence
  derived and/or modified sequence
atggccgacaacttttctctgcatgatgctctgtcagggagcggaaatcccaacccacagggatggcccggagcatggggtaatcagccagcaggggcaggtggctacccaggagcttcatatcctggcgcttatcccgggcaggccccccctggagcctatcctggccaagcccctccgggcgcctaccctggagcccctggagcatatcccggcgccccggctcctggcgtgtatcctggaccaccaagcggcccaggtgcttacccaagtagcgggcaaccatcggctactggagcctacccggccaccggaccttatggcgcccctgcaggcccacttatcgttccatacaaccttccccttcccggcggagtcgtgccacgcatgctgattaccatcttagggactgtgaagccaaatgccaaccgcatcgctttggattttcagaggggaaacgacgtcgcattccatttcaaccctaggttcaacgagaataacagaagagtgatcgtatgtaacacaaagcttgataacaactggggtagagaagagaggcagagtgtgttcccctttgaatcgggtaagcccttcaaaattcaagtgctggtcgaacccgaccactttaaggtggcagtcaacgatgcacacctgctgcagtacaatcatagagtgaagaaactcaacgaaatctcaaagctggggatatcaggagacattgacctcaccagcgcttcgtacacaatgatc

SEQ ID NO: 331775 - DNA, 750 bp, Artificial Sequence
  derived and/or modified sequence
atggccgacaacttttcccttcatgacgctctctctggttcagggaacccaaacccacaaggatggcctggcgcttggggaaatcaaccagcaggtgcaggaggctacccaggagcctcgtacccaggtgcctaccccggtcaagcgcctcccggtgcataccctggtcaggcccctccaggagcttacccaggggcaccaggcgcgtaccctggggcgccagcaccaggagtgtatcccggacccccctcagggccaggcgcatacccttcatcgggacaacctagtgctaccggggcataccccgcaactgggccttacggggcacctgcaggacccctcatcgtcccttacaacctcccactcccgggaggagtggtgcctcgtatgcttattactattctcggaaccgtgaagccgaacgcaaaccgaatagcacttgatttccaacgaggaaacgatgtggcatttcactttaatcctaggtttaacgagaataatcgaagggtgatcgtttgtaacactaaactcgacaacaactggggtagagaagaaaggcagtcggtgttcccttttgagtccggtaagcccttcaagattcaggtgctggtcgaacctgatcactttaaggttgcggtgaacgatgcccatcttctgcagtacaaccatagagtgaagaagctcaatgaaatctcaaaactgggtatctcaggtgatattgacttgacgagcgcgtcgtacaccatgata

SEQ ID NO: 331776 - DNA, 750 bp, Artificial Sequence
  derived and/or modified sequence
atggccgataacttcagtttacatgatgctttatctggtagcggcaatcccaacccgcaaggctggccaggagcctgggggaatcaacccgccggggctggcggctacccaggagcttcatacccaggggcttatcctggacaagctcctcccggagcatatcctggtcaagctccacccggagcctaccccggtgcccccggagcataccctggagcaccggcacccggcgtctacccaggccccccctccgggcctggcgcatatcctagtagcggacagccgagcgcgaccggagcctatccagccacaggaccatatggcgcacccgcaggcccactgatagtgccttataatctgccccttcccggaggggtggttcctcgcatgttaattacaattctgggaacagtgaagccaaatgccaacagaatcgctctcgattttcagaggggaaacgacgtggcctttcactttaatccccgttttaatgagaacaataggcgcgtgatcgtatgcaatacaaagctggacaacaactgggggagggaggagcgccagtcagtatttcctttcgagtccgggaagccatttaaaatccaagtgctggtggaacccgaccattttaaagtagcggttaatgacgcccatctgctccagtacaaccacagagtaaagaagctgaatgagatctccaagctgggaatttcgggagacatagacctcacctccgcttcctacactatgatc

SEQ ID NO: 331777 - DNA, 750 bp, Artificial Sequence
  derived and/or modified sequence
atggccgacaatttttctttgcacgacgccttatcaggatcgggtaatccaaatccccaaggttggccgggagcttggggcaaccagcctgcaggggcaggtggttaccccggtgcaagttaccccggcgcatacccagggcaagcccctccgggtgcgtaccctgggcaggcgcctcccggggcttatcccggcgctcccggtgcatatcccggtgcgcccgcgccgggtgtctacccaggacctccgagtgggcctggagcgtatccgtctagcggacagccttcggctactggcgcatacccggccaccggtccctatggggccccggccggtcctctaatcgtcccatacaatttgcccctgcccggaggagtcgtcccgcgaatgctaatcactatactaggtacggtcaagcccaatgcgaaccgcatcgcacttgatttccaacgaggtaacgacgtcgccttccactttaatcctcgcttcaacgaaaataatcgacgagtgatcgtttgcaatacgaaactggataacaactggggtagggaagagagacaatcagtctttcccttcgaaagcggtaagcctttcaaaattcaagtcctcgtggaaccagatcactttaaggttgcagtgaatgatgcccatcttctacaatacaaccatagagtaaaaaagcttaatgaaattagcaagctcggtattagcggcgacatcgatcttacgtctgctagctatactatgatt

SEQ ID NO: 331778 - DNA, 750 bp, Artificial Sequence
  derived and/or modified sequence
atggctgataatttcagtttacatgatgcattatctggtagtggaaatccaaatcctcaaggatggccaggtgcttggggaaatcaacctgctggagctggaggatatccaggagcttcatatccaggtgcttatcctggacaagcaccaccaggagcttatcctggacaagcaccaccaggagcttatccaggtgctccaggagcttatccaggtgcaccagcaccaggagtttatccaggaccacctagtggaccaggagcttacccatcatctggtcaaccatctgctactggtgcttatccagctacaggaccttatggagcacctgcaggtccattaattgtaccatataatttaccattaccagggggagttgtaccacgtatgttaatcactatcttgggtactgttaaaccaaatgctaacagaattgctttagatttccaaagaggaaatgacgttgcttttcatttcaatccaagattcaacgaaaataatagaagagttattgtatgtaatacaaagttggataataattggggacgagaagaaagacaatctgtttttccatttgaatcagggaaaccattcaaaatccaagtattagttgaaccagatcattttaaagttgcagttaatgatgcacacttgcttcaatataatcatagagttaaaaagttaaacgaaatttcaaaacttggtatttctggtgatatagatttaacttcagcttcatatacaatgatt

SEQ ID NO: 331779 - DNA, 750 bp, Artificial Sequence
  derived and/or modified sequence
atggcagacaatttttcactccatgatgcgctttctggctccggcaacccaaacccccagggctggcccggagcttggggcaaccagcctgccggcgctggcgggtacccaggcgcaagttacccaggcgcttaccccggccaggctccccctggcgcataccctggacaagccccccctggagcatatccaggggctcccggagcttatcccggagcgcctgcaccgggggtgtatcctggtccaccttcaggaccaggcgcgtatcctagttccggtcagccctcggctactggagcatatcctgccaccggcccatacggtgctcccgcgggtcctctgatcgtaccttataatctaccattgccgggcggggtcgttccccgaatgctgatcaccattctgggaaccgtaaaaccaaatgccaaccgtattgccctggatttccaaagaggaaacgacgtcgcctttcacttcaacccccggttcaatgaaaacaacagaagagtgattgtttgtaataccaagctcgataacaactgggggagggaagagcggcaaagcgttttcccatttgagtcggggaaaccatttaagatacaagttctcgtagaacccgatcacttcaaagtcgctgtcaacgatgcacacctgctgcagtataaccatcgcgttaaaaaacttaacgaaatctctaagttaggcatctccggagacatcgatctcacttccgcttcgtataccatgatt

SEQ ID NO: 331780 - DNA, 750 bp, Artificial Sequence
  derived and/or modified sequence
atggccgacaatttctcactgcatgacgcgctgtcgggatccggcaatcccaacccacaaggttggcctggcgcctggggaaaccagccagctggagccggaggataccctggagcatcttacccaggggcatatcccggtcaggcccctcccggtgcctacccaggtcaggcaccacccggggcttacccaggcgcacctggggcataccccggtgcgcctgctcccggagtctaccccgggcctccctctggcccaggagcctacccctctagcgggcagccgagcgccaccggagcttatccagctaccgggccctacggcgcgcctgcaggcccactaattgttccatacaatctgcccctgcctggaggggttgtcccccgcatgctgatcaccattctgggcaccgttaaacctaatgcgaacaggatcgcgttagacttccagcgaggtaatgatgtggcctttcactttaacccgcgattcaatgaaaacaacaggcgggtcattgtgtgcaataccaaattggacaacaactgggggcgcgaggagcgtcagtccgtgttcccattcgagtccggaaagccatttaagattcaggtccttgtggaaccagatcattttaaagttgcagttaatgacgcacatctgcttcaatacaaccatagagtgaaaaagctcaacgagatctctaaactgggtatctcaggagacattgatttgaccagcgcatcatacactatgatt

SEQ ID NO: 331781 - DNA, 750 bp, Artificial Sequence
  derived and/or modified sequence
atggccgacaacttttcgcttcatgacgcgctttcgggaagcggtaaccccaacccacagggatggcctggagcatggggtaatcaacccgcaggcgccgggggctaccctggggcatcctatcctggtgcataccctgggcaggcgccgccgggggcctaccctggccaagcacctccaggcgcatacccgggcgcaccaggagcataccccggagcccctgcaccgggagtgtaccccgggccacctagcgggccgggagcatatccttcctcaggccagccaagcgcaaccggggcttaccccgcgactggtccttacggagcaccagcaggacctctcattgtcccctacaacctgcctcttcccggtggggtcgtgccacggatgttgatcactatacttggcaccgtcaagccaaacgcgaatagaatcgcactcgattttcaacgtggtaatgatgtcgcatttcatttcaatcctagattcaacgagaacaacagacgcgtgattgtctgtaataccaaactggacaacaattggggtcgagaagagagacagagcgtgttcccatttgagtccggcaagccttttaagatccaggtcctggtggaacctgatcacttcaaggtggcagtgaacgatgcacacctgctgcaatacaatcatcgggtcaagaagctcaacgaaattagcaaactggggatctcgggtgatatagatcttacttcagcctcgtacaccatgata

SEQ ID NO: 331782 - DNA, 750 bp, Artificial Sequence
  derived and/or modified sequence
atggcggataattttagcctgcatgacgctctgtccggcagcggtaaccccaatccacagggatggccgggtgcctggggcaaccagcctgccggagctggaggttatcctggcgctagttaccctggtgcctaccccggacaggcccccccgggagcgtaccctgggcaggccccccccggagcgtatcccggcgcaccaggcgcatacccgggagccccggcacccggtgtctatcccgggcctcctagcgggccgggtgcctacccttcctcaggccaaccttcagcaacgggagcctaccctgcaacgggaccgtacggggctccggcgggacccctgatcgtgccatataatctcccacttccaggtggagtggtgccccgcatgctcatcacgatcctaggcactgtgaagcccaatgcaaacagaatcgcgctcgatttccaacgggggaatgacgttgccttccatttcaatcctaggttcaacgagaacaatagacgcgtaattgtgtgcaacactaagctagacaataattggggccgagaggaacgccagagtgtgttcccttttgaatcgggaaaaccctttaaaatccaagtccttgttgaaccagaccacttcaaagtagccgttaatgacgcccaccttctgcagtacaaccaccgggttaaaaagttgaacgaaatatctaagcttggaatcagcggtgacatcgatctaacctccgccagctatactatgatc

SEQ ID NO: 331783 - DNA, 750 bp, Artificial Sequence
  derived and/or modified sequence
atggcagacaatttctctctgcatgacgcgctgtcagggtcgggtaatccgaacccccagggatggccgggtgcatggggcaatcagccagccggagccgggggctacccaggggcgtcatatccaggagcatacccaggacaagcacctccaggtgcttacccagggcaagcacctcctggcgcctatccaggagcgcctggtgcctatccgggcgcccctgcgcctggcgtctacccaggaccaccgtcaggaccaggagcctacccaagcagcggccaacccagcgctactggagcgtacccagcaacggggccttacggagcgccagccggtccactgattgttccctacaacctccctctgcctggaggcgtggtcccaagaatgcttattactatcctgggcactgtgaaacccaacgcaaacaggatagcactggatttccagagaggtaacgatgtcgcgtttcactttaacccaagatttaacgagaacaatcgacgggtgattgtgtgtaacacgaagctcgataacaattggggtcgggaagagcgccagtccgtgtttcctttcgagtcgggaaagcctttcaagatccaggtcctggtggaaccagatcactttaaggtcgcagttaacgatgcgcatcttcttcaatacaaccatagggtcaagaaattgaatgagatatcgaaacttggtatttctggtgatattgacttgaccagcgcgtcctacaccatgatt

SEQ ID NO: 331784 - DNA, 750 bp, Artificial Sequence
  derived and/or modified sequence
atggctgacaacttttcgctccatgatgcactctcgggcagcggaaatccaaatccacagggttggccaggcgcatggggaaaccaacctgcaggtgcaggaggataccctggtgcaagctacccaggagcatacccaggccaagcccctccaggcgcatacccgggacaagctcctcccggggcataccctggggcacccggcgcataccccggcgcacctgccccgggagtctaccctggacctccttcaggtcccggagcgtacccgtcctcaggacaaccatcggctaccggagcataccctgccactggaccatacggagcgccagccggaccacttatcgtgccatacaacctgccactccctggaggtgtcgtgcccaggatgcttatcaccattctcgggaccgtgaagcctaacgctaaccggattgcccttgatttccagaggggtaatgatgtggccttccacttcaatccacgttttaacgagaataaccggagagtgattgtgtgtaataccaagctggataacaattggggtcgagaggagcggcaatcggtctttccttttgagtcgggtaagccatttaagattcaggtgcttgtcgagcctgatcactttaaggttgcagtgaatgacgcacacttgttgcagtacaatcatagggttaagaagctgaacgaaataagtaaactgggaatctccggagacatagaccttacctccgcaagctacactatgatt

SEQ ID NO: 331785 - DNA, 750 bp, Artificial Sequence
  derived and/or modified sequence
atggctgacaatttttcgctgcacgatgcactgagcgggtcaggtaacccgaaccctcagggatggccgggtgcatggggaaatcagcccgccggcgcgggagggtacccgggagcctcctacccaggagcctatccaggacaggcgccaccaggcgcgtaccccggtcaagcgcctccgggtgcctatccgggtgctccgggggcgtaccctggagcacctgcccctggagtgtacccgggcccgccctcagggcccggagcctacccgtcgtctggccaaccgtcagccacgggagcttacccagctaccggaccgtacggagccccggccggcccgctgatcgtgccatacaatctgccgctccctggcggagtcgtgcctcggatgctcatcactatcctgggcactgtcaagccaaacgcaaatcgcatcgccttggatttccagcgcgggaatgatgtcgctttccacttcaacccgcggtttaacgagaacaacaggagagtcattgtgtgcaataccaaacttgacaataactggggaagagaagagcggcaatccgtgttcccattcgaaagcggaaagccatttaaaatccaggttctggtggagcccgatcacttcaaggtggccgtgaacgacgcgcatctgctccagtacaaccatcgcgtgaagaagctgaacgaaatctcgaagctcggaatttccggcgacatcgacttgacttcggcaagctacaccatgatc

SEQ ID NO: 331786 - DNA, 750 bp, Artificial Sequence
  derived and/or modified sequence
atggcagataatttctccctgcacgacgctctcagcgggtccgggaatcctaatccgcaaggctggccaggcgcatggggaaaccaacctgctggcgcaggcggctatccaggcgccagctatccgggagcctacccgggacaggcccctcctggagcctaccctggccaagccccacccggggcttacccaggggccccaggcgcctatccaggggccccagccccaggggtttatcccggacctccttctggccctggggcctacccctctagcggacaaccgtccgccaccggagcctaccccgctaccgggccatatggtgcccccgctggacccctgatcgtcccttacaatctgccgcttcctggtggcgttgtgccgagaatgctgataaccattctcgggaccgtcaagcctaacgcaaaccgcattgcactcgacttccagcgaggaaacgacgtagcattccacttcaaccccagattcaatgagaacaatcggcgagtaattgtgtgcaacactaaactggataataattgggggagagaggagagacaatccgtgttcccctttgagtcaggaaagccatttaagattcaggtacttgtcgagcccgaccacttcaaggtggccgtcaatgacgctcatctactccagtataatcatagggtgaagaaactgaatgaaatctccaagctgggaattagtggcgacattgatttgacttccgcaagttacacaatgatt

SEQ ID NO: 331787 - DNA, 750 bp, Artificial Sequence
  derived and/or modified sequence
atggccgataacttctccctgcatgacgccctttcgggaagtggtaaccctaacccacaaggatggccaggtgcttgggggaatcaaccagcaggagctggcggctaccctggcgcatcctaccccggcgcctaccccgggcaagcgcctccgggcgcatacccaggccaggccccacccggagcttaccctggggcaccaggagcataccctggagctcctgctcctggagtgtacccgggaccaccttcggggcccggtgcgtatccttcatcgggacagccctcggcgactggtgcatacccagcaaccggaccttacggtgcccctgcaggcccactgattgtgccatacaatctgcctcttcctgggggagtggtgccccgcatgcttataactatccttggtaccgtgaaaccaaacgcaaatcgcattgccctggattttcaaaggggtaacgacgtggcatttcatttcaacccccgttttaacgagaataacagacgcgtgattgtgtgtaatactaagttggacaataactggggtagagaagaacgccagtcggtgttccctttcgaaagcggcaaaccatttaagattcaagttctggtggagcccgaccactttaaggtggccgtaaacgatgcgcatctccttcaatacaaccacagggtgaagaaacttaatgagatctcaaagctgggtatctccggcgatattgaccttacttcagcgtcctataccatgatc

SEQ ID NO: 331788 - DNA, 750 bp, Artificial Sequence
  derived and/or modified sequence
atggccgacaatttttcactgcatgatgctttgtcaggctctggaaatccgaatcctcaggggtggcctggcgcatggggtaatcagcccgctggagctggaggttacccgggagcttcatatcccggcgcttaccccgggcaagcgccgcccggggcataccccgggcaggcaccccccggcgcctatccaggtgcacctggggcgtaccctggtgcacctgctccgggagtatacccgggaccaccatcagggccaggcgcttaccccagttctggccaaccgtcagccaccggggcctaccctgcgactggcccgtatggggccccggccggacccttgatcgtgccctacaacctgccactgccaggcggcgtcgtacccaggatgcttattacgatcctcggcacggttaagcctaatgctaatcgcatcgctctggatttccagagagggaacgatgtcgcattccacttcaaccccagatttaacgagaacaaccggagagtgattgtgtgcaataccaagctggataacaattggggccgcgaggagagacaaagtgtgttccccttcgagagtgggaagccatttaagatccaggtgctcgtggaaccagatcattttaaagtcgcggtgaacgacgcacacctgttgcagtacaatcatcgagtcaaaaaattgaatgaaattagtaagctcgggatttctggggacatagacttgacctccgcaagttacaccatgatc

SEQ ID NO: 331789 - DNA, 750 bp, Artificial Sequence
  derived and/or modified sequence
atggctgataacttttccctgcacgacgccctgagcggctccggaaatccgaacccgcagggctggccgggggcgtggggtaatcagccagcaggagcaggcggatacccaggcgcgtcgtatcctggcgcgtacccagggcaagctcctcctggcgcatacccgggacaggctcctccaggcgcctacccaggcgccccaggcgcttaccccggagcaccagcacccggagtgtatccagggcccccctccggaccgggcgcctacccgtcatccggacagccgtccgccaccggagcctatccggcgaccggcccatatggagcccctgccgggcctcttatagtcccttacaacctgccactgccaggcggcgtcgtgcctcgcatgctgatcactatcttgggtaccgtgaagcctaacgcgaacagaatcgccctggacttccaacgcggaaatgacgtggccttccatttcaacccgcgcttcaatgaaaacaatcgccgcgtgatcgtgtgcaataccaaactggataacaactggggtcgggaagagcggcaatccgtctttccgttcgaatcaggaaaaccgtttaagatccaagtcctggtggaaccagaccacttcaaagtggccgttaacgatgctcatctgctgcagtacaatcaccgcgtgaagaagctgaatgaaatttcgaagctcggaatttcaggagacatcgatcttacctccgcatcatacactatgatc

SEQ ID NO: 331790 - DNA, 750 bp, Artificial Sequence
  derived and/or modified sequence
atggccgacaacttttctctgcatgacgcgctttctgggagcggcaacccaaatccccaaggctggcccggggcctgggggaaccagcctgcgggcgcaggagggtatcctggggcctcctaccccggcgcgtatcctggacaagcaccccccggtgcatatcctggccaggctccccccggggcctatccaggagccccaggcgcttacccgggcgcgcccgctccgggcgtctatccaggtccccctagtgggccgggggcatatccgagctccggccagccaagtgccacaggagcctatccagccaccgggccttatggcgctcctgcaggacccctcatcgtcccttacaacctgccgctgccaggcggggtggtgccaaggatgcttataacaattttgggcactgtgaagcccaacgccaaccgaatcgctctggactttcaacggggcaacgacgtagccttccactttaaccctaggtttaatgaaaataaccggcgggtgatcgtgtgcaataccaaactggacaataattggggccgggaggagagacagagtgtttttcccttcgagtctgggaaacctttcaaaatccaggtgctggtggagccagaccacttcaaggtggctgtgaacgacgcacacctgcttcagtacaaccatcgggtcaagaaactgaatgaaatcagtaagctcgggattagcggtgatattgacctgacttccgcttcctatacaatgatc

SEQ ID NO: 331791 - DNA, 750 bp, Artificial Sequence
  derived and/or modified sequence
atggccgacaatttctcactgcatgacgccctgtccgggtctggaaaccctaatcctcagggatggccgggagcatggggcaaccaaccagcaggcgcaggcgggtaccctggggcatcgtaccccggagcataccccgggcaagcacctcctggagcatatccgggacaagcgcccccaggggcatacccaggggcaccaggtgcatatcccggagctcccgcacctggagtgtatccagggcctccctccggcccaggtgcgtatccgagctcgggtcaaccctcggcaactggtgcttaccccgcgaccggaccatacggtgcacctgccggcccccttatagtgccttacaacctgccgctgcctggaggcgtcgtgccaaggatgcttattaccatcctgggtactgtgaagcctaatgcaaataggattgcattggatttccagagaggaaacgatgtggcttttcacttcaatcctaggtttaacgagaacaatagacgcgtgatcgtgtgtaacaccaagttggacaataactgggggcgcgaagaaagacagtccgtgtttcccttcgaatcgggtaaacctttcaaaattcaagtgctggtcgagcccgaccatttcaaggtggcagtcaacgatgcacacctcctccaatacaaccatagagtcaaaaagctgaatgaaatctcaaagctgggtatttccggtgatatcgaccttacctcagcgtcctatacgatgatt

SEQ ID NO: 331792 - DNA, 750 bp, Artificial Sequence
  derived and/or modified sequence
atggccgacaatttttccctccatgacgctctctccgggtcgggtaaccctaatcctcaaggttggcctggcgcttggggaaaccagcccgctggggctggcggataccctggagctagttatccaggcgcctatccaggccaggccccccccggagcctaccccggtcaggctccacccggggcttacccaggagcccccggtgcgtatcctggcgctcctgcgccaggcgtctaccctggtccacccagtggccccggagcctaccctagttctggccagccatctgcaactggagcatatccggcaaccggcccgtacggcgcaccagcagggcctctgattgtgccctacaacctgccactgcctggcggagtcgtgcctcgtatgttgataacaatcctggggacagtcaagcccaacgctaatagaattgcactggacttccagcgcggaaatgacgtcgctttccacttcaaccccaggtttaatgaaaacaaccggcgagtgattgtttgtaacacaaagctggacaacaactgggggagggaggaaaggcagtctgtttttccatttgagtccggcaagcctttcaagattcaggtactggttgaacccgaccatttcaaggtagcagtgaatgacgcacacttgttgcagtacaaccaccgcgtgaaaaaactgaatgaaatttccaagcttggaatctccggcgatattgatctgacttcagcatcttacaccatgatc

SEQ ID NO: 331793 - DNA, 750 bp, Artificial Sequence
  derived and/or modified sequence
atggctgacaacttttcgcttcacgacgccctcagcggatcggggaacccgaatcctcagggatggccgggggcttggggcaatcagccagccggagccggcggatacccaggagcgtcgtacccaggcgcgtaccccggccaggctccgccgggagcttaccctggacaagcaccgccgggcgcctacccaggtgcgccaggcgcctacccgggcgccccagcacctggcgtctatcctggaccaccaagcggaccgggagcctaccccagctcgggacagcctagcgcgactggagcgtacccggcgaccggcccctatggagcacctgcaggccccctcatcgtcccgtacaacctgccgctgcccgggggagttgtgcctaggatgctgatcaccattctgggaaccgtgaagccaaacgcaaaccgcattgcactggacttccagagagggaatgatgtggcattccactttaacccgcggttcaacgagaataaccggagagttatcgtctgcaacaccaagttggacaataactgggggcgcgaggagagacaatcggtctttccgttcgaatccggtaagcctttcaagattcaggtgctggtcgagccagaccactttaaggtcgctgttaacgacgcacaccttttgcaatacaaccaccgggtgaaaaaactgaatgaaatctcaaagctgggcattagcggggacatcgatctgacgtccgcgtcgtacactatgata

SEQ ID NO: 331794 - DNA, 750 bp, Artificial Sequence
  derived and/or modified sequence
atggccgacaacttctcgttgcatgatgccctctcagggagcggtaacccaaacccccagggctggcccggagcttgggggaaccagccggcaggagcggggggctatcccggcgcttcctaccccggagcgtaccccggccaagctcctcctggcgcctaccccggacaggcgcccccaggcgcatatcccggggcaccaggcgcttatcccggggccccagctcctggcgtatatccaggaccacccagcggccctggcgcctatccatcatccggacagccgtctgcaaccggggcgtaccccgcgaccggaccatatggcgcccctgcaggccccctcatcgtcccttataatcttcccctccctggtggagttgttcctagaatgctcattacgatccttggtactgtgaagccaaacgcgaatagaatcgctttggattttcagcgcggaaacgacgtcgcttttcatttcaatcctcgcttcaatgaaaataaccgccgagtgattgtctgcaatacgaaactcgataacaattggggacgggaggaaaggcagtcagttttcccatttgagagcggtaagccctttaagatccaggttttggtcgaacctgatcatttcaaggtcgctgtcaacgacgcccacctactgcaatacaatcaccgcgtaaaaaaactaaatgaaatctcaaaactcggcataagtggggatattgatcttacttctgcgagttataccatgata

SEQ ID NO: 331795 - DNA, 750 bp, Artificial Sequence
  derived and/or modified sequence
atggccgataacttttccctacacgatgctttatccggttccgggaaccccaacccccagggttggccgggggcctggggtaaccagcctgccggagcaggagggtaccctggagcctcctaccccggcgcttatcctggtcaggcaccaccgggagcctatcctgggcaagctcctccgggcgcatatccaggggccccaggggcatatcctggggcgcccgcacccggggtttaccctgggcctcccagtggcccaggtgcgtacccatccagcgggcaaccttcagccacaggtgcatatcccgccaccggcccttacggagcccctgctgggcccctgatcgttccttacaatcttcccctgcccggaggagttgttccccggatgctgattaccatcctgggcacagtcaaaccaaatgcaaacaggatcgcgctggatttccagcgaggaaatgatgtagccttccactttaaccccaggttcaatgaaaacaataggcgcgtcatagtttgcaatacaaagctagataataactggggtagagaagaacggcagagtgtattccctttcgagagcgggaagccctttaagatccaggtgctagttgaaccggaccacttcaaggtcgcagtgaacgatgctcatctcttgcagtacaaccatcgggtaaagaagctcaatgagatttccaaactcggtatctctggagacatcgatctcactagcgcctcatacactatgatt

SEQ ID NO: 331796 - DNA, 750 bp, Artificial Sequence
  derived and/or modified sequence
atggccgataacttctccctccacgacgcactgtctggaagtggcaatcccaaccctcaaggatggccaggagcctggggaaatcaacccgcaggcgccggaggctaccctggagcaagttatcctggggcgtacccaggtcaggctccccccggagcatacccagggcaggcaccccctggcgcctatcctggcgcccccggagcctatcccggagcccccgcgccaggagtataccccggcccaccatctgggccaggtgcatatccatcttcgggccaaccgtccgcgactggcgcttatcctgccacaggcccctacggcgctccagcaggacccctgatcgtgccgtataatctcccactgccgggcggggttgtgccgcgaatgcttataaccattctcggaaccgtgaaacctaatgcaaaccgcatcgcccttgactttcagagaggaaatgacgtggccttccacttcaatccccgttttaatgagaataatcgaagagtgatcgtgtgcaatacgaagctggataataactgggggcgtgaagaaagacagtcagtatttccgtttgaatccggaaaacctttcaaaatccaggtcctcgtagagccagatcatttcaaagtggcggtgaatgacgctcacctgctacagtacaaccacagggtgaaaaagttaaacgagatatccaagcttgggatatccggagacatcgaccttactagcgcctcatataccatgatt

SEQ ID NO: 331797 - DNA, 750 bp, Artificial Sequence
  derived and/or modified sequence
atggctgacaatttctcgctgcacgatgctctctcgggcagcggcaacccgaacccacagggctggccgggagcctggggaaaccaaccggcaggcgccggaggataccctggtgcgtcttacccgggcgcctacccaggacaggcgcctccgggtgcctatccgggtcaggccccaccaggagcgtatccgggcgccccgggtgcgtacccaggggcgccggccccaggcgtgtacccgggaccgccgtcaggacccggcgcttatccgtcgtcaggccagccatcagccaccggagcttacccggctactggaccatatggtgccccggcggggccccttattgtcccgtacaacctgcccctgccaggcggagtcgtcccaagaatgctgatcaccatcctcggaactgtgaagccaaatgcaaatcgcatcgctctcgatttccagcgcggtaacgacgtcgccttccatttcaacccgcggttcaatgagaacaaccggcgggtgatcgtgtgcaataccaagctcgataacaattggggacgcgaagaacggcaatccgtgtttccatttgagtccggtaaaccattcaagatccaagttctggtcgagcctgatcatttcaaagtggccgtcaacgacgcacacctcttgcaatacaatcaccgcgtaaagaagctgaatgaaatctcgaagttggggatttcgggagacatagacttgacctcagcctcctacactatgatt

SEQ ID NO: 331798 - DNA, 750 bp, Artificial Sequence
  derived and/or modified sequence
atggcagataacttttctctccacgacgcactcagcgggagcgggaatcccaacccccaaggctggcctggcgcctggggaaaccagccagcaggcgcagggggctatccaggcgccagctatccaggagcatatcctgggcaggcacctcctggggcctacccaggccaggcccctccgggcgcctatcctggggcccccggtgcttatcctggagctccggcgccaggcgtttatccaggaccgccaagtggaccaggagcctacccctcaagcggacaacccagcgcgacaggcgcttaccccgctacggggccctacggggcccccgcagggcccttgattgtgccttataaccttccattgcccggaggggtggtgccgcgtatgttgatcaccatattgggaacagtgaaaccaaacgccaacaggattgccctggatttccagcggggcaatgatgtggcttttcactttaacccaagatttaatgagaataatcgacgtgtaatcgtgtgcaatacaaaattagataacaattggggacgcgaggagagacaatccgtgtttccattcgagagtgggaagcccttcaaaatccaggttctagtggagcccgatcactttaaagtcgcagtcaatgatgcccacctactccaatataaccaccgggtgaagaaattgaatgagatatccaaactggggatcagtggggacatcgatctgacatcagcctcttataccatgatt

SEQ ID NO: 331799 - DNA, 750 bp, Artificial Sequence
  derived and/or modified sequence
atggcagataacttttcgcttcacgacgcgctgtcgggttcgggtaaccccaacccacagggatggcccggagcatggggcaaccagccagcaggagcaggaggctaccccggtgcctcatacccaggagcgtaccccggccaagcgcctccgggagcctatcccggccaagcccctcctggagcgtacccaggcgctccaggtgcataccctggagcaccggcgcccggagtgtaccctggtccaccttcaggccctggtgcttacccgtcatccggccagcctagcgcaaccggagcatacccagctaccgggccttacggtgcacctgccggtccacttattgtgccgtacaatctgccccttcccgggggtgtcgtgcctcgaatgctgattactattctggggacggtcaagcccaacgcgaatcgtatagccctggactttcaacgcgggaacgacgtggcatttcatttcaatcctaggtttaatgaaaacaacagaagagtcatcgtctgtaacactaaacttgacaataactggggacgtgaggaacgccagtcggtctttccttttgaatcgggtaaacctttcaaaatccaagtccttgtcgagcccgatcacttcaaagtcgccgtcaacgacgcccatcttcttcaatacaatcaccgagtgaagaagttgaatgaaatctcgaagctgggaatttcgggggatatagatctgacttccgcatcgtacactatgatc

SEQ ID NO: 331800 - DNA, 750 bp, Artificial Sequence
  derived and/or modified sequence
atggccgataacttctctcttcatgacgccctctcgggttccggcaaccctaaccctcagggctggcctggcgcatggggcaaccagccggccggtgccgggggttatcctggggcatcctacccaggtgcctaccctggccaggccccccctggagcataccccggccaggcgccccctggagcctatccaggtgcgcccggagcctaccccggcgcgcctgctcccggtgtctaccctggcccaccttctggcccaggagcctatccgtcttcgggtcagcccagtgctacgggcgcgtacccagccaccggtccgtacggcgcccccgccggtccccttattgttccatacaacctcccgcttcccggtggcgttgtcccgcgaatgctcatcaccatcttgggcactgtcaagcctaacgcaaaccgtatcgccctcgacttccagcgtggcaatgatgtggcattccatttcaatccccgcttcaatgagaacaatcgccgggttatcgtgtgcaacactaagttagacaataactggggacgcgaggaaaggcaaagcgtcttccccttcgagtctggtaagcccttcaaaattcaggtccttgttgagcccgatcacttcaaagtcgccgttaatgatgcccacctgctccaatataaccaccgcgtcaagaagctcaatgagatcagtaagcttggtatctcgggtgacattgacttgacatctgccagctataccatgatc

SEQ ID NO: 331801 - DNA, 750 bp, Artificial Sequence
  derived and/or modified sequence
atggccgacaacttcagcttgcacgatgcactcagcggctcagggaaccccaaccctcaaggctggcccggggcctgggggaaccagccagcaggcgccggcggatatcccggggcaagctatccgggagcctaccccggtcaggccccacctggcgcctaccccgggcaggctccgccgggggcatatcctggagcgccaggggcatatcctggagcccccgcccctggggtatatcctggaccaccttcaggcccgggagcttaccccagcagcggccaaccatccgcaaccggcgcatatcccgctaccgggccgtacggtgctcccgcaggacccctcattgtgccgtacaatctgccattacccggcggagtggttcccagaatgttaatcacaatcttggggacagttaagccaaacgccaaccggattgctcttgatttccagcgagggaacgatgtggcctttcattttaaccccaggttcaatgagaacaatcggagagtgattgtgtgtaatacaaaactggataataactggggaagagaagaaagacagtctgttttccctttcgagagcgggaagcccttcaaaatacaagtccttgtggaacctgatcacttcaaggttgctgttaatgacgcacacctgctgcagtacaaccaccgagttaagaagctgaacgagatctccaagctggggatttccggagatatcgatttgacttcggcatcctatacaatgatc

SEQ ID NO: 331802 - DNA, 750 bp, Artificial Sequence
  derived and/or modified sequence
atggcagacaacttctcgctccacgatgccttgagcggatcaggtaatccgaatccacaaggttggcccggagcttggggtaatcagccagccggggcgggcggatacccaggcgcatcttaccccggagcctatcccggccaagcgcccccaggtgcttatccgggtcaggctccaccgggcgcatacccgggggctccaggcgcatatcccggggcgccggccccgggagtgtacccaggccccccatccgggcctggggcatacccttcttccgggcaaccctcagccacgggcgcttacccggcgacaggcccgtatggggcccctgccggtccactcattgtcccctacaacctgccgctcccaggaggagtggtgccacgcatgctgattaccattctcgggaccgtcaaacctaacgctaacaggattgccctagacttccagagggggaacgatgtggcattccactttaatccccgcttcaatgaaaacaataggcgggttattgtgtgcaataccaaattggataataattggggaagggaagaacgccaaagtgtgttccctttcgagtccgggaaacctttcaagatccaggtgttggtggaacctgaccacttcaaagtagccgtgaatgatgcacacctgctgcagtacaaccatagggtaaagaagctcaacgagatctctaagctggggatctcaggcgatatcgatctaacatcagcatcctacacaatgatc

SEQ ID NO: 331803 - DNA, 750 bp, Artificial Sequence
  derived and/or modified sequence
atggcagataacttttctctccatgacgccctgtcaggcagcgggaaccccaacccacagggctggcccggtgcatgggggaaccaacctgccggtgccggaggataccccggcgctagctatccaggggcttatcctggccaagctcctcccggagcatatcccggccaggctccacccggcgcctatccaggagccccgggcgcttatcctggagctccagcccccggagtgtaccccgggccccccagtggacctggagcctacccatcttccggccaaccttctgctaccggtgcctatccagcaaccgggccatacggcgcccccgctggccctttaatcgtgccctacaacctaccactcccaggcggtgtggtgccccgcatgctgattacaattctgggaacagtcaaaccaaacgcaaatagaatagccctcgattttcaaaggggtaacgacgtggctttccacttcaatcctaggttcaatgagaataaccggcgcgttatcgtttgcaacacaaaactggataacaactgggggagagaggaacggcagtccgtcttcccattcgagtccggcaagccttttaaaattcaggtgttggtcgaaccagatcacttcaaagtagccgtgaatgacgctcatttgctgcagtacaaccacagggtaaagaagctgaacgagatttccaagctcgggatcagtggcgatatcgacctgaccagcgccagttatactatgatt

SEQ ID NO: 331804 - DNA, 750 bp, Artificial Sequence
  derived and/or modified sequence
atggcagataacttctcccttcatgatgcactgtccggatcaggaaacccaaacccacaagggtggcccggggcttgggggaaccagcctgccggagcgggtggctatcctggcgcaagctaccctggtgcataccctgggcaagcgcctccgggtgcctacccgggtcaggccccacccggagcgtacccgggcgcccccggagcatacccaggtgcccctgcaccaggagtctacccggggcctcccagcggtccaggagcgtacccctcatcaggacagccttcggcaacgggagcatatccagccaccggcccttacggagccccagcaggcccacttatagtgccgtacaacctgccactgcctggtggagtcgtccctcgaatgctgatcaccattctgggaaccgtcaagcctaatgcgaaccgcattgcactcgatttccaacgtgggaacgatgtcgcgtttcacttcaacccacggtttaatgagaataatcgacgggtgattgtgtgtaatacgaagctcgataacaattggggtcgcgaggaaagacaatccgtgtttcctttcgaaagcggtaaaccattcaagattcaagtgctcgtcgaacccgatcactttaaggtggccgtgaatgatgctcatttgcttcagtacaatcatcgggtgaaaaagctcaatgagatcagcaagttgggaatttcaggcgacatagaccttacctccgcttcctatactatgatc

SEQ ID NO: 331805 - DNA, 750 bp, Artificial Sequence
  derived and/or modified sequence
atggccgacaacttctctctgcacgacgcactgagcggttctggtaatcctaatccccaaggctggccgggggcgtgggggaatcagcctgcgggggcggggggttatccaggagccagctacccaggggcttacccaggtcaagccccacccggcgcctatcccggacaagcgccacccggggcctaccccggagcacccggagcatacccaggcgctcctgccccaggcgtctaccctggtccacccagcggcccaggagcttatcccagttcggggcagcctagtgccactggagcgtaccctgcgacagggccctacggcgcccccgctggaccactgattgtgccatataatttgcctttgcccggtggcgtggtgcccagaatgctgattaccatcctgggcacggttaagcctaatgccaaccgaattgcattagatttccagagaggcaacgacgtagcatttcacttcaatccaaggtttaacgagaataatcgccgcgtgattgtgtgcaacactaagttggataataattgggggcgagaggaaagacagagcgtcttcccctttgagtccggcaagccatttaagattcaggtactggttgaaccagatcattttaaagtggcagtgaacgatgcacatctgctgcagtacaatcatcgggttaagaagctgaacgagatttctaaactaggtatttctggcgatatcgacctcaccagcgcaagctataccatgatc

SEQ ID NO: 331806 - DNA, 750 bp, Artificial Sequence
  derived and/or modified sequence
atggccgacaacttcagcctacatgacgcgcttagtggcagcggaaacccgaacccccaaggttggcccggagcatggggtaaccaacccgctggggctggaggctaccccggagcaagctacccaggcgcctacccgggtcaggcgccacccggggcttaccccggacaggcccctccaggagcttatccaggcgctcctggcgcttatccaggcgctcccgcacccggagtatatcccgggcccccctcagggcctggggcgtatcctagtagcggacaacccagcgccaccggcgcataccctgctaccggcccgtatggagcaccagcgggccccctgatagttccgtacaatctgcccctgccggggggtgttgtaccgaggatgctgatcaccatcctcggaactgtgaaacccaacgccaataggatagcacttgatttccaaaggggcaacgatgtcgcctttcactttaacccaagatttaatgagaacaacaggagagtgatcgtctgtaatacaaaactggacaacaactggggcagagaagagcgccaatcagtctttcctttcgagagtggaaagcctttcaagatacaggtgttggttgaacctgatcatttcaaagtcgcagtgaatgatgcccacctgctgcagtataatcatagggttaaaaaactgaacgagatctccaagctgggcatctccggcgatatcgatctgacctccgcaagctataccatgatc

SEQ ID NO: 331807 - DNA, 750 bp, Artificial Sequence
  derived and/or modified sequence
atggcggataactttagccttcatgacgccctttcgggttccggtaaccctaaccctcaagggtggccaggcgcatggggtaaccaaccggccggagcaggtggatacccaggtgcttcgtacccgggggcgtacccgggccaggcaccccccggcgcataccctgggcaagctcctcctggcgcttacccaggcgcccctggtgcttaccctggggcacctgcacccggggtgtatccaggacctcccagcgggcccggagcctacccatctagcggacagcctagcgcaactggagcatacccggccaccggtccatacggggcaccagcaggaccactgatcgtgccctacaaccttccattgccgggtggtgtggtcccgcggatgctcataactattctgggcacggtgaagcctaacgcaaatcgaattgcgcttgattttcaacggggaaacgatgtggcattccatttcaaccctaggttcaatgagaataaccgcagagtgattgtctgtaataccaaactcgataacaattggggaagggaagagaggcagtcagtgtttccatttgagtcgggcaagccattcaagattcaggtgctggtcgaaccggatcactttaaggtcgcagtgaacgacgcacatctgctgcagtacaaccaccgggtcaagaagttgaatgagatatccaagctgggtatttcaggggacattgatcttacctcggcatcctatactatgatt

SEQ ID NO: 331808 - DNA, 750 bp, Artificial Sequence
  derived and/or modified sequence
atggccgataacttcagtttgcacgatgctttaagtggaagtggaaatcctaatccccaagggtggcccggggcgtggggaaaccagcccgcaggcgctggaggatacccaggggcttcctacccgggtgcctacccaggccaggccccccccggagcatatcccgggcaggctccgcccggggcctatccaggtgcccccggggcctaccccggcgcccctgctcctggggtctatcctgggcccccatctgggcccggcgcttatccctcttcaggccaacccagtgctactggtgcctaccccgcaacaggcccctacggcgcccccgccggccccctgatagtgccatataacctcccactgcctggcggggtggtccccaggatgctcatcaccattcttggcactgtgaagcccaacgcgaacaggatagccctggatttccagcgaggaaatgatgtcgcgtttcacttcaacccccggtttaatgaaaataacagacgagtcatagtctgcaacaccaaacttgacaacaattgggggcgcgaagagcgtcaatccgttttcccctttgagtctggcaaaccatttaagatccaggtattggtggagccagatcatttcaaagtagcagtgaacgacgcccacttgttgcaatacaaccatcgcgtgaaaaaactcaacgagataagcaaactggggatttctggcgatatcgatctgactagcgcatcctacaccatgatt

SEQ ID NO: 331809 - DNA, 750 bp, Artificial Sequence
  derived and/or modified sequence
atggccgacaacttcagtcttcatgatgcacttagtggatcaggaaacccaaatccacagggatggcccggcgcttggggaaaccaaccggctggagcaggagggtatccaggagcctcatatccgggagcttaccctggacaggccccccctggcgcctatccaggccaagctccacccggcgcctatcccggcgcgccaggagcgtatccaggtgcaccagctccaggtgtttaccctggtccaccatcgggcccgggtgcttacccaagctcgggacaaccaagcgcaactggagcatacccagcaacaggaccctatggtgcaccagccggaccacttatagttccatacaatcttcctttgccaggaggtgttgtgccgcgaatgcttatcacgattctgggaacagttaagcctaatgccaatcgtattgctctcgacttccagagaggcaatgacgtagcttttcattttaacccgcggttcaacgagaataataggagggtgatcgtctgtaatactaaactggacaacaattggggcagggaagaacgtcaatctgtgttcccattcgaatctggaaaaccgttcaaaatacaggttctcgttgaaccggaccattttaaagtcgccgtcaatgatgctcacttgttgcaatataatcatcgagtaaaaaaattgaatgagatctcgaagctaggaataagcggagatattgatctaacctcagctagctatacaatgatt

SEQ ID NO: 331810 - DNA, 750 bp, Artificial Sequence
  derived and/or modified sequence
atggcggacaacttcagcctccacgacgcactgtcgggcagcggaaaccccaaccctcagggatggccaggcgcttggggcaaccagcctgctggcgccggaggatacccaggagcgtcatacccgggagcctaccctggccaggcccctccgggcgcctatcccggacaggcgccgcctggtgcatacccaggtgcaccaggggcctaccccggcgctccagcaccgggagtgtaccccgggccaccgtcgggaccaggagcctatccctcctcagggcaaccgtcggcgacgggtgcctacccggcgaccggaccgtacggagcccccgctggtccgctcatcgtgccgtacaacctgccgctccctggaggagtcgtgccgcgcatgctgatcactatcctgggcaccgtgaagccgaatgctaatagaatcgcccttgatttccaacgggggaacgacgtcgccttccacttcaacccgagattcaatgagaataatcggcgcgtgattgtgtgcaacaccaagctggacaataactggggaagagaagagcgccagtcggtgtttccatttgagtccggaaaaccattcaaaatccaagtgctggtagaaccagaccactttaaggtagctgtcaacgatgcgcatctccttcagtacaatcatcgggttaagaagctgaacgaaatttcaaaattggggataagcggtgatatcgatctcacttcggcgagttacaccatgatc

SEQ ID NO: 331811 - DNA, 750 bp, Artificial Sequence
  derived and/or modified sequence
atggctgacaacttctccctgcatgatgcactaagcggctcaggaaacccgaacccccaaggctggccaggcgcgtggggcaaccaaccagctggtgccggcggatatccaggtgcctcgtacccaggggcctacccaggacaggcacctccgggtgcgtaccccggtcaggcgccgccaggagcttaccccggagctccaggcgcctaccctggtgcgccagctcccggggtttacccaggccccccaagcggaccaggcgcgtatccgtcgagtggtcaacccagcgcaactggagcctatccggccacgggcccgtatggcgcaccagcgggacccttgatcgtcccatataatctcccgctgccaggcggcgttgtaccacggatgctgatcacgatactgggcaccgtcaagcccaatgcaaatcggattgcccttgactttcagcgcgggaacgacgtggcattccacttcaaccccagattcaacgagaacaaccggagagttattgtttgcaatacaaagcttgataataattggggccgagaggagcgccaaagcgtgttcccattcgaatcaggcaagccattcaaaatccaagtactagtggaacctgatcactttaaggtagctgtcaacgatgcacacctactgcagtacaaccatcgcgtcaaaaaactgaacgagatcagcaagctagggatatccggagacattgatttgacctcggcaagttacacgatgatc

SEQ ID NO: 331812 - DNA, 750 bp, Artificial Sequence
  derived and/or modified sequence
atggccgataacttctccctgcacgacgccctgtccgggtctggcaatccgaacccccaagggtggcctggtgcttgggggaatcagccggcaggtgccggaggatacccgggagcatcttacccgggcgcttacccaggtcaggcacctcctggcgcgtaccctggacaggccccgcccggagcctatccgggtgccccaggagcatacccgggtgcaccggcacctggagtgtacccgggaccgccgtcgggccctggagcttacccgtcgagcgggcagccgtcggcaaccggagcatatcccgctactgggccgtacggcgccccggcgggacctctgattgtcccgtacaacttgcccctgcccggaggtgtggttccgcgaatgttgatcaccatactggggaccgtcaagcccaacgccaaccggatcgcgcttgatttccagaggggaaatgatgtggcgtttcactttaacccacggtttaacgagaacaatagacgcgtgatcgtgtgcaacaccaaactggacaataactggggaagagaggagcgccaaagcgtgttcccattcgaatcgggaaagccgttcaagatccaagtcctcgttgagcctgaccatttcaaggtggcggtcaacgatgctcacctgctccaatacaaccaccgcgtgaagaagctgaatgagatctcaaaacttgggatttccggcgatatcgatctgacctcggctagctacaccatgatc

SEQ ID NO: 331813 - DNA, 750 bp, Artificial Sequence
  derived and/or modified sequence
atggcagacaatttcagcctccacgacgccctttccgggtccggaaatccaaatcctcaagggtggccgggtgcgtggggaaatcagccggctggagccggtggctaccctggtgctagctatcctggcgcctaccctggacaagcgccgccaggggcttacccggggcaggcacctccaggagcctatcccggcgccccgggggcctaccctggcgccccggctccgggagtctacccaggaccaccatcgggtcctggagcatacccgtccagcggacaaccatccgcgaccggagcgtatccggccactggtccttacggcgctcccgcgggaccactcatcgtcccgtacaacctgccgctccctggaggagtcgtgccgcggatgttgattactatcctcggaaccgtgaagccaaacgccaacagaattgctctcgattttcagagaggcaacgacgtggcgttccatttcaacccgagattcaacgagaataacaggcgcgtcatcgtctgcaataccaagctggacaacaactggggacgcgaggagcggcagtccgtttttccgttcgaaagcggaaagccgttcaagattcaggtgctggtggagcctgaccacttcaaagtcgcagtgaatgatgcacatctcctgcagtacaaccaccgcgtcaagaagctgaatgaaatcagtaaactggggatttccggagacatcgatctcacttccgccagctacaccatgatc

SEQ ID NO: 331814 - DNA, 753 bp, Artificial Sequence
  derived and/or modified sequence
atggccgacaacttcagcctgcacgacgccctgagcggcagcggcaaccccaacccccagggctggcccggcgcctggggcaaccagcccgccggcgccggcggctaccccggcgccagctaccccggcgcctaccccggccaggccccccccggcgcctaccccggccaggccccccccggcgcctaccccggcgcccccggcgcctaccccggcgcccccgcccccggcgtgtaccccggcccccccagcggccccggcgcctaccccagcagcggccagcccagcgccaccggcgcctaccccgccaccggcccctacggcgcccccgccggccccctgatcgtgccctacaacctgcccctgcccggcggcgtggtgcccagaatgctgatcaccatcctgggcaccgtgaagcccaacgccaacagaatcgccctggacttccagagaggcaacgacgtggccttccacttcaaccccagattcaacgagaacaacagaagagtgatcgtgtgcaacaccaagctggacaacaactggggcagagaggagagacagagcgtgttccccttcgagagcggcaagcccttcaagatccaggtgctggtggagcccgaccacttcaaggtggccgtgaacgacgcccacctgctgcagtacaaccacagagtgaagaagctgaacgagatcagcaagctgggcatcagcggcgacatcgacctgaccagcgccagctacaccatgatctag

SEQ ID NO: 331815 - DNA, 896 bp, Artificial Sequence
  derived and/or modified sequence
gggaaataagagagaaaagaagagtaagaagaaatataagagccaccatggcggacaatttctccctccacgacgcactgtcgggctcgggaaatccgaatccgcaagggtggcctggagcgtggggaaaccagccggcaggggctggagggtatcccggagcgtcgtacccaggcgcctacccaggccaggcccctcccggtgcgtacccgggtcaggctcctcccggagcttatccgggagcacccggagcctaccccggtgctcctgcccctggtgtgtatcctggtcccccgagcgggcctggtgcgtatccctcaagcggacagccctccgcgaccggtgcataccccgcgactggaccctacggtgcgccagccggaccgctgatcgtaccctataacctgccattgccagggggtgtggtcccgcgaatgcttattacgatcctcggcacagtcaagccaaatgccaaccggatcgcgcttgattttcagcgggggaacgatgtcgcgttccactttaatccgaggttcaacgaaaacaataggcgcgtaatcgtgtgcaacacgaaattggacaataactggggaagagaggaacgccaatcagtctttccgttcgaatcggggaagccttttaagatccaagtgctggtagagccggatcatttcaaagtcgccgtcaatgacgcgcaccttctccagtacaaccatagagtgaaaaagttgaacgagatttcaaaattggggatctcgggtgacattgatcttacatccgcgtcatacacgatgatttgaagcgctgccttctgcggggcttgccttctggccatgcccttcttctctcccttgcacctgtacctcttggtctttgaataaagcctgagtaggaag

SEQ ID NO: 331816 - DNA, 753 bp, Artificial Sequence
  derived and/or modified sequence
atggccgacaacttttcacttcacgatgctcttagcggtagtggcaatccaaatcctcaaggttggccaggagcttgggggaaccagccagctggcgctggtggttatccaggagcttcttatcccggcgcttacccaggacaagctccacctggggcctatcctggccaagccccacctggcgcttaccctggtgcacctggagcctaccctggggctcctgctccaggcgtatatcctggccccccttcaggacccggtgcctacccatcttctgggcagccctcggcgaccggagcctaccccgcaacggggccatatggggcacctgcaggccccctgatcgtgccctataatctcccactgccaggaggtgtggtgcccagaatgctgatcacgattcttggcaccgttaaaccaaatgcaaacagaatcgcgttagacttccagaggggcaacgacgtcgcgtttcattttaaccctcggtttaacgagaacaacagaagggtgattgtttgcaacactaagctggataacaactggggacgcgaagagagacaatccgtctttccattcgagtcgggaaagcccttcaagatacaggtactcgtggagccagaccatttcaaagtggccgtcaacgatgcacaccttttgcaatacaaccacagagtgaagaagctgaacgaaatctccaagctggggatcagcggggatatagacctgactagcgcctcctatacaatgatatag

SEQ ID NO: 331817 - DNA, 753 bp, Artificial Sequence
  derived and/or modified sequence
atggctgacaacttcagcctgcatgatgccctgagcggcagcggcaaccccaacccccagggctggccaggggcctggggcaaccagcctgctggagctgggggctacccaggggccagctacccaggggcctacccaggccaggcccctcctggggcctacccaggccaggcccctcctggggcctacccaggggcccctggggcctacccaggggccccagcccctggggtgtacccaggcccccccagcggccctggggcctaccccagcagcggccagcccagcgccaccggggcctacccagccaccggcccctatggagccccagctggccccctgattgtgccctacaacctgcccctgcctggaggagtggtgcccaggatgctgatcaccatcctgggcaccgtgaagcccaatgccaacagaattgccctggacttccagagaggaaatgatgtggccttccacttcaacccccgcttcaatgaaaacaacagaagagtgattgtgtgcaacaccaagctggacaacaactggggccgggaggagcggcagagcgtcttcccctttgagagcggcaagcccttcaagatccaggtgctggtggagccagaccacttcaaggtggccgtgaatgatgcccacctgctgcagtacaaccaccgggtgaagaagctgaatgagatcagcaagctgggcatcagcggggacatcgacctgaccagcgccagctacaccatgatctag

SEQ ID NO: 331818 - DNA, 753 bp, Artificial Sequence
  derived and/or modified sequence
atggccgacaacttcagcctgcacgacgccctgagcggcagcggcaatcctaacccacaagggtggcccggcgcatgggggaatcagccagcaggcgccggtggctatcctggagcatcatacccgggagcctatccgggccaagctccacctggcgcctaccctggccaggctcctccaggggcatatcctggggctccaggcgcctaccccggagcacccgccccaggcgtatatcctgggccaccatctggacccggtgcatatccaagcagcggtcaaccttccgccacaggggcttatccggccacaggaccatacggcgctcccgctggaccactcatcgttccatataacctccccctgcccggaggggtagtgccacgaatgctcatcacgattctgggcacagtgaaaccaaacgcaaacagaattgcactggacttccagcgggggaatgatgtggcatttcatttcaaccccaggtttaacgagaataataggcgggttatcgtttgtaatactaaacttgataacaactggggtcgtgaagaacgccagtctgttttcccattcgagtctggcaagccatttaagattcaggtgctcgttgagcccgaccatttcaaggtggccgtaaatgacgcccacctgttgcagtacaaccatcgtgtgaaaaagctcaacgaaatatccaaactcggcatctctggcgacattgatttgacgagcgcctcttacactatgatttag

SEQ ID NO: 331819 - DNA, 753 bp, Artificial Sequence
  derived and/or modified sequence
atggctgataacttttccttgcatgatgctctcagcgggtccgggaatccgaatcctcagggctggccaggcgcatgggggaaccagcccgctggggctggcggatatcccggagcttcctaccctggggcataccccggacaggctccgcctggcgcttacccaggccaggcccctcctggcgcataccctggggctcccggagcctacccaggagcacccgcacctggggtgtaccctggaccaccttcagggcctggagcatacccttccagcggtcaaccttccgcaaccggagcgtatcccgcaactggaccttacggagccccagcaggcccattgattgttccttataatctgccattaccagggggagtggtacctagaatgctgatcactatacttggaacagtaaagcctaacgctaatagaattgctctggatttccaacggggaaacgacgtggctttccactttaatcctcgctttaatgagaacaatcgacgggtgattgtgtgtaacaccaaactcgacaacaactggggcagagaggaaaggcaatccgtgtttccttttgagtcaggcaagccattcaaaatccaggtgctggttgaacctgatcactttaaagtggctgtaaacgatgcccaccttctccagtataatcacagggttaagaagcttaatgagatatctaagctgggcatttccggggacatcgaccttacgtctgccagttacaccatgatttag

SEQ ID NO: 331820 - DNA, 1146 bp, Artificial Sequence
  derived and/or modified sequence
aggtcgcgcccctcagtgcccgcgctctccccgtcgggagcttcctggtcgcccctgcggcggcggctcggggtgtctggccggcgcggggctcgcccagcctggtccggggagaggactggctgggcaggggcgccgccccgcctcgggagaggcgggccgggcggggctgggagtatttgaggctcggagccaccgccccgccggcgcccgcagcacctcctcgccagcagccgtccggagccagccaacgagcggaaaatggcagacaatttttcgctccatgatgcgttatctgggtctggaaacccaaaccctcaaggatggcctggcgcatgggggaaccagcctgctggggcagggggctacccaggggcttcctatcctggggcctaccccgggcaggcacccccaggggcttatcctggacaggcacctccaggcgcctaccctggagcacctggagcttatcccggagcacctgcacctggagtctacccagggccacccagcggccctggggcctacccatcttctggacagccaagtgccaccggagcctaccctgccactggcccctatggcgcccctgctgggccactgattgtgccttataacctgcctttgcctgggggagtggtgcctcgcatgctgataacaattctgggcacggtgaagcccaatgcaaacagaattgctttagatttccaaagagggaatgatgttgccttccactttaacccacgcttcaatgagaacaacaggagagtcattgtttgcaatacaaagctggataataactggggaagggaagaaagacagtcggttttcccatttgaaagtgggaaaccattcaaaatacaagtactggttgaacctgaccacttcaaggttgcagtgaatgatgctcacttgttgcagtacaatcatcgggttaaaaaactcaatgaaatcagcaaactgggaatttctggtgacatagacctcaccagtgcttcatataccatgatataatctgaaaggggcagattaaaaaaaaaaaaagaatctaaaccttacatgtgtaaaggtttcatgttcactgtgagtgaaaatttttacattcatcaatatccctcttgtaagtcatctacttaataaatatta

SEQ ID NO: 331821 - RNA, 896 nt, Artificial Sequence
  derived and/or modified sequence
gggaaauaagagagaaaagaagaguaagaagaaauauaagagccaccauggcggacaauuucucccuccacgacgcacugucgggcucgggaaauccgaauccgcaaggguggccuggagcguggggaaaccagccggcaggggcuggaggguaucccggagcgucguacccaggcgccuacccaggccaggccccucccggugcguacccgggucaggcuccucccggagcuuauccgggagcacccggagccuaccccggugcuccugccccugguguguauccuggucccccgagcgggccuggugcguaucccucaagcggacagcccuccgcgaccggugcauaccccgcgacuggacccuacggugcgccagccggaccgcugaucguacccuauaaccugccauugccaggggguguggucccgcgaaugcuuauuacgauccucggcacagucaagccaaaugccaaccggaucgcgcuugauuuucagcgggggaacgaugucgcguuccacuuuaauccgagguucaacgaaaacaauaggcgcguaaucgugugcaacacgaaauuggacaauaacuggggaagagaggaacgccaaucagucuuuccguucgaaucggggaagccuuuuaagauccaagugcugguagagccggaucauuucaaagucgccgucaaugacgcgcaccuucuccaguacaaccauagagugaaaaaguugaacgagauuucaaaauuggggaucucgggugacauugaucuuacauccgcgucauacacgaugauuugaagcgcugccuucugcggggcuugccuucuggccaugcccuucuucucucccuugcaccuguaccucuuggucuuugaauaaagccugaguaggaag

SEQ ID NO: 331822 - protein, 820 aa, Artificial Sequence
  derived and/or modified sequence
LVLILQKVENGDLSNKILKITDFGLAREWHRTTKMSAAGTYAWMAPEVIRASMFSKGSDVWSYGVLLWELLTGEVPFRGIDGLAVAYGVAMNKLALPIPSTCPEPFAKLMEDCWNPDPHSRPSFTNILDQLTTIEESGFFEMPKDSFHCLQDNWKHEIQEMFDQLRAKEKELRTWEEELTRAALQQKNQEELLRRREQELAEREIDILERELNIIIHQLCQEKPRVKKRKGKFRKSRLKLKDGNRISLPSDFQHKFTVQASPTMDKRKSLINSRSSPPASPTIIPRLRAIQLTPGESSKTWGRSSVVPKEEGEEEEKRAPKKKGRTWGPGTLGQKELASGDEGLKSLVDGYKQWSSSAPNLVKGPRSSPALPGFTSLMEMACFSSTLVIFTEDEDSEGPGSGESRLQHSPSQSYLCIPFPRGEDGDGPSSDGIHEEPTPVNSATSTPQLTPTNSLKRGGAHHRRCEVALLGCGAVLAATGLGFDLLEAGKCQLLPLEEPEPPAREEKKRREGLFQRSSRPRRSTSPPSRKLFKKEEPMLLLGDPSASLTLLSLSSISECNSTRSLLRSDSDEIVVYEMPVSPVEAPPLSPCTHNPLVNVRVERFKRDPNQSLTPTHVTLTTPSQPSSHRRTPSDGALKPETLLASRSPSSNGLSPSPGAGMLKTPSPSRDPGEFPRLPDPNVVFPPTPRRWNTQQDSTLERPKTLEFLPRPRPSANRQRLDPWWFVSPSHARSTSPANSSSTETPSNLDSCFASSSSTVEERPGLPALLPFQAGPLPPTERTLLDLDAEGQSQDSTVPLCRAELNTHRPAPYEIQQEFWS

SEQ ID NO: 331823 - DNA, 2463 bp, Artificial Sequence
  derived and/or modified sequence
cttgtgcttatactgcagaaggtggaaaatggggatctgagcaacaagatcctcaagattaccgattttggccttgcacgagagtggcaccggaccactaaaatgtcagcagctggcacttacgcttggatggccccagaggttatcagagcttccatgttcagcaaaggtagtgacgtatggtcctacggggtgctactatgggagcttctgacgggggaggttccgttccgtgggattgatggcctggctgtcgcctacggagtggccatgaataaattagcactgcccatcccttccacatgtccagaaccgttcgccaagctgatggaggactgttggaaccctgatcctcacagcaggcccagctttactaatatcttggatcaactgaccacaattgaagagtccggctttttcgaaatgccaaaggacagttttcattgtctccaagacaactggaagcacgaaatccaggaaatgttcgaccagctgagagccaaggaaaaagagctgcgtacttgggaagaagagctgaccagggccgctctccagcagaaaaatcaggaagaactcctgaggcggcgtgagcaggagttagccgaaagggaaatcgacattcttgaaagagaactgaacatcatcatacaccagctgtgtcaggagaagccaagggtaaagaagcgaaagggcaaattccgtaagagcaggcttaagttgaaggacggcaatcgcatcagtttgcccagtgactttcaacacaagttcactgtacaggcctctcctacaatggacaaaaggaaaagtctgatcaatagccgctcctctccacctgcgtcaccaactataatacctcggttgcgtgctatacagctcactcccggcgagtctagtaagacatggggtagaagcagcgtcgttcctaaggaggagggcgaagaagaggagaagagggcccccaagaaaaaaggaagaacttgggggccaggcaccttagggcagaaggagctggcgagtggggatgaagggctcaaatccctcgttgatggatataagcagtggagttcaagcgcgcctaatctggtcaaaggaccacgttcatcaccggctctgcccggtttcacaagtcttatggaaatggcctgcttttcctccaccctggttatctttactgaagatgaagattcagaaggccctggttctggagagagtagattacagcactcccccagccagtcttatctgtgcattccttttccccggggtgaagatggcgatggccccagttccgatgggatacatgaggaacctacacccgtcaattcagcgacatccacgcctcagctcaccccaactaattccctgaaacgcggaggcgctcatcatcggagatgcgaggtggcactacttggttgcggcgcagtgctggcggctaccggactgggatttgatctgctggaagccgggaaatgccagctcctgcctctcgaggagcccgaaccccctgctagagaagagaaaaagaggcgcgagggcctgtttcagagatccagccgccccaggaggtccacaagtcctccttcaaggaaactctttaagaaggaagagccaatgctactcttaggggacccgtctgcaagcctgacactgctgagcctgtcctccatttctgagtgtaatagcaccagatccctgcttcggtcagattcagacgagattgtagtctatgagatgccagtgagtcctgtcgaagccccccctctgtcaccttgtacacataaccccctggtcaacgtgcgtgtagagcgcttcaaaagggatcccaaccagagcctgacccccacacacgtgacactgacaacaccatctcagccctcttctcatcgaagaactccaagtgacggcgcactcaagcctgaaactcttttagcatcccgatccccctccagtaatggtctgtcaccatcgcccggggctggcatgctcaaaacaccatcaccttcccgtgaccccggagagttcccccgcctgcccgatcccaatgtcgtgttccccccaactcctaggcgttggaacacgcaacaagattcgacgctggaacggcccaagacactggagtttcttcctcgtccacgtcccagcgcaaaccgacagcggttggacccttggtggttcgtgagcccctcgcacgctagaagcacaagcccagcaaatagctccagcactgaaacccccagtaatttagactcatgcttcgcaagttctagcagcaccgtcgaggaacggccaggacttccagcattgctgccgtttcaggccggcccactgccacccacggaacgaacgctgcttgatctggacgctgagggccagagtcaggacagcactgtccctctatgtcgagctgagctcaacacacatcggcctgccccatatgagatacagcaggaattttggagctag

SEQ ID NO: 331824 - DNA, 2463 bp, Artificial Sequence
  derived and/or modified sequence
ctggtgctgatcctgcagaaggtggagaatggagacctgagcaacaagatcctgaagatcacagactttggcctggcccgggagtggcacaggaccaccaagatgtctgctgctggcacctacgcctggatggcccctgaggtgatccgggcctccatgttcagcaagggcagtgatgtgtggagctatggagtgctgctgtgggagctgctgaccggggaggtgcccttccggggcattgatggcctggccgtggcctatggagtggccatgaacaagctggccctgcccatccccagcacctgcccagagccctttgccaagctgatggaggactgctggaacccagacccccacagccggcccagcttcaccaacatcctggaccagctgaccaccatcgaggagagcggcttctttgagatgcccaaggacagcttccactgcctgcaggacaactggaagcatgagatccaggagatgtttgaccagctgcgggccaaggagaaggagctgcggacctgggaggaggagctgacccgggccgccctgcagcagaagaaccaggaggagctgctgcggcggcgggagcaggagctggccgagcgggagattgacatcctggagcgggagctgaacatcatcatccaccagctgtgccaggagaagccccgggtgaagaagaggaagggcaagttcaggaagagccggctgaagctgaaggatggcaaccgcatcagcctgcccagcgacttccagcacaagttcaccgtgcaggccagccccaccatggacaagaggaagagcctcatcaacagccgcagcagccccccagccagccccaccatcatcccccggctgcgggccatccagctgaccccaggagagagcagcaagacctggggccgcagctctgtggtgcccaaggaggagggggaggaggaggagaagagggcccccaagaagaagggccgcacctggggccctggcaccctgggccagaaggagctggccagcggagatgagggcctgaagagcctggtggatggctacaagcagtggagcagcagcgcccccaacctggtgaagggccccaggagcagccctgccctgcccggcttcaccagcctgatggagatggcctgcttcagcagcaccctggtgatcttcacagaagatgaggacagcgagggccctggcagcggggagagccggctgcagcacagccccagccagagctacctgtgcatccccttccccagaggagaagatggagatggccccagcagtgatggcatccacgaggagcccacccctgtgaacagcgccaccagcaccccccagctgacccccaccaacagcctgaagaggggcggggcccaccacagaagatgtgaggtggccctgctgggctgtggggctgtgctggccgccaccggcctgggctttgacctgctggaggccggcaagtgccagctgctgcccctggaggagcctgagcccccagcccgggaggagaagaagagaagagagggcctcttccagaggagcagccggcccaggaggagcaccagcccccccagcaggaagctgttcaagaaggaggagcccatgctgctgctgggggaccccagcgccagcctgaccctgctgagcctgagcagcatcagcgagtgcaacagcaccaggagcctgctgcggagtgacagtgatgaaattgtggtgtatgagatgcctgtgtcccctgtggaggccccacccctgagcccctgcacccacaaccccctggtgaatgtgcgggtggagcgcttcaagagggaccccaaccagagcctgacccccacccacgtgaccctgaccacccccagccagcccagcagccacaggaggacccccagtgatggagccctgaagccagagaccctgctggccagccgcagccccagcagcaatggcctgagccccagccctggagctggcatgctgaagacccccagccccagccgggaccctggagagttcccccggctgcctgaccccaacgtggtgtttcctcccaccccccggcgctggaacacccagcaggacagcaccctggagcggcccaagaccctggagttcctgccccggccccggcccagcgccaaccggcagaggctggacccctggtggtttgtgagccccagccacgcccggagcaccagccctgccaacagcagcagcacagagacccccagcaacctggacagctgctttgccagcagcagcagcacagtggaggagaggcctggcctgcctgccctgctgcccttccaggccggccccctgcccccaacagagaggaccctgctggacctggatgctgagggccagagccaggacagcacagtgcccctgtgcagagctgagctgaacacccacaggcctgccccctatgagatccagcaggagttctggagctag

SEQ ID NO: 331825 - DNA, 2708 bp, Artificial Sequence
  derived and/or modified sequence
ctagtattgatcctccagaaggtggagaatggagacctgagcaacaagattctgaagatcactgattttggcctggctcgggaatggcaccgaaccaccaagatgagtgcggcagggacgtatgcttggatggcacccgaagtcatccgggcctccatgttttccaaaggcagtgatgtgtggagctatggggtgctactttgggagttgctgactggtgaggtgccctttcgaggcattgatggcttagcagtcgcttatggagtggccatgaacaaactcgcccttcctattccttctacgtgcccagaaccttttgccaaactcatggaagactgctggaatcctgatccccactcacgaccatctttcacgaatatcctggaccagctaaccaccatagaggagtctggtttctttgaaatgcccaaggactccttccactgcctgcaggacaactggaaacacgagattcaggagatgtttgaccaactcagggccaaagaaaaggaacttcgcacctgggaggaggagctgacgcgggctgcactgcagcagaagaaccaggaggaactgctgcggcgtcgggagcaggagctggccgagcgggagattgacatcctggaacgggagctcaacatcatcatccaccagctgtgccaggagaagccccgggtgaagaaacgcaagggcaagttcaggaagagccggctgaagctcaaggatggcaaccgcatcagcctcccttctgatttccagcacaagttcacggtgcaggcctcccctaccatggataaaaggaagagtcttatcaacagccgctccagtcctcctgcaagccccaccatcattcctcgccttcgagccatccagttgacaccaggtgaaagcagcaaaacctggggcaggagctcagtcgtcccaaaggaggaaggggaggaggaggagaagagggccccaaagaagaagggacggacgtgggggccagggacgcttggtcagaaggagcttgcctcgggagatgaaggcctcaagtccctggtagatggatataagcagtggtcgtccagtgcccccaacctggtgaagggcccaaggagtagcccggccctgccagggttcaccagccttatggagatggcctgtttctcttccactcttgtcatcttcacagaggatgaggacagtgaaggcccagggagtggagagagtcgcctacagcattcacccagccagtcctacctctgtatcccattccctcgtggagaggatggcgatggcccctccagtgatggaatccatgaggagcccaccccagtcaactcggccacgagtacccctcagctgacgccaaccaacagcctcaagcggggcggtgcccaccaccgccgctgcgaggtggctctgctcggctgtggggctgttctggcagccacaggcctagggtttgacttgctggaagctggcaagtgccagctgcttcccctggaggagcctgagccaccagcccgggaggagaagaaaagacgggagggtctttttcagaggtccagccgtcctcgtcggagcaccagccccccatcccgaaagcttttcaagaaggaggagcccatgctgttgctaggagacccctctgcctccctgacgctgctctccctctcctccatctccgagtgcaactccacacgctccctgctgcgctccgacagcgatgaaattgtcgtgtatgagatgccagtcagcccagtcgaggcccctcccctgagtccatgtacccacaaccccctggtcaatgtccgagtagagcgcttcaaacgagatcctaaccaatctctgactcccacccatgtcaccctcaccaccccctcgcagcccagcagtcaccggcggactccttctgatggggcccttaagccagagactctcctagccagcaggagcccctccagcaatgggttgagccccagtcctggagcaggaatgttgaaaacccccagtcccagccgagacccaggtgaattcccccgtctccctgaccccaatgtggtcttccccccaaccccaaggcgctggaacactcagcaggactctaccttggagagacccaagactctggagtttctgcctcggccgcgtccttctgccaaccggcaacggctggacccttggtggtttgtgtcccccagccatgcccgcagcacctccccagccaacagctccagcacagagacgcccagcaacctggactcctgctttgctagcagtagcagcactgtagaggagcggcctggacttccagccctgctcccgttccaggcagggccgctgcccccgactgagcggacgctcctggacctggatgcagaggggcagagtcaggacagcaccgtgccgctgtgcagagcggaactgaacacacacaggcctgccccttatgagatccagcaggagttctggtcttagcacgaaaaggattggggcgggcaagggggacagccagcggagatgaggggagctggcgggcacagccctttctcagggttggaccccctgagatccagccctacttcttgcactgataatgcactttgaagatggaagggatggaaacagggccacttcagagggtctcctgccctgcagggcctttctacccgtgtccactggaggggctgtggccatcagctctggctgtgtaggggaggaag

SEQ ID NO: 331826 - DNA, 2463 bp, Artificial Sequence
  derived and/or modified sequence
ctggtgctgatcctgcagaaggtggagaacggcgacctgagcaacaagatcctaaagatcacagacttcggcttagcacgtgaatggcatagaacgactaagatgtccgccgctggaacttacgcttggatggcacctgaggtgatcagagctagcatgttttcaaaaggttcagatgtttggagttacggcgtgttgttgtgggagttactcaccggagaagttccttttcgagggatagacggcctggccgtcgcatacggcgttgctatgaacaagctggccctgcccatcccttctacctgccccgagccttttgcaaaattaatggaggactgttggaatccagacccgcacagccgccctagcttcacaaacatactcgaccagctcactactatcgaggagtcagggttctttgaaatgccaaaagacagtttccactgtctccaagataattggaaacacgaaattcaggagatgttcgatcaattgcgagctaaggaaaaggagctgcggacatgggaggaggagctaactcgcgccgctctccaacaaaaaaaccaggaagaattactgagaaggcgtgagcaggaactggctgagcgcgagatcgatatattggagagagaactcaatattatcattcaccagctctgtcaggagaagcctcgggtgaagaagcgtaaagggaagtttcgtaagagtagacttaagctgaaggatgggaatcgtatctccctgcctagtgattttcagcataagtttactgtgcaagcatcccctaccatggacaagcggaaatctttgataaacagtcggtcttctccacctgcaagccctacaatcatacctaggttgcgagccatccagttaactcctggcgagtccagcaaaacctggggcagatcttccgtggtacctaaagaggaaggagaggaggaggagaagagggctccgaaaaaaaagggccgaacatggggcccggggactctgggtcagaaggagctagccagtggtgacgaaggacttaagagtctggtcgacggatataaacagtggagtagtagcgccccgaacctcgtgaaagggccaaggtccagtccagccctgccaggctttacatccttaatggaaatggcttgtttctcttctacacttgtcattttcactgaagatgaggactccgaaggcccaggtagcggtgaatctagactccagcacagcccaagtcaatcctatttgtgtatccctttccctcgaggcgaagatggtgatgggcccagttcagacgggatccacgaggaacctaccccagtgaatagcgcaacctccacccctcagctgactcccacaaattccctaaaacggggcggagcacaccaccgtagatgtgaggtcgccctgctgggctgtggggctgttctcgccgccacaggtctcggcttcgacctactggaagctggaaaatgtcagctgcttccactggaggaaccggagccccctgctcgtgaagagaaaaagcgccgggaggggttgtttcagcgctcctcaagaccccgtcgcagtacttcaccgcccagtagaaagctgttcaagaaagaggaacccatgctgctgcttggggacccatctgccagtttaactctgctcagcttatcatccatttctgagtgcaattcaacgcgatcattgcttcgttccgattctgacgaaatcgtggtttatgaaatgccagtgtcaccggttgaagcccccccactgtccccctgtacccataaccctctcgtcaatgtacgggttgagcgattcaaacgggatcccaaccagtcattaactccgacgcatgtgacacttactacaccttcccagccctcttctcatcggcggacaccctccgacggggccctgaagcctgaaacactgctagcttctaggagccccagcagcaacggcctgagtccttctcctggcgcagggatgttaaaaactcccagccccagtagggacccgggtgaatttcccagactacccgatcctaatgttgtgtttcccccaaccccccggcgatggaacacccagcaggattctacccttgagcgcccaaagaccctagaatttctgccaagacctcggccttcggccaataggcagcgccttgatccttggtggttcgtttcaccatcacacgcgcggtccacatctcctgccaacagctccagcacggaaacgccatcaaatcttgattcctgcttcgcttccagcagctccactgttgaagagaggccaggactccccgctctgctgcctttccaggcaggaccacttcccccaacagagcgcacattgttagacctggacgccgaggggcaatctcaggactcgaccgtacctctgtgccgggcagaattaaacactcacagacctgccccttacgaaattcaacaggagttctggtcctag

SEQ ID NO: 331827 - DNA, 2463 bp, Artificial Sequence
  derived and/or modified sequence
ctggtgctgatcctgcagaaggtggagaatggcgacttgtccaataaaattctcaaaatcaccgacttcggactggccagagaatggcacaggacaacaaaaatgtccgctgccggaacgtatgcctggatggcgcctgaggtgattcgcgcatccatgttctccaaaggcagcgatgtgtggagctatggggtgttgctctgggagctcctcacaggcgaagtgccatttcggggtatcgacggcctggccgtcgcctatggcgtggctatgaacaagctggcactgcccataccttctacatgccctgagcctttcgccaagctcatggaggattgttggaacccggatccgcactctcgacctagcttcacaaatatactggaccagctgaccacaatagaggaaagcggattctttgaaatgcctaaggacagttttcattgcctccaggacaattggaaacatgagattcaggaaatgttcgaccaattaagagcaaaagagaaagaactccgaacctgggaggaagagctcacgcgagcagctctgcaacagaaaaaccaggaggagttgctgagaaggcgcgaacaagaacttgctgagagggaaatcgatatactggaaagggagctgaacattattattcatcagttgtgccaggaaaaaccaagagtcaagaagaggaagggtaaatttcgcaaatctcgcctgaagctgaaagacggtaataggatctccctgccttccgacttccaacataaatttactgtccaggcgtcaccgacaatggacaaaaggaagtcccttattaacagtcgcagtagtccccctgcctccccaacaattattccccgacttagggctattcaactaacacctggcgaatccagcaaaacctggggccgaagttccgtagtaccaaaggaggagggggaggaggaggagaaacgagcccctaagaaaaagggcaggacctggggcccagggactctcgggcagaaagagttagcgagcggcgacgaaggcttgaaaagtctggtcgacggctacaaacagtggtcttccagcgcacccaatctcgtcaagggacccaggagttcccctgctcttccgggtttcacctccctgatggagatggcttgttttagctcgactttggtgatttttacggaagacgaggactccgagggcccaggctccggagagtctcgactgcagcactctccctcccagtcatacctctgcatcccctttccaaggggtgaggatggcgacggaccgtccagcgatggtatccacgaggagcccactcctgtgaacagtgccacctccacccctcaactgacccccaccaactccctgaagagagggggagctcatcacaggcgctgtgaggttgctctgctcggttgcggagcagtgttagcggcaaccggcttgggattcgatcttttagaggccggtaagtgtcaacttctaccccttgaggaacctgagcctcctgcccgagaagagaaaaagagaagagaggggctctttcagcgctcgtcacgaccacggcgatctacgagcccaccatcgcgcaagctcttcaagaaggaagaacctatgttgctgctgggtgacccgtccgcgagtctgaccctattgtcactctcgagcatatccgagtgcaacagcaccaggagccttctcaggtccgatagcgatgaaatagttgtgtacgagatgccagtgtcacccgtggaggcgcctcctttatccccctgcacacacaaccccctggtgaacgtgcgcgtggagcggttcaagcgtgaccccaaccaaagcctcacacctactcatgtcaccctgaccacacctagtcagccatcctctcaccgtagaactccaagcgacggcgcactaaaacctgaaacactgctggcgtcccggtcccctagctcgaacggactgagccctagcccgggagctggaatgctgaaaacaccgtctccttctagggacccaggggaattcccaaggctgccagacccgaacgtggtctttcctcccacacccagaaggtggaacacgcagcaggacagtacactggagcggccaaaaacactggagtttctgcccagacccagaccatctgccaaccgacagaggcttgatccttggtggtttgtgagtccttcgcatgcgagatccacctccccagcaaattcatccagtacagagacgccttctaatcttgacagttgcttcgcgtcatcaagctctacagtggaggagagaccaggattacctgcgctgctaccttttcaagctggccctctgccgccaactgagcgcaccctacttgatcttgacgccgagggccagtcccaggatagtaccgtgcccttatgccgagctgagctcaacacccacagaccagctccatatgagatccagcaggaattctggtcatag

SEQ ID NO: 331828 - DNA, 2463 bp, Artificial Sequence
  derived and/or modified sequence
ctggtgctgatcctgcagaaggtggagaacggcgacctgagcaacaagatcctgaagatcaccgacttcggcctggccagagagtggcacagaaccaccaagatgagcgccgccggcacctacgcctggatggcccccgaggtgatcagagccagcatgttcagcaagggcagcgacgtgtggagctacggcgtgctgctgtgggagctgctgaccggcgaggtgcccttcagaggcatcgacggcctggccgtggcctacggcgtggccatgaacaagctggccctgcccatccccagcacctgccccgagcccttcgccaagctgatggaggactgctggaaccccgacccccacagcagacccagcttcaccaacatcctggaccagctgaccaccatcgaggagagcggcttcttcgagatgcccaaggacagcttccactgcctgcaggacaactggaagcacgagatccaggagatgttcgaccagctgagagccaaggagaaggagctgagaacctgggaggaggagctgaccagagccgccctgcagcagaagaaccaggaggagctgctgagaagaagagagcaggagctggccgagagagagatcgacatcctggagagagagctgaacatcatcatccaccagctgtgccaggagaagcccagagtgaagaagagaaagggcaagttcagaaagagcagactgaagctgaaggacggcaacagaatcagcctgcccagcgacttccagcacaagttcaccgtgcaggccagccccaccatggacaagagaaagagcctgatcaacagcagaagcagcccccccgccagccccaccatcatccccagactgagagccatccagctgacccccggcgagagcagcaagacctggggcagaagcagcgtggtgcccaaggaggagggcgaggaggaggagaagagagcccccaagaagaagggcagaacctggggccccggcaccctgggccagaaggagctggccagcggcgacgagggcctgaagagcctggtggacggctacaagcagtggagcagcagcgcccccaacctggtgaagggccccagaagcagccccgccctgcccggcttcaccagcctgatggagatggcctgcttcagcagcaccctggtgatcttcaccgaggacgaggacagcgagggccccggcagcggcgagagcagactgcagcacagccccagccagagctacctgtgcatccccttccccagaggcgaggacggcgacggccccagcagcgacggcatccacgaggagcccacccccgtgaacagcgccaccagcaccccccagctgacccccaccaacagcctgaagagaggcggcgcccaccacagaagatgcgaggtggccctgctgggctgcggcgccgtgctggccgccaccggcctgggcttcgacctgctggaggccggcaagtgccagctgctgcccctggaggagcccgagccccccgccagagaggagaagaagagaagagagggcctgttccagagaagcagcagacccagaagaagcaccagcccccccagcagaaagctgttcaagaaggaggagcccatgctgctgctgggcgaccccagcgccagcctgaccctgctgagcctgagcagcatcagcgagtgcaacagcaccagaagcctgctgagaagcgacagcgacgagatcgtggtgtacgagatgcccgtgagccccgtggaggccccccccctgagcccctgcacccacaaccccctggtgaacgtgagagtggagagattcaagagagaccccaaccagagcctgacccccacccacgtgaccctgaccacccccagccagcccagcagccacagaagaacccccagcgacggcgccctgaagcccgagaccctgctggccagcagaagccccagcagcaacggcctgagccccagccccggcgccggcatgctgaagacccccagccccagcagagaccccggcgagttccccagactgcccgaccccaacgtggtgttcccccccacccccagaagatggaacacccagcaggacagcaccctggagagacccaagaccctggagttcctgcccagacccagacccagcgccaacagacagagactggacccctggtggttcgtgagccccagccacgccagaagcaccagccccgccaacagcagcagcaccgagacccccagcaacctggacagctgcttcgccagcagcagcagcaccgtggaggagagacccggcctgcccgccctgctgcccttccaggccggccccctgccccccaccgagagaaccctgctggacctggacgccgagggccagagccaggacagcaccgtgcccctgtgcagagccgagctgaacacccacagacccgccccctacgagatccagcaggagttctggagctag

SEQ ID NO: 331829 - DNA, 510 bp, Artificial Sequence
  derived and/or modified sequence
accagagagcaggaggagctggaggaggccctggaggtggagagacaggagaacgagcagagaagactgttcatccagaaggaggagcagctgcagcagatcctgaagagaaagaacaagcaggccttcctggacgagctggagagcagcgacctgcccgtggccctgctgctggcccagcacaaggacagaagcacccagctggagatgcagctggagaagcccaagcccgtgaagcccgtgaccttcagcaccggcatcaagatgggccagcacatcagcctggcccccatccacaagctggaggaggccctgtacgagtaccagcccctgcagatcgagacctacggcccccacgtgcccgagctggagatgctgggcagactgggctacctgaaccacgtgagagccgccagcccccaggacctggccggcggctacaccagcagcctggcctgccacagagccctgcaggacgccttcagcggcctgttctggcagcccagctag

SEQ ID NO: 331830 - DNA, 510 bp, Artificial Sequence
  derived and/or modified sequence
acaagagagcaggaggaactggaagaggccttggaggtcgaaagacaggagaacgagcagaggcgtctctttatccagaaggaggaacagctccaacaaattctcaaaagaaagaataaacaagcctttttggatgagctggagtcaagtgatctccccgtcgccctgctcctagctcagcacaaggacagaagcacacagttggagatgcagctggagaagccaaagcccgtgaaacccgtgacattctctaccggcatcaaaatgggtcagcatatcagtttagctccaattcataagctggaggaagctctgtacgaatatcagcctcttcagatcgagacatacggcccacacgttcccgaactagagatgttgggacggctggggtacctgaatcacgtgcgggctgccagcccgcaggacctggccggtggctataccagttccctggcgtgccatagggccctacaggatgccttcagtggtctgttttggcagccttcctag

SEQ ID NO: 331831 - DNA, 510 bp, Artificial Sequence
  derived and/or modified sequence
acccgggagcaggaggagctggaggaggccctggaggtggagcggcaggagaatgagcagaggaggctcttcatccagaaggaggagcagctgcagcagatcctgaagaggaagaacaagcaggccttcctggatgagctggagagcagtgacctgcctgtggccctgctgctggcccagcacaaggacaggagcacccagctggagatgcagctggagaagcccaagcctgtgaagcctgtgaccttcagcacaggcatcaagatgggccagcacatcagcctggcccccatccacaagctggaggaggccctgtatgagtaccagcccctgcagatcgagacctacggcccccacgtgcctgagctggagatgctgggccgcctgggctacctgaaccacgtgcgggccgccagcccccaggacctggccggcggctacaccagcagcctggcctgccaccgggccctgcaggatgccttcagcggcctcttctggcagcccagctag

SEQ ID NO: 331832 - DNA, 680 bp, Artificial Sequence
  derived and/or modified sequence
actcgagaacaggaagaactggaagaagctttagaagtggaacgacaggaaaatgaacaaagaagattatttatacaaaaagaagaacaactgcagcagattctaaaaaggaagaataagcaggcttttttagatgagctggagagttctgatctccctgttgctctgcttttggctcagcataaagatagatctacccaattagaaatgcaacttgagaaacccaaacctgtaaaaccagtgacgttttccacaggcatcaaaatgggtcaacatatttcactggcacctattcacaagcttgaagaagctctgtatgaataccagccactgcagatagagacatatggaccacatgttcctgagcttgagatgctaggaagacttgggtatttaaaccatgtcagagctgcctcaccacaggaccttgctggaggctatacttcttctcttgcttgtcacagagcactacaggatgcattcagtgggcttttctggcagcccagttaaccatttataagatttggaccttggagctgaaccagggagctagcaaaaaggatttgacacgataagcctcatctgatggaagagaggaataaataattcacctatatgtgtttgaggttgtgacagacttataaaatctttttaaaaaataaagctataatttatattaa

SEQ ID NO: 331833 - DNA, 510 bp, Artificial Sequence
  derived and/or modified sequence
acccgggagcaggaggagctggaggaggccctggaggtggagcggcaggagaacgaacagcggcgcctgttcatacagaaggaggaacagttgcagcaaatactgaagaggaaaaataaacaggctttcctggatgagttggagtcgtctgatttgcccgtcgcccttctgcttgctcagcacaaggaccggagtacgcagctggaaatgcagcttgaaaaaccaaaaccagtaaagcctgttacgttctcaactggaatcaaaatggggcagcacatctctctcgccccaatccataagttggaggaggccctctatgaatatcagccactccagatagagacctatggaccacacgtacccgagcttgagatgctggggcgcctcgggtatttgaatcatgtacgggctgcatctcctcaggacctcgctggggggtatacatcctccctagcctgccatcgcgcactgcaagatgcgttcagcggtctgttctggcaaccctcctag

SEQ ID NO: 331834 - DNA, 510 bp, Artificial Sequence
  derived and/or modified sequence
acaagagagcaggaggagctggaggaagcactggaggtcgagcgccaagagaatgagcagcggaggctcttcattcagaaagaagaacagctacaacaaatcctgaagaggaagaataagcaggcattcctcgatgagctcgaatcgtctgatttgcccgtggccctgttgcttgcgcagcacaaggatagatccactcagcttgagatgcagctggaaaaacccaagccagtgaaacctgtgactttcagtactggcattaagatgggccagcacatatccctggcccctatacacaaacttgaggaggccctgtatgagtatcagcccctgcagatcgagacatatggccctcatgtccccgagctggaaatgcttgggaggcttggctacctaaatcacgtgcgagcagcttctccccaggatcttgctgggggatatacctcatccctggcatgtcacagggccctccaggacgccttcagcggcctcttctggcaaccctcgtag

SEQ ID NO: 331835 - protein, 506 aa, Artificial Sequence
  derived and/or modified sequence
MSVLSPGDLKPKRGSPHRGSLDRTDASTDLAMRSWPSELGSRTCSTSATTTAPSNSTPIARHPGRTKGYNSDDNLCEPSLEFEVPNHRQYVSRPSSLESSRNTSSNSSPLNLKGSSEQLHGRSESFSSEDLIPSRDLATLPREASTPGRNALGRHEYPLPRNGPLPQEGAQKRGTAPPYVGVRPCSASPSSEMVTLEEFLEESNRSSPTHDTPSCRDDLLSDYFRKASDPPAIGGQPGPPAKKEGAKMPTNFVAPTVKMAAPTSEGRPLKPGQYVKPNFRLTEAEAPPSVAPRQAQPPQSLSLGRPRQAPEALGGRETGSHTLQSPAPPSSHSLARERTPLVGKAGSSCQGPGPRSRPLDTRRFSLAPPKEERLAPLHQSATAPAIATAGAGAAAAGSGSNSQLLHFSPAAAPAARTKPKAPPRSGEVATITPVRAGLSLSEGDGVPGQGCSEGLPAKSPGRSPDLAPHLGRALEDCSRGSVSKSSPASPEPGGDPQTVWYEYGCV

SEQ ID NO: 331836 - DNA, 1659 bp, Artificial Sequence
  derived and/or modified sequence
atgagcgtgctgagccccggcgacctgaagcccaagagaggcagcccccacagaggcagcctggacagaaccgacgccagcaccgacctggccatgagaagctggcccagcgagctgggcagcagaacctgcagcaccagcgccaccaccaccgcccccagcaacagcacccccatcgccagacaccccggcagaaccaagggctacaacagcgacgacaacctgtgcgagcccagcctggagttcgaggtgcccaaccacagacagtacgtgagcagacccagcagcctggagagcagcagaaacaccagcagcaacagcagccccctgaacctgaagggcagcagcgagcagctgcacggcagaagcgagagcttcagcagcgaggacctgatccccagcagagacctggccaccctgcccagagaggccagcacccccggcagaaacgccctgggcagacacgagtaccccctgcccagaaacggccccctgccccaggagggcgcccagaagagaggcaccgcccccccctacgtgggcgtgagaccctgcagcgccagccccagcagcgagatggtgaccctggaggagttcctggaggagagcaacagaagcagccccacccacgacacccccagctgcagagacgacctgctgagcgactacttcagaaaggccagcgacccccccgccatcggcggccagcccggcccccccgccaagaaggagggcgccaagatgcccaccaacttcgtggcccccaccgtgaagatggccgcccccaccagcgagggcagacccctgaagcccggccagtacgtgaagcccaacttcagactgaccgaggccgaggccccccccagcgtggcccccagacaggcccagcccccccagagcctgagcctgggcagacccagacaggcccccgtgccccccgccagccacgcccccgccagcagaagcgccagcctgagcagagccttcagcctggccagcgccgacctgctgagagccagcggccccgaggcctgcaagcaggagagcccccagaagctgggcgcccccgaggccctgggcggcagagagaccggcagccacaccctgcagagccccgccccccccagcagccacagcctggccagagagagaacccccctggtgggcaaggccggcagcagctgccagggccccggccccagaagcagacccctggacaccagaagattcagcctggccccccccaaggaggagagactggcccccctgcaccagagcgccaccgcccccgccatcgccaccgccggcgccggcgccgccgccgccggcagcggcagcaacagccagctgctgcacttcagccccgccgccgcccccgccgccagaaccaagcccaaggccccccccagaagcggcgaggtggccaccatcacccccgtgagagccggcctgagcctgagcgagggcgacggcgtgcccggccagggctgcagcgagggcctgcccgccaagagccccggcagaagccccgacctggccccccacctgggcagagccctggaggactgcagcagaggcagcgtgagcaagagcagccccgccagccccgagcccggcggcgacccccagaccgtgtggtacgagtacggctgcgtgtag

SEQ ID NO: 331837 - DNA, 1920 bp, Artificial Sequence
  derived and/or modified sequence
ccctttcctttatcatgtgtctgtattgtgtaccctccttcatttccgaaattcaaacaaacaaaaaaagccagcgtctaaaaggccagatggccgatagcggacccctcctcctgcccccaatttcaagcttaaagtagccagcgtggattctgatttcaaaatagaagatgagttgtcacactccctggaccatttcttcagcacaacacagttttagggggagcctcaggatatacgtgcacatgtccttgggccaggatgtccgtactaagccctggggatctaaaaccaaagcgaggctccccacacagaggcagccttgaccgcacagatgcctccaccgatctggccatgaggtcctggccctcggagctgggctcccggacttgctcaacttcagccaccactacagccccttccaactccacccccatcgcccggcacccaggccgcaccaaaggctataactcagatgacaacctctgtgagccatccctggagtttgaggtccccaaccacaggcagtacgtgtcgcggccaagtagcttagagagcagtagaaacacatccagcaacagctcacctcttaacctaaaaggctcctccgagcagctccatggccggtctgagagcttcagcagcgaagacctgatccccagcagggacctggccactttgccccgggaagccagcacaccgggacgcaacgccctcggccgccacgagtaccccttgcctcggaacgggcctctcccacaggagggtgcccagaagaggggcacagcccctccctacgtcggagtgcggccctgctcggcctcccccagcagtgagatggtcaccttggaggagttcctggaggagagcaaccgcagctcccccacccatgacactcccagttgccgggatgacctgctgagtgactacttccgaaaggccagcgatcccccagccatcggaggccaaccaggaccacctgccaagaaagaaggggccaagatgcccaccaactttgtggcccccaccgtcaaaatggccgcccccacctcggaggggaggccgctgaagcccgggcagtacgtaaagccaaacttcagactgactgaggccgaggccccacccagcgtggccccgagacaggcccagcctccccagagcctgtctctgggcagaccccggcaggctccggtgcccccagcttcccatgcacctgccagccgcagtgcctccttgagccgggccttcagcctggcctcagctgaccttctccgggccagcgggccagaggcctgcaaacaggagtcccctcagaagctgggggctcctgaggccttagggggcagagagacaggcagccacaccctgcaaagccccgcaccccccagctcccatagcctggcccgggagcggaccccacttgtgggaaaggctggcagctcctgtcagggcccaggtccccgcagccggccgctggacacgaggcgcttctccctggctcccccaaaggaggagaggctggcccccctgcatcagtctgccacagcccccgccattgccactgcaggtgctggtgctgctgctgctggcagtggcagcaactcccagctcctgcacttctcacctgctgcagccccggctgccaggaccaagcccaaggcgcccccacgctcaggggaggtggccaccatcacccctgtccgggcagggctcagcctctcagagggagacggggtcccggggcagggctgcagtgaggggcttccggccaagagcccaggtcggtctcccgatttggctccccacctcggccgggccctggaggactgcagtcgagggagcgtctcaaagagcagtccggcctccccggagcccggcggggatccgcagaccgtgtggtatgagtacggctgtgtgtga

SEQ ID NO: 331838 - DNA, 1521 bp, Artificial Sequence
  derived and/or modified sequence
atgagcgtgctgagccccggcgacctgaagcccaagagaggcagcccccacagaggcagcctggacagaaccgacgccagcaccgacctggccatgagaagctggcccagcgagctgggcagcagaacctgcagcaccagcgccaccaccaccgcccccagcaacagcacccccatcgccagacaccccggcagaaccaagggctacaacagcgacgacaacctgtgcgagcccagcctggagttcgaggtgcccaaccacagacagtacgtgagcagacccagcagcctggagagcagcagaaacaccagcagcaacagcagccccctgaacctgaagggcagcagcgagcagctgcacggcagaagcgagagcttcagcagcgaggacctgatccccagcagagacctggccaccctgcccagagaggccagcacccccggcagaaacgccctgggcagacacgagtaccccctgcccagaaacggccccctgccccaggagggcgcccagaagagaggcaccgcccccccctacgtgggcgtgagaccctgcagcgccagccccagcagcgagatggtgaccctggaggagttcctggaggagagcaacagaagcagccccacccacgacacccccagctgcagagacgacctgctgagcgactacttcagaaaggccagcgacccccccgccatcggcggccagcccggcccccccgccaagaaggagggcgccaagatgcccaccaacttcgtggcccccaccgtgaagatggccgcccccaccagcgagggcagacccctgaagcccggccagtacgtgaagcccaacttcagactgaccgaggccgaggccccccccagcgtggcccccagacaggcccagcccccccagagcctgagcctgggcagacccagacaggcccccgaggccctgggcggcagagagaccggcagccacaccctgcagagccccgccccccccagcagccacagcctggccagagagagaacccccctggtgggcaaggccggcagcagctgccagggccccggccccagaagcagacccctggacaccagaagattcagcctggccccccccaaggaggagagactggcccccctgcaccagagcgccaccgcccccgccatcgccaccgccggcgccggcgccgccgccgccggcagcggcagcaacagccagctgctgcacttcagccccgccgccgcccccgccgccagaaccaagcccaaggccccccccagaagcggcgaggtggccaccatcacccccgtgagagccggcctgagcctgagcgagggcgacggcgtgcccggccagggctgcagcgagggcctgcccgccaagagccccggcagaagccccgacctggccccccacctgggcagagccctggaggactgcagcagaggcagcgtgagcaagagcagccccgccagccccgagcccggcggcgacccccagaccgtgtggtacgagtacggctgcgtgtag

SEQ ID NO: 331839 - DNA, 1659 bp, Artificial Sequence
  derived and/or modified sequence
atgtccgtactaagtccgggggatctcaagcctaaacggggttctccacataggggatccctagacagaactgatgcatccacagatctcgccatgcgcagctggccttccgagctcggatcacgcacctgttcaacatctgcgactactaccgctccctctaactcaactcctatcgctagacaccccggccgcaccaagggatataatagcgacgataacctgtgcgagccatccctggagtttgaggtacctaatcacaggcagtacgtctctaggccctcctccctggaaagctcgaggaacacctcctccaattcatcaccactgaacttgaagggcagtagtgagcagctccacggccggagtgaaagctttagctccgaagacctaatcccctcacgcgatctggccacgctgccaagggaggcatctacgccaggccggaatgctctcggacggcacgaataccccctgcctaggaacggcccgctgccccaggaaggggcccagaaacgcgggaccgcaccaccatacgtgggcgtgaggccctgctcagcaagtccgagctcagaaatggtgacgctggaggagttcttggaggagtcaaacagaagctctcctactcatgacacccccagctgccgggacgacctcttgagtgactacttcaggaaggcatcagacccccccgccataggcggccagcctgggcccccagctaaaaaggaaggagctaaaatgcccaccaacttcgttgcccccacagttaaaatggctgccccaaccagcgaaggtcgcccgctcaaacccggtcagtacgtgaagccaaattttaggcttactgaggcagaggctcctccgtccgtcgccccacggcaggcacagcccccgcagagcctatccctgggcaggccacgacaggctcccgtcccaccagcatcccacgctcccgcatctcgctccgctagcctcagtagggccttttctctagcctccgctgatctgcttcgggccagtgggcccgaagcatgtaaacaggagagtccacagaaacttggcgcaccggaggccctgggtggacgggaaactgggtcacatacacttcagtctccagccccgccgagctcccactcgctcgcccgggagcgcaccccgcttgtagggaaggccgggtcaagctgtcaggggccaggaccccgctcacgaccactagacacccgtagattctccctcgcgccacccaaggaagagaggcttgctcccctgcatcagtcggctactgccccggccattgcgaccgctggcgctggggccgccgcggctggttccggatccaattctcaacttctgcatttctccccagctgctgcgccagcagccagaaccaaaccaaaagctccgcccaggtctggtgaagtcgctaccataactccagtccgcgccggactatccctgtcagagggggatggggtccccggtcagggttgttccgagggcctgcccgctaagtcacctggacgttctccagatctagcccctcaccttggccgggcccttgaagattgctctagagggtcagtatccaaatcgagtccagcttcgccagaaccgggaggagacccccagactgtttggtacgaatatggttgcgtgtag

SEQ ID NO: 331840 - DNA, 1521 bp, Artificial Sequence
  derived and/or modified sequence
atgtcagtcttgtcaccaggcgacctgaaacctaagagaggtagcccgcaccgcggttcgcttgataggacggatgcctccacagacctggccatgcggtcatggccatcggagctcggctcgcgcacctgctctacttctgctactaccacagccccaagcaattccacgcctatcgcccgccacccaggaaggacaaaggggtataatagcgatgacaacctgtgtgagcctagtctcgaattcgaggtgcccaaccaccggcagtacgtttcccgtcccagctctctcgagagctcaagaaacacatctagtaactcctcccctctcaaccttaaggggtcaagcgaacagcttcatgggcgctcggaatcattcagcagtgaggacctgatcccctcaagagacctggccactttgccccgcgaggcatccacacccggaaggaacgctctagggaggcacgaatacccacttccccgcaatgggccgctcccccaagagggagcacagaaaagaggaactgcaccaccctacgtgggcgttagaccctgctctgctagcccttccagcgagatggtgacactggaggaattcctggaggaaagtaaccggtctagtcctacccatgatacccccagttgccgggatgacctcctgtccgactatttccgtaaagcatcggacccccccgccataggcggccagcccggtcctccggcgaaaaaagaaggcgcaaagatgcctactaacttcgttgcccctaccgtgaagatggcggctcccaccagtgagggtcgccccttgaaacctggccagtacgtcaaacctaactttcgcttaacagaagctgaggctcctccaagcgttgcgcctcgccaggcacagccaccgcagagtctctctcttggaaggccgcgacaggctccagaggctctgggggggagagagacaggtagccacacgttacagagtcctgcacccccttcctctcattcactcgcccgcgagcgaacacctctggttggaaaggccggcagcagttgccaggggcctgggccaaggtcccggccactcgacacgagaaggttttcattagcccctcctaaagaggaacgcctagcacccttgcaccagtctgccactgctcccgcgattgccaccgctggtgccggagcagctgctgccgggtcgggtagtaactcccaactgctgcacttctctcccgccgcggcacccgccgcacgcacaaaaccaaaggcccccccacgtagcggggaagttgccacgatcacccccgtacgcgctggtctctcactgagcgaaggcgacggcgtgcccggacaggggtgcagcgagggattaccagcgaagtctcccgggcgcagcccagatcttgcccctcacctgggacgtgctctcgaagattgcagcagaggatcagtatccaagtcctctccagcctccccagagcccggaggcgacccacaaaccgtctggtacgaatatggttgtgtctag

SEQ ID NO: 331841 - DNA, 1659 bp, Artificial Sequence
  derived and/or modified sequence
atgtctgtgctgagccctggggacctgaagcccaagaggggcagcccccaccggggcagcctggacagaacagatgccagcacagacctggccatgaggtcctggcccagcgagctgggcagcaggacctgcagcaccagcgccaccaccacagcccccagcaacagcacccccatcgcccggcaccctggccgcaccaagggctacaacagtgatgacaacctgtgtgagcccagcctggagtttgaggtgcccaaccaccggcagtatgtgtcccggcccagcagcctggagagcagcaggaacaccagcagcaacagcagccccctgaacctgaagggcagcagcgagcagctgcacggccgctctgagagcttcagcagtgaagatctcatccccagccgggacctggccaccctgccccgggaggccagcaccccaggaagaaatgccctgggcagacatgagtaccccctgcccagaaatggccccctgccccaggagggcgcccagaagaggggcacagccccaccctacgtgggcgtgcggccctgcagcgccagccccagcagcgagatggtgaccctggaggagttcctggaggagagcaacagaagcagccccacccatgacacccccagctgcagagatgacctgctgagtgactacttcaggaaggccagtgaccccccagccatcggcggccagcccggccccccagccaagaaggagggcgccaagatgcccaccaactttgtggcccccaccgtgaagatggccgcccccaccagcgagggccggcccctgaagccaggccagtatgtgaagcccaacttccggctgacagaggccgaggcccctccttctgtggccccccggcaggcccagcccccccagagcctgagcctgggccggccccggcaggcccctgtgcccccagccagccacgccccagccagccgcagcgccagcctgagccgggccttcagcctggccagcgctgacctgctgcgggccagcggccctgaggcctgcaagcaggagagcccccagaagctgggcgcccctgaggccctgggcggccgggagaccggcagccacaccctgcagagccctgccccacccagcagccacagcctggcccgggagaggacccccctggtgggcaaggccggcagcagctgccagggccctggccccaggagccggcccctggacacccggcgcttcagcctggccccacccaaggaggagcggctggcccccctgcaccagagcgccacagccccagccatcgccacagctggagctggagctgctgctgctggcagcggcagcaacagccagctgctgcacttctccccagctgctgccccagctgcccggaccaagcccaaggccccacccaggtctggagaggtggccaccatcacccctgtgcgggccggcctgagcctgtctgaaggagatggagtgcccggccagggctgcagcgagggcctgcctgccaagagccctggccgcagcccagacctggccccccacctgggccgggccctggaggactgcagccggggctctgtgtccaagagcagccctgccagccctgagcccggcggggacccccagacagtgtggtatgaatatggctgtgtgtag

SEQ ID NO: 331842 - DNA, 1521 bp, Artificial Sequence
  derived and/or modified sequence
atgtctgtgctgagccctggggacctgaagcccaagaggggcagcccccaccggggcagcctggacagaacagatgccagcacagacctggccatgaggtcctggcccagcgagctgggcagcaggacctgcagcaccagcgccaccaccacagcccccagcaacagcacccccatcgcccggcaccctggccgcaccaagggctacaacagtgatgacaacctgtgtgagcccagcctggagtttgaggtgcccaaccaccggcagtatgtgtcccggcccagcagcctggagagcagcaggaacaccagcagcaacagcagccccctgaacctgaagggcagcagcgagcagctgcacggccgctctgagagcttcagcagtgaagatctcatccccagccgggacctggccaccctgccccgggaggccagcaccccaggaagaaatgccctgggcagacatgagtaccccctgcccagaaatggccccctgccccaggagggcgcccagaagaggggcacagccccaccctacgtgggcgtgcggccctgcagcgccagccccagcagcgagatggtgaccctggaggagttcctggaggagagcaacagaagcagccccacccatgacacccccagctgcagagatgacctgctgagtgactacttcaggaaggccagtgaccccccagccatcggcggccagcccggccccccagccaagaaggagggcgccaagatgcccaccaactttgtggcccccaccgtgaagatggccgcccccaccagcgagggccggcccctgaagccaggccagtatgtgaagcccaacttccggctgacagaggccgaggcccctccttctgtggccccccggcaggcccagcccccccagagcctgagcctgggccggccccggcaggcccctgaggccctgggcggccgggagaccggcagccacaccctgcagagccctgccccacccagcagccacagcctggcccgggagaggacccccctggtgggcaaggccggcagcagctgccagggccctggccccaggagccggcccctggacacccggcgcttcagcctggccccacccaaggaggagcggctggcccccctgcaccagagcgccacagccccagccatcgccacagctggagctggagctgctgctgctggcagcggcagcaacagccagctgctgcacttctccccagctgctgccccagctgcccggaccaagcccaaggccccacccaggtctggagaggtggccaccatcacccctgtgcgggccggcctgagcctgtctgaaggagatggagtgcccggccagggctgcagcgagggcctgcctgccaagagccctggccgcagcccagacctggccccccacctgggccgggccctggaggactgcagccggggctctgtgtccaagagcagccctgccagccctgagcccggcggggacccccagacagtgtggtatgaatatggctgtgtgtag

SEQ ID NO: 331843 - DNA, 1659 bp, Artificial Sequence
  derived and/or modified sequence
atgagcgtgctgagccccggcgacctgaagcccaagcggggcagcccacataggggatcgctggatcggacagacgctagcactgacctcgccatgaggtcctggcccagcgagctgggtagccggacatgttctacctctgctacaacgacagcaccatctaacagtactcctattgccagacacccaggccgcaccaagggatacaactccgatgacaatctgtgcgagcctagcttagagtttgaagtgcccaaccaccgtcagtatgtgtcacggcctagtagccttgaatctagccggaatactagctctaatagtagtccactgaatttgaaaggatctagtgaacaacttcacggtcgttccgaatcatttagttctgaagatctgattccttcgcgggatctggccacactgcccagagaagcatctactcccggtcggaatgcgcttggccgccatgagtaccccttgccgaggaatggccctttgcctcaggaaggggcccaaaaacggggaaccgcaccgccgtacgtgggcgtgaggccatgtagcgctagtccttcctcggagatggtgacgctggaagaatttcttgaggaatccaaccgatcaagtcctactcacgatacaccctcatgcagagacgaccttttgtcagactatttcagaaaagcctccgatcctccggccattgggggacaaccagggcccccagccaaaaaggagggggctaagatgcctacaaattttgttgccccgactgtgaagatggcggcccctacatccgaaggccgcccacttaaaccgggccagtacgtcaagcctaattttcgcctaacagaggcggaagcaccacctagcgtcgctcctcggcaggcacaacctccacagtcacttagtctcgggcgtccccgacaggcccccgtacccccagcaagccatgcccctgccagccggtccgcatctctgtctagagcattttctttggctagcgctgatcttctaagggcctctggccctgaagcctgtaagcaggaaagcccacagaaacttggagctccagaggctctcggaggtcgcgaaaccgggtcacacacattgcagtcaccggcgcccccatcatcgcactccttggctagagagcggacccccctcgtgggcaaagcaggttcttcttgccaggggcccgggccaagaagccgccctctggacacccggcggtttagccttgcccctccaaaagaggaaaggctggctccacttcaccaaagcgccaccgcacccgctatcgccacagccggcgcgggagctgccgctgcgggcagtggctcaaatagtcagctgcttcatttctcacccgccgcggctccagcagccagaacaaaacccaaggcccctccgagaagcggtgaagtggccacgattactccagtgcgcgcgggcctgtcgctgtcagagggcgatggagtccctggtcagggatgttccgagggcctgccagccaaatctccaggaagaagccctgacctagctccccacctcggcagagctcttgaagactgctcacgtgggtcggtgtcaaaatcatctcccgcatctccagaaccgggcggcgacccacagaccgtatggtacgaatatggctgtgtgtag

SEQ ID NO: 331844 - DNA, 1521 bp, Artificial Sequence
  derived and/or modified sequence
atgagcgtgctgagccccggcgacctgaagcccaagcggggcagccctcaccgcgggtccctggataggactgatgcatccacagatttggcgatgcggtcctggccaagcgagctcgggtcccgtacatgtagtacaagcgctacaacaaccgccccatctaactctacgcccattgcacggcaccctggacgtacgaaaggctacaacagcgatgataacctctgcgaaccttcgttagagtttgaagtccctaaccatcggcagtatgtttccagacctagctctttggaatcttcccggaacactagcagcaatagcagcccattgaacttgaagggttccagcgaacaactgcatgggcggtctgagtctttctcgtcagaagatttgatcccgagccgcgacctggcaacacttccgcgagaggcatcgactcctgggcgaaatgcactagggaggcatgagtaccccctgccgagaaacggaccactccctcaggagggagcgcaaaagcgcgggaccgccccaccctacgtcggtgtgcgcccttgctctgcctcaccatcatctgagatggttactcttgaggagttcctggaagaatcaaacagatctagcccgacccacgacacaccttcctgtagagatgatctgctgagcgattactttagaaaggcgtccgatcccccagcgattggcggacaacccggcccccctgctaaaaaggagggtgccaaaatgccaaccaactttgtggctcctaccgtcaagatggctgcgccaacctccgaagggcgcccattgaagccggggcaatatgttaaacccaacttcagattgaccgaggcagaggcccctccatcggtcgccccacggcaggcgcagccaccgcaaagcctcagtttaggcagacctcgccaggcaccagaggcactgggcggaagagaaaccgggtcacacacactgcaatcacccgctcctcccagctcccattcattagccagagagcgaaccccactagtcggcaaggccggatcatcctgtcaagggccagggccaaggtccagacccctggatacgcgcagattctccctggcccctccaaaagaagaaaggctcgcacccctgcatcagtccgcaacagcgccagccattgctacagctggcgccggagctgctgctgcgggatctggtagtaactcccagttgctccatttctctcccgctgccgcacctgccgctcggaccaaacccaaggcccctcccaggagcggggaggtggcaacaatcacccccgtcagagcgggactgtcactttctgagggagacggcgtgccaggacagggttgttctgaaggactccctgccaagagtccaggccggtccccagacttggcgccacacctggggagggcactcgaagattgctctcgggggtcggtcagcaagagcagtcccgcatccccagaacctgggggcgacccccagaccgtttggtacgagtacggttgtgtatag

SEQ ID NO: 331845 - DNA, 1659 bp, Artificial Sequence
  derived and/or modified sequence
atgtctgtgctctcacccggagacctcaagccaaagaggggatcacctcatcgtggaagcctagatagaactgatgcttccaccgacctcgccatgcgtagctggccaagcgagcttggttcccgtacatgttcaacaagtgcgacgacaacagccccttcgaatagcacaccaatcgcccgacaccctggcaggaccaaaggttataactccgacgacaacttgtgtgaaccctcactggagttcgaagtgccgaaccacagacagtatgtgtccagacccagctctctagagtccagtagaaacacctctagcaacagctcgccgctcaacctgaaaggcagctccgagcaattgcatggacgtagcgagtctttttcttcagaagacctcatcccctcaagagacctcgcaacactccccagggaggcttccacaccaggcagaaatgccctcggcagacatgagtaccccctccccaggaacgggccattaccccaagagggcgctcagaagagaggcaccgctcctccttatgtgggcgtccgcccatgttccgcctcacctagtagcgagatggtcacgctcgaggagttcctggaagaaagcaaccgtagctcccctacacacgacacaccttcctgcagggatgatttgctttccgattatttcagaaaagcctctgaccctcccgcaattggaggccaaccgggaccgccagcaaaaaaagaaggggctaagatgcctaccaactttgtggcccctacagtgaagatggcagctcctacgagcgaaggcaggcctttgaagccaggtcagtacgttaagcctaatttcaggctaacagaagcagaggcacctccttctgtggctcctagacaggctcagcctccccagagcctcagcctcgggaggcctcgtcaggctccagtaccccctgcctcacatgctcctgcctctaggagcgcctcattgtcacgcgcattttctctcgcgagtgccgacttgctccgcgcaagcggccctgaggcttgtaagcaagagagtccccagaaattaggcgctccagaggctcttggaggacgcgaaaccggttcccataccctacaaagccccgcacctccgtcaagccactctctggctcgggagcggaccccccttgtcggcaaagcagggagctcctgtcagggccctggcccacgctccagacctctcgatacaagacgcttctctctggcgccacctaaagaagagcgcctcgcccctttgcaccaatccgctacagcccctgcgatcgccacagcgggagcgggtgcggctgccgctgggtccggatctaattctcagctgctccacttctcccccgcagcagctccagccgcacgcacaaaacccaaagctcccccacgctcaggtgaggtggctacaatcactcctgttcgagcaggcctttctctgtccgaaggggacggggtgccaggccagggctgctccgaggggctgccagcaaagagtcccggacggagccctgatctggcccctcatctaggcagggccctggaagattgttccagagggtcagtgagcaaaagcagtccagcctctcctgagcccggaggggatccccagactgtgtggtacgaatatggctgcgtttag

SEQ ID NO: 331846 - DNA, 1521 bp, Artificial Sequence
  derived and/or modified sequence
atgagcgtattatctccgggagatctgaagcccaagcggggatcgccacacagaggatccttggaccggaccgatgcgtccactgacctggctatgcgctcatggccttccgaactaggctccagaacatgctctaccagcgccaccactactgccccatccaattctacacccattgccagacaccccggaaggaccaagggctacaacagcgatgataatctgtgcgagccatctctggaattcgaggtgccaaaccacaggcagtatgtgagccgcccaagcagcttagagagttcaagaaacaccagctccaattcatctcccctcaacctcaagggatcatccgaacaactccatgggcgatcagaatcattctcttcggaggatctgattcccagccgggatcttgcaacactgccgcgagaggcaagcaccccaggacggaacgctctgggtaggcatgagtacccgctgccaagaaatggtcccctaccccaggagggagctcagaaaaggggcactgcaccaccttatgttggggtgcggccttgctccgcaagcccatctagcgagatggtgaccttggaagagttcctcgaggaaagcaaccgcagctctcccacacatgatacgcccagctgccgtgacgacctgcttagtgattattttagaaaggcctcagacccccctgctattggtggccagcccggaccaccagctaaaaaagaaggcgctaaaatgcctacaaacttcgtggcccctactgttaagatggctgcgccaactagcgaaggtcggccactcaaacccggacagtatgtaaaaccgaattttcgactcaccgaggctgaggcacctcctagtgtggctccccgtcaggcccagccaccacaatccctgtctttgggacgtcctcgccaggctcccgaggccctcggaggtagagagacggggagccacacgctccagagtcccgctccaccgagctcgcactcattggctagagaacgcactccgcttgttggtaaggcaggtagcagttgccaggggccaggcccaaggagtagacctctggacaccaggagatttagcctggcccctccaaaggaggagcggcttgccccactgcaccaaagcgccaccgcgcctgcaattgccaccgctggcgctggagcagctgcggctgggtctggttctaactctcagttgctccatttttctcctgccgcagctcccgctgccaggactaagccaaaggcaccccctcgctcaggggaggtggccaccatcactcctgtaagagctggcctctcactcagcgagggcgatggtgtgccaggacaaggttgctctgagggtttgcccgctaagtccccaggccgttcacccgatctcgcccctcaccttggacgcgctcttgaagactgttccagaggaagcgtctcaaaaagctctcccgcttcccccgagcctgggggagacccacagactgtgtggtatgaatacggttgtgtttag

SEQ ID NO: 331847 - DNA, 3104 bp, Artificial Sequence
  derived and/or modified sequence
tccgacattggagatttctaatccctttcctttatcatgtgtctgtattgtgtaccctccttcatttccgaaattcaaacaaacaaaaaaagccagcgtctaaaaggccagatggccgatagcggacccctcctcctgcccccaatttcaagcttaaagtagccagcgtggattctgatttcaaaatagaagatgagttgtcacactccctggaccatttcttcagcacaacacagttttagggggagcctcaggatatacgtgcacatgtccttgggccaggatgtccgtactaagccctggggatctaaaaccaaagcgaggctccccacacagaggcagccttgaccgcacagatgcctccaccgatctggccatgaggtcctggccctcggagctgggctcccggacttgctcaacttcagccaccactacagccccttccaactccacccccatcgcccggcacccaggccgcaccaaaggctataactcagatgacaacctctgtgagccatccctggagtttgaggtccccaaccacaggcagtacgtgtcgcggccaagtagcttagagagcagtagaaacacatccagcaacagctcacctcttaacctaaaaggctcctccgagcagctccatggccggtctgagagcttcagcagcgaagacctgatccccagcagggacctggccactttgccccgggaagccagcacaccgggacgcaacgccctcggccgccacgagtaccccttgcctcggaacgggcctctcccacaggagggtgcccagaagaggggcacagcccctccctacgtcggagtgcggccctgctcggcctcccccagcagtgagatggtcaccttggaggagttcctggaggagagcaaccgcagctcccccacccatgacactcccagttgccgggatgacctgctgagtgactacttccgaaaggccagcgatcccccagccatcggaggccaaccaggaccacctgccaagaaagaaggggccaagatgcccaccaactttgtggcccccaccgtcaaaatggccgcccccacctcggaggggaggccgctgaagcccgggcagtacgtaaagccaaacttcagactgactgaggccgaggccccacccagcgtggccccgagacaggcccagcctccccagagcctgtctctgggcagaccccggcaggctcctgaggccttagggggcagagagacaggcagccacaccctgcaaagccccgcaccccccagctcccatagcctggcccgggagcggaccccacttgtgggaaaggctggcagctcctgtcagggcccaggtccccgcagccggccgctggacacgaggcgcttctccctggctcccccaaaggaggagaggctggcccccctgcatcagtctgccacagcccccgccattgccactgcaggtgctggtgctgctgctgctggcagtggcagcaactcccagctcctgcacttctcacctgctgcagccccggctgccaggaccaagcccaaggcgcccccacgctcaggggaggtggccaccatcacccctgtccgggcagggctcagcctctcagagggagacggggtcccggggcagggctgcagtgaggggcttccggccaagagcccaggtcggtctcccgatttggctccccacctcggccgggccctggaggactgcagtcgagggagcgtctcaaagagcagtccggcctccccggagcccggcggggatccgcagaccgtgtggtatgagtacggctgtgtgtgactgtctcgtggttgagctcgcaaacctgaaaactactgacgcgccttccgactctcacggccttttctcttgcttgcctgcggtgccaggagagggtttggaatgaggaaaggggttcccacgcatttctgctgtttgttctgtgaatggaaacactgtgccaagccccaagaggattacgcttccaggtgtgtaacgtgttttctgtgtctgccgcttccagcagctgatatctttggaacaaataatccacgtcagcatggggaccaattaggatgcaatgacaaactgacttcccccaaagcagacactactccagtatgtcccagtagaacactcatttgcaatgtgttgagctccgttaagcacacacacactcacacaacaggcttacgaggctcaggcctggcgggtcagaaagcccactccctctcccaaggccactggatcccaggagaagcccagactggcgatactacaaaggtctccagggcctggcagaccccagagtcaggcctgctgttaaaaagtgagagtgctgctgttccattcctggggtcccaagcacttccctttaccccaggacccagggcagcctgcagggcagctggcggtggccttggccatttgcccccagcctccagctggctcctgagctctgcaccagggggtttggggaccacacaggcacctgccttcctagatttccctggctcacttttctgcaaacactggatctgccaggcctggggattggggggcaggaaagaggcccccatccagccccctccaggccagtgtgcacagtgcaccgaggggtcatccgcacagagcgaggtgcaagctcgatgtgtaacctggctgcggcacccgacatccccggtctcggggtgttgatttatttctgaataactttttgggtatagaaaccaattttttttaatatatgacatgtatatgtacacactcatgtgaaatatgtatactttggggggatctatttatgttccagtgggagtcactctcttctgtcgggaatcttatctgctgctttgtgtctttggtcagattcctgacaatttagtttcctgttgtaaaggtgcttttcctggggtgaactaaacctattgattttttttttttaagatttttttttccttttgatttaatatactgagaaagaaatgggagacttttgaatgttaacaagatccattttaggagtgtttggggttgtgtattaaatagccattcattctggaactcaaggacaggactgtaataaaatggaatggaaccg

SEQ ID NO: 331848 - protein, 890 aa, Artificial Sequence
  derived and/or modified sequence
MPASISSIFPGPTLLLSCGSEELDSEDAPPCCRLALGEPPPYGAAPIGIPRPPPPRPGMHSPPPRPAPSPGTWESQPARSVRLGGPGGGAGGAGGGRVLECPSIRITSISPTPEPPAALEDNPDAWGDGSPRDYPPPEGFGGYREAGGQGGGAFFSPSPGSSSLSSWSFFSDASDEAALYAACDEVESELNEAASRFGLGSPLPSPRASPRPWTPEDPWSLYGPSPGGRGPEDSWLLLSAPGPTPASPRPASPCGKRRYSSSGTPSSASPALSRRGSLGEEGSEPPPPPPLPLARDPGSPGPFDYVGAPPAESIPQKTRRTSSEQAVALPRSEEPASCNGKLPLGAEESVAPPGGSRKEVAGMDYLAVPSPLAWSKARIGGHSPIFRTSALPPLDWPLPSQYEQLELRIEVQPRAHHRAHYETEGSRGAVKAAPGGHPVVKLLGYSEKPLTLQMFIGTADERNLRPHAFYQVHRITGKMVATASYEAVVSGTKVLEMTLLPENNMAANIDCAGILKLRNSDIELRKGETDIGRKNTRVRLVFRVHVPQGGGKVVSVQAASVPIECSQRSAQELPQVEAYSPSACSVRGGEELVLTGSNFLPDSKVVFIERGPDGKLQWEEEATVNRLQSNEVTLTLTVPEYSNKRVSRPVQVYFYVSNGRRKRSPTQSFRFLPVICKEEPLPDSSLRGFPSASATPFGTDMDFSPPRPPYPSYPHEDPACETPYLSEGFGYGMPPLYPQTGPPPSYRPGLRMFPETRGTTGCAQPPAVSFLPRPFPSDPYGGRGSSFSLGLPFSPPAPFRPPPLPASPPLEGPFPSQSDVHPLPAEGYNKVGPGYGPGEGAPEQEKSRGGYSSGFRDSVPIQGITLEEVSEIIGRDLSGFPAPPGEEPPA

SEQ ID NO: 331849 - DNA, 2673 bp, Artificial Sequence
  derived and/or modified sequence
atgcccgccagcatcagcagcatcttccccggccccaccctgctgctgagctgcggcagcgaggagctggacagcgaggacgcccccccctgctgcagactggccctgggcgagccccccccctacggcgccgcccccatcggcatccccagaccccccccccccagacccggcatgcacagccccccccccagacccgcccccagccccggcacctgggagagccagcccgccagaagcgtgagactgggcggccccggcggcggcgccggcggcgccggcggcggcagagtgctggagtgccccagcatcagaatcaccagcatcagccccacccccgagccccccgccgccctggaggacaaccccgacgcctggggcgacggcagccccagagactaccccccccccgagggcttcggcggctacagagaggccggcggccagggcggcggcgccttcttcagccccagccccggcagcagcagcctgagcagctggagcttcttcagcgacgccagcgacgaggccgccctgtacgccgcctgcgacgaggtggagagcgagctgaacgaggccgccagcagattcggcctgggcagccccctgcccagccccagagccagccccagaccctggacccccgaggacccctggagcctgtacggccccagccccggcggcagaggccccgaggacagctggctgctgctgagcgcccccggccccacccccgccagccccagacccgccagcccctgcggcaagagaagatacagcagcagcggcacccccagcagcgccagccccgccctgagcagaagaggcagcctgggcgaggagggcagcgagccccccccccccccccccctgcccctggccagagaccccggcagccccggccccttcgactacgtgggcgccccccccgccgagagcatcccccagaagaccagaagaaccagcagcgagcaggccgtggccctgcccagaagcgaggagcccgccagctgcaacggcaagctgcccctgggcgccgaggagagcgtggccccccccggcggcagcagaaaggaggtggccggcatggactacctggccgtgcccagccccctggcctggagcaaggccagaatcggcggccacagccccatcttcagaaccagcgccctgccccccctggactggcccctgcccagccagtacgagcagctggagctgagaatcgaggtgcagcccagagcccaccacagagcccactacgagaccgagggcagcagaggcgccgtgaaggccgcccccggcggccaccccgtggtgaagctgctgggctacagcgagaagcccctgaccctgcagatgttcatcggcaccgccgacgagagaaacctgagaccccacgccttctaccaggtgcacagaatcaccggcaagatggtggccaccgccagctacgaggccgtggtgagcggcaccaaggtgctggagatgaccctgctgcccgagaacaacatggccgccaacatcgactgcgccggcatcctgaagctgagaaacagcgacatcgagctgagaaagggcgagaccgacatcggcagaaagaacaccagagtgagactggtgttcagagtgcacgtgccccagggcggcggcaaggtggtgagcgtgcaggccgccagcgtgcccatcgagtgcagccagagaagcgcccaggagctgccccaggtggaggcctacagccccagcgcctgcagcgtgagaggcggcgaggagctggtgctgaccggcagcaacttcctgcccgacagcaaggtggtgttcatcgagagaggccccgacggcaagctgcagtgggaggaggaggccaccgtgaacagactgcagagcaacgaggtgaccctgaccctgaccgtgcccgagtacagcaacaagagagtgagcagacccgtgcaggtgtacttctacgtgagcaacggcagaagaaagagaagccccacccagagcttcagattcctgcccgtgatctgcaaggaggagcccctgcccgacagcagcctgagaggcttccccagcgccagcgccacccccttcggcaccgacatggacttcagcccccccagacccccctaccccagctacccccacgaggaccccgcctgcgagaccccctacctgagcgagggcttcggctacggcatgccccccctgtacccccagaccggccccccccccagctacagacccggcctgagaatgttccccgagaccagaggcaccaccggctgcgcccagccccccgccgtgagcttcctgcccagacccttccccagcgacccctacggcggcagaggcagcagcttcagcctgggcctgcccttcagcccccccgcccccttcagacccccccccctgcccgccagcccccccctggagggccccttccccagccagagcgacgtgcaccccctgcccgccgagggctacaacaaggtgggccccggctacggccccggcgagggcgcccccgagcaggagaagagcagaggcggctacagcagcggcttcagagacagcgtgcccatccagggcatcaccctggaggaggtgagcgagatcatcggcagagacctgagcggcttccccgccccccccggcgaggagccccccgcctag

SEQ ID NO: 331850 - DNA, 2673 bp, Artificial Sequence
  derived and/or modified sequence
atgcccgcttcaatatcatccattttcccagggccaaccctgctgctctcgtgtggcagcgaagagctggattctgaagatgccccaccctgctgccgactggccctcggcgaaccccccccgtacggcgccgcacccatcggcattccaaggccgcccccaccaaggcccggcatgcactcaccacctccaagaccagccccaagccccgggacatgggagagccagcctgcgaggagcgtccggctgggaggcccaggcgggggcgctggaggcgcaggcggaggccgagtccttgaatgcccttcaatccggattacaagcatatctcccaccccagagccgcctgccgctctggaagacaaccctgatgcctggggtgatggctcaccaagggactaccctcctcccgagggcttcggagggtaccgggaagcgggcggccaggggggtggcgcattcttcagtccgtcccctggaagctcttcattatctagctggtcctttttttctgacgcctccgacgaggccgccctatacgccgcgtgtgacgaggtcgagagcgagttaaacgaagccgcctcacgttttgggctcggatccccactgccctccccccgggcatcgccacggccctggactccggaggacccatggtctctctacggcccatccccaggcgggcgcggccctgaggattcttggcttctactgagcgcacctgggccaacgcccgcatcaccacgccctgcatcaccctgcggaaagagaagatacagcagctccggaacacctagctcagcctcgcccgccctgtcccggagaggctctcttggcgaggagggaagcgaacctccccctcctccacctcttccactggcccgggacccgggctctcctgggccatttgattacgtcggggcccctcccgctgagtccatcccgcaaaaaaccaggcggacaagttcggagcaggccgtagccctgcctcggtcagaagagcccgcctcatgcaacgggaagctgcccctcggagcagaagaatcagtggctcctccaggcgggagtcgcaaagaggtggccggcatggattatctggcagtgccctcacctctggcctggtccaaggctcgcatcggcgggcactcgcctatttttcggacttccgcattaccccccttagactggccactccccagccagtacgagcagttagagttaaggatcgaagtgcaaccaagagcacaccacagagctcattacgagactgaaggtagcaggggggcagtgaaagcagcccccggggggcacccggtcgttaagctgttggggtatagcgagaagcctttgacactacagatgtttattggaaccgctgacgaaagaaaccttaggccccacgcattctatcaggtgcacagaattacgggtaagatggtcgccaccgcatcctatgaggcagtcgtgtctgggaccaaggtgctagaaatgacattgctgccagagaacaacatggctgctaatatcgactgtgcggggattttgaagttgagaaacagcgacatcgagctgagaaaaggggaaactgacatcgggcgaaagaatacccgggtgcggctggtgttccgggtacacgtccctcagggagggggcaaggtcgtgtctgtgcaggctgcctccgtgccaattgagtgctcccagcgctctgcccaagagcttcctcaggtggaagcatattctccttctgcttgctccgtgcgtggcggagaggaattggttctgacaggtagcaacttccttcccgactccaaggtggtgttcattgaacgcggtcccgacggaaaactgcagtgggaggaggaggccactgtaaatagactgcaaagcaacgaagtaaccctgacactgacggtgcccgagtattctaataagcgggtgtcaaggccagtccaggtgtacttttacgtatccaatgggcggagaaaaaggagtccaacccagtcttttagatttctgccggtcatttgtaaggaggagcccttacccgactcctcgcttcgagggttccctagtgcatcagccactcctttcggcacagacatggacttttcacctccccgtcctccatatccctcttacccccatgaagatcctgcctgcgaaactccttacctgtcggaaggctttggctatggcatgcctccgctttaccctcagacaggcccaccgccctcttaccgccctggcctgcgcatgtttcccgagactagaggcactaccgggtgcgcacagcccccggctgtgtcctttctgccacgccccttcccaagtgatccctacgggggccgcggctctagcttttcactcggactaccttttagcccccctgcaccattcaggccacctccactgcccgcctctcccccactcgaaggaccattcccatcacagagtgacgtccaccctctgcctgcagaggggtataacaaggtagggccaggctatggccccggagagggtgcgcctgagcaggagaaatcaagaggtggatatagtagcggatttcgtgattcagtgcccatccaaggcatcactctggaagaggtttccgagatcatcggccgagacctctccggcttccctgctccacccggggaggaacccccagcttag

SEQ ID NO: 331851 - DNA, 2673 bp, Artificial Sequence
  derived and/or modified sequence
atgcctgccagcatcagcagcatcttccctggccccaccctgctgctgagctgtggcagcgaggagctggacagtgaagatgccccaccctgctgccgcctggccctgggggagcccccaccctacggggccgcccccatcggcatcccccggcccccaccacccaggcctggcatgcacagccccccacccaggcctgcccccagccctggcacctgggagagccagcctgcccggtctgtgcggctgggcggccctgggggcggggccggcggggccggcggcggccgggtgctggagtgccccagcatccgcatcaccagcatcagccccaccccagagcccccagctgccctggaggacaacccagatgcctggggagatggcagcccccgggactacccacctcctgagggctttggaggctaccgggaggccggcggccagggcggcggggccttcttcagccccagccctggcagcagcagcctgagctcctggagcttcttcagtgatgccagtgatgaagctgccctgtatgctgcctgtgatgaggtggagagcgagctgaatgaagctgccagcagatttggcctgggcagccccctgcccagcccccgggccagcccccggccctggaccccagaggacccctggagcctgtatggccccagccctgggggccggggccctgaggacagctggctgctgctgagcgcccctggccccaccccagccagccccaggcctgccagcccctgtgggaagaggcgctacagcagcagcggcacccccagcagcgccagccctgccctgagccggcggggcagcctgggggaggagggcagcgagcccccacctcctccacccctgcccctggcccgggaccccggcagccctggcccctttgattatgtgggcgcccctcctgctgagagcatcccccagaagaccaggaggaccagcagcgagcaggccgtggccctgcccaggtctgaggagcccgccagctgcaatggcaagctgcccctgggcgctgaggagagcgtggcccctcctgggggcagcaggaaggaggtggccggcatggactacctggccgtgcccagccccctggcctggagcaaggccagaattggaggccacagccccatcttccgcaccagcgccctgccccccctggactggcccctgcccagccagtatgagcagctggagctgagaattgaggtgcagccccgggcccaccaccgggcccactatgaaacagagggcagcagaggagctgtgaaggccgcccctgggggccaccctgtggtgaagctgctgggctacagcgagaagcccctgaccctgcagatgttcatcggcacagcagatgagaggaacctgcggccccacgccttctaccaggtgcaccgcatcaccgggaagatggtggccacagccagctatgaagctgtggtgtctggcaccaaggtgctggagatgaccctgctgcctgagaacaacatggccgccaacatcgactgtgccggcatcctgaagctgaggaacagcgacatcgagctgaggaagggggagacagacattggaaggaagaacaccagggtgcggctggtgttccgggtgcacgtgccccagggcggcggcaaggtggtgtctgtgcaggccgcctctgtgcccatcgagtgcagccagaggtctgcccaggagctgccccaggtggaggcctacagccccagcgcctgcagcgtgcggggcggggaggagctggtgctgaccggcagcaacttcctgcctgacagcaaggtggtgttcatcgagcggggcccagatggcaagctgcagtgggaggaggaggccaccgtgaaccggctgcagagcaatgaggtgaccctgaccctgactgtgcctgagtacagcaacaagagggtgtccaggcctgtgcaggtgtacttctacgtgtccaatggccgcaggaagaggagccccacccagagcttccgcttcctgcctgtgatctgcaaggaggagcccctgcctgacagcagcctgcggggcttccccagcgccagcgccaccccatttggaacagacatggacttcagccccccccggcccccctaccccagctacccccatgaggaccctgcctgtgagaccccctacctgtctgagggcttcggctacggcatgccacccctgtacccccagacaggccccccacccagctaccggcccggcctgaggatgtttcctgagacccggggcaccaccggctgtgcccagcccccagctgtgtccttcctgccccggcccttccccagcgacccctacggcggccggggcagcagcttcagcctgggcctgcccttcagccccccagcccccttccggcccccacccctgcctgccagcccccccctggagggccccttccccagccagagtgatgtgcaccccctgcctgctgagggctacaacaaggtgggccctggctacggccctggagagggcgcccctgagcaggagaagagcagaggaggctacagcagcggcttccgggacagcgtgcccatccagggcatcaccctggaggaggtgtctgagatcatcggccgggacctgagcggcttccctgcccctcctggagaggagcccccagcctag

SEQ ID NO: 331852 - DNA, 2673 bp, Artificial Sequence
  derived and/or modified sequence
atgcccgccagcatcagcagcatcttccccggccccaccctgctgttgagctgcggcagcgaggaactcgacagcgaagatgctcctccctgctgccggctggctctaggtgagccaccaccctatggcgcggcacccatcggcattccaagaccacctccacccagaccggggatgcactcaccccctccacggcctgccccttcacccggcacatgggaaagccagccggcccgaagtgtgcggctcggtggccccgggggtggcgcagggggcgctggtggaggtcgcgtgctggagtgcccatctatcagaattacctcgatatcaccaactcctgagcctcctgctgctctggaggacaatcctgatgcctggggcgatggtagtcctagagactacccacctccggaaggtttcggaggttatagggaagcaggaggacaaggtgggggagccttcttttccccttcacccggatcgagttcactgtcctcttggtccttcttctctgatgcctccgatgaagccgccctgtatgcggcatgcgacgaggtggaaagcgagttgaacgaggccgccagcagatttggcctcggatcacctcttcccagtcctagggcatcaccacggccgtggacccccgaggacccttggagcctttatggaccatcccctgggggacgcggtcccgaagatagctggctgctgctctccgctccggggcccacgccagcctcacctagacccgcctcaccatgtggtaaacgacgatacagcagttctggaacgcccagcagcgcaagtcccgccctcagcagaaggggcagcctaggtgaggagggctccgagccaccccccccacctcctttgcccttggcgagggatcccgggagcccggggccgttcgattatgtcggagccccaccggcagagtcaatccctcagaaaactagaagaaccagctctgagcaggcagtggccctgccccggagcgaagagcccgcttcctgtaatgggaagctgcctctgggggctgaggagtcagtggcgcctccagggggctcccgtaaggaggttgccggaatggattatctggccgtcccttccccgctggcctggagcaaggcacggatcggcggccactcacccatttttcgcacatctgcccttccgcctctggactggcccttgccctctcagtatgagcagctggagttgagaattgaggtgcagcccagggcccaccatcgcgctcactacgaaactgaaggtagtagaggcgcagtgaaggccgctccagggggtcatccggttgtcaagttgttggggtacagcgagaaacccttgaccttgcagatgttcataggcacagcagacgagaggaacctgagaccgcatgccttttaccaagtgcaccgcattacagggaaaatggtggcaaccgcctcctacgaagccgtggtgtccggaactaaggttttagaaatgacactgctacccgagaacaatatggcagcaaacatcgactgtgccgggattctaaaactccggaattctgatatcgaactccgtaagggcgaaactgacatcggtagaaaaaatacccgcgtgcgcctggtttttcgagtccatgttccacagggcggagggaaggtagtgtccgtgcaggccgctagcgtgcctatagagtgttcacagcgctccgctcaagaactaccgcaggtcgaggcatactctccctccgcatgttcggttcgcggcggagaggaattggttcttaccgggtccaatttccttcccgattccaaagtcgtatttatagaaaggggcccagatggaaaactgcagtgggaagaggaggccaccgtcaatcggctccagtccaatgaagtgactctaactctgaccgtcccagagtactccaacaagagggtcagccgaccagtgcaggtgtatttctatgtctccaatggccgtcgtaaaaggtctcccacacagtcatttaggttcttacccgtgatttgtaaagaggaaccccttcctgattcctctttacgggggtttccttctgccagtgccacgccattcggaacggatatggacttcagtccccccagaccaccttacccctcgtacccccacgaagatcctgcctgtgagactccatatctcagtgaaggctttggctacggaatgcctccactgtaccctcagaccgggcctccccccagttatagacctggcctgcgcatgtttcccgagactcgcggaactactggctgtgcacagcctccggcagtctccttcctacccagacccttcccttcggatccctacggaggacgcggaagcagctttagtttagggttgcctttctccccccctgcgcccttcaggcctcctccacttcccgccagtccccctctcgagggaccctttccctcccagtccgacgtgcatcccctgccggctgagggatacaacaaagttggacctggctatggccctggagagggagccccagaacaggaaaaatctcgcggcgggtactcttccggctttcgcgattcagtcccgatccagggaattacactggaagaggtgtctgaaatcattggtagagacctgtctggcttccccgcgcccccgggcgaagagcccccagcctag

SEQ ID NO: 331853 - DNA, 3169 bp, Artificial Sequence
  derived and/or modified sequence
cccagtccagcccagtgcctcaagaaacacgcctccaggcccagccccagctccagcccctctggacccacctctctcaccttaagacccactggatcgggtaccctcggtcctaggatccaggggccagtgggcaaaggcctggcatgcctgcttcaatctcctccatcttcccaggtccaactctgcttttgtcttgtggctcagaagaactggactcagaggatgccccgccatgctgccgtctggccttgggagagccccctccctatggcgctgcacctatcggtattccccgacctccaccccctcggcctggcatgcattcgccaccgccgcgaccagccccctcacctggcacctgggagagccagcccgccaggtcggtgaggctgggaggaccaggagggggtgctgggggtgctgggggtggccgtgttctcgagtgtcccagcatccgcatcacctccatctctcccacgccggagccgccagcagcgctggaggacaaccctgatgcctggggggacggctctcctagagattaccccccaccagaaggctttgggggctacagagaagcagggggccagggtgggggggccttcttcagcccaagccctggcagcagcagcctgtcctcgtggagcttcttctccgatgcctctgacgaggcagccctgtatgcagcctgcgacgaggtggagtctgagctaaatgaggcggcctcccgctttggcctgggctccccgctgccctcgccccgggcctcccctcggccatggacccccgaagatccctggagcctgtatggtccaagccccggaggccgagggccagaggatagctggctactcctcagtgctcctgggcccaccccagcctccccgcggcctgcctctccatgtggcaagcggcgctattccagctcgggaaccccatcttcagcctccccagctctgtcccgccgtggcagcctgggggaagaggggtctgagccacctccaccacccccattgcctctggcccgggacccgggctcccctggtccctttgactatgtgggggccccaccagctgagagcatccctcagaagacacggcggacttccagcgagcaggcagtggctctgcctcggtctgaggagcctgcctcatgcaatgggaagctgcccttgggagcagaggagtctgtggctcctccaggaggttcccggaaggaggtggctggcatggactacctggcagtgccctccccactcgcttggtccaaggcccggattgggggacacagccctatcttcaggacctctgccctacccccactggactggcctctgcccagccaatatgagcagctggagctgaggatcgaggtacagcctagagcccaccaccgggcccactatgagacagaaggcagccgtggagctgtcaaagctgcccctggcggtcaccccgtagtcaagctcctaggctacagtgagaagccactgaccctacagatgttcatcggcactgcagatgaaaggaacctgcggcctcatgccttctatcaggtgcaccgtatcacaggcaagatggtggccacggccagctatgaagccgtagtcagtggcaccaaggtgttggagatgactctgctgcctgagaacaacatggcggccaacattgactgcgcgggaatcctgaagcttcggaattcagacattgagcttcggaagggtgagacggacatcgggcgcaaaaacacacgtgtacggctggtgttccgggtacacgtgccccagggcggcgggaaggtcgtctcagtacaggcagcatcggtgcccatcgagtgctcccagcgctcagcccaggagctgccccaggtggaggcctacagccccagtgcctgctctgtgagaggaggcgaggaactggtactgactggctccaacttcctgccagactccaaggtggtgttcattgagaggggtcctgatgggaagctgcaatgggaggaggaggccacagtgaaccgactgcagagcaacgaggtgacgctgaccctgactgtccccgagtacagcaacaagagggtttcccggccagtccaggtctacttttatgtctccaatgggcggaggaaacgcagtcctacccagagtttcaggtttctgcctgtgatctgcaaagaggagcccctaccggactcatctctgcggggtttcccttcagcatcggcaaccccctttggcactgacatggacttctcaccacccaggcccccctacccctcctatccccatgaagaccctgcttgcgaaactccttacctatcagaaggcttcggctatggcatgccccctctgtacccccagacggggcccccaccatcctacagaccgggcctgcggatgttccctgagactaggggtaccacaggttgtgcccaaccacctgcagtttccttccttccccgccccttccctagtgacccgtatggagggcggggctcctctttctccctggggctgccattctctccgccagccccctttcggccgcctcctcttcctgcatccccaccgcttgaaggccccttcccttcccagagtgatgtgcatcccctacctgctgagggatacaataaggtagggccaggctatggccctggggagggggctccggagcaggagaaatccaggggtggctacagcagcggcttccgagacagtgtccctatccagggtatcacgctggaggaagtgagtgagatcattggccgagacctgagtggcttccctgcacctcctggagaagagcctcctgcctgaaccacgtgaactgtcatcacctggcaaccccagccccagcctcagccctgccccctttccctccttcctggagtggtggctacagaagcttggggccaaccctggctcctctttccccagcttctgtctgtctcactgtcttccctcccctcccccagctgaggtgtggccctcaggcctggtgctgccttggagggctgggggaaggagtgtgtggaggagggaggagggtgaagactgaggctaggtgccagaatggactggagtgaaggcgtgtctagagtgtgggctggctgttgtgctggaaagctggggacaggttgatggtaataaactgctcaatgaccagt

SEQ ID NO: 331854 - DNA, 2673 bp, Artificial Sequence
  derived and/or modified sequence
atgcctgcatctatcagtagtatatttccaggcccaactctgctgttatcttgcggctcagaggaattggattccgaggatgctccaccatgctgtcgcctggcgcttggtgaacctccaccctatggcgctgcaccgattggcatacctagaccccctccccctagacccggaatgcattcccccccaccaagacctgccccaagtccaggcacatgggaatctcagcccgcacgcagcgtccggctggggggtccaggcggaggtgccggtggcgcagggggaggcagagtgttagagtgtccctccattcgcataacatctatctcccccacaccagagccacctgcagcactggaggataatcccgacgcgtggggagacgggagcccccgagactaccccccaccagagggtttcgggggataccgggaggccggaggccagggcggaggcgcattcttttccccttctcccggatccagttccctgtcgagctggtcatttttttcggacgcatccgacgaggctgccctttacgccgcttgtgacgaggtggaatcggagctgaacgaagctgcttcccggtttggacttggttcccctcttccatcgccaagagcttctccaagaccctggacgcccgaagatccatggtccctttacggcccatcccccggtggccgtgggcctgaagattcttggctcctgctgtccgcaccaggaccgacacccgcatctccgagaccagcatccccatgtggaaaacgaagatactcaagtagtgggaccccttcttctgcgtcacccgcacttagtaggcgcggaagcctgggagaagaaggctccgaacctcctcccccacctcccctgcctctggcacgggacccaggcagtcctggtccttttgactatgtcggtgcaccccctgccgagtccatccctcagaagacaaggagaacaagctctgagcaagccgttgcactgccaagatccgaggagcccgcatcctgcaatggcaaattaccacttggagccgaggaatctgtcgctccacctggcggttctcgcaaggaagtcgctggcatggactatctcgccgtgccctcccccctcgcatggtccaaggccagaataggaggacattctccaatcttccgaaccagcgccctcccacccctggactggcctctcccttcgcagtatgaacaacttgaacttagaattgaagttcagccaagggcccatcaccgtgcccattatgagacagagggcagtcgcggagccgtgaaagcagctcccggtggccacccagtcgtcaagcttctggggtattccgaaaaacctttgactctccagatgttcattgggactgcagatgaaaggaacctgcggccacatgctttttatcaggtgcatcgtatcactggcaagatggttgctaccgcttcttatgaggccgtggtgtcaggtacaaaggtgttagagatgaccctgcttccagaaaataacatggccgcaaatatagattgtgctggtatccttaaactgcgcaactccgacatcgagcttaggaagggcgagacagacattggaaggaagaatacgcgggtcagactggtgtttcgagttcacgtaccgcaggggggtggcaaggtcgtgagcgtacaggctgcgtctgttcctatagaatgcagtcaacggagcgcacaggagctgcctcaagtggaagcatactcccccagcgcctgtagtgtgcgcggtggagaggagctcgtcctgactggatctaattttctgcctgactctaaagtagtctttatagagagagggcctgatgggaagctgcaatgggaggaagaagcgaccgtcaatcgtctccagtcaaacgaggttacactgaccctcactgtcccagaatactctaacaaaagagtgagtcggccagtgcaggtctatttctacgtttctaacggtaggcgcaagaggtctcctacacagtctttccggtttttacccgttatctgtaaggaggaacctttaccagacagcagtttacgaggatttccgtctgcgagcgcaactccctttggaacggacatggatttcagtcctcctagacccccttatccatcctacccacatgaagatccagcgtgtgagacgccttatctctcggaagggttcggctacggaatgccgcctctgtatccccaaacgggaccgcctccgagttaccgaccgggactgaggatgtttcccgaaactcgagggactaccggatgcgcacaacccccagctgtgtccttccttccgaggccgtttcccagcgatccatatggtggtcgagggtctagcttcagcttaggcctccctttcagtcccccagctccctttcgcccaccaccactccccgcatcgcctccattggaaggcccttttccaagtcagagtgacgttcatcctctgcctgcagaagggtacaacaaagtggggccaggatatggccctggcgagggcgctccagagcaggagaaatcaagaggcggttactcctccggctttcgtgatagcgtccccattcaggggatcactctggaagaggtgtctgaaatcattggacgggacctgtcaggcttccccgctccccctggcgaagagcccccagcgtag

SEQ ID NO: 331855 - DNA, 2499 bp, Artificial Sequence
  derived and/or modified sequence
atgcacagccccccccccagacccgcccccagccccggcacctgggagagccagcccgccagaagcgtgagactgggcggccccggcggcggcgccggcggcgccggcggcggcagagtgctggagtgccccagcatcagaatcaccagcatcagccccacccccgagccccccgccgccctggaggacaaccccgacgcctggggcgacggcagccccagagactaccccccccccgagggcttcggcggctacagagaggccggcggccagggcggcggcgccttcttcagccccagccccggcagcagcagcctgagcagctggagcttcttcagcgacgccagcgacgaggccgccctgtacgccgcctgcgacgaggtggagagcgagctgaacgaggccgccagcagattcggcctgggcagccccctgcccagccccagagccagccccagaccctggacccccgaggacccctggagcctgtacggccccagccccggcggcagaggccccgaggacagctggctgctgctgagcgcccccggccccacccccgccagccccagacccgccagcccctgcggcaagagaagatacagcagcagcggcacccccagcagcgccagccccgccctgagcagaagaggcagcctgggcgaggagggcagcgagccccccccccccccccccctgcccctggccagagaccccggcagccccggccccttcgactacgtgggcgccccccccgccgagagcatcccccagaagaccagaagaaccagcagcgagcaggccgtggccctgcccagaagcgaggagcccgccagctgcaacggcaagctgcccctgggcgccgaggagagcgtggccccccccggcggcagcagaaaggaggtggccggcatggactacctggccgtgcccagccccctggcctggagcaaggccagaatcggcggccacagccccatcttcagaaccagcgccctgccccccctggactggcccctgcccagccagtacgagcagctggagctgagaatcgaggtgcagcccagagcccaccacagagcccactacgagaccgagggcagcagaggcgccgtgaaggccgcccccggcggccaccccgtggtgaagctgctgggctacagcgagaagcccctgaccctgcagatgttcatcggcaccgccgacgagagaaacctgagaccccacgccttctaccaggtgcacagaatcaccggcaagatggtggccaccgccagctacgaggccgtggtgagcggcaccaaggtgctggagatgaccctgctgcccgagaacaacatggccgccaacatcgactgcgccggcatcctgaagctgagaaacagcgacatcgagctgagaaagggcgagaccgacatcggcagaaagaacaccagagtgagactggtgttcagagtgcacgtgccccagggcggcggcaaggtggtgagcgtgcaggccgccagcgtgcccatcgagtgcagccagagaagcgcccaggagctgccccaggtggaggcctacagccccagcgcctgcagcgtgagaggcggcgaggagctggtgctgaccggcagcaacttcctgcccgacagcaaggtggtgttcatcgagagaggccccgacggcaagctgcagtgggaggaggaggccaccgtgaacagactgcagagcaacgaggtgaccctgaccctgaccgtgcccgagtacagcaacaagagagtgagcagacccgtgcaggtgtacttctacgtgagcaacggcagaagaaagagaagccccacccagagcttcagattcctgcccgtgatctgcaaggaggagcccctgcccgacagcagcctgagaggcttccccagcgccagcgccacccccttcggcaccgacatggacttcagcccccccagacccccctaccccagctacccccacgaggaccccgcctgcgagaccccctacctgagcgagggcttcggctacggcatgccccccctgtacccccagaccggccccccccccagctacagacccggcctgagaatgttccccgagaccagaggcaccaccggctgcgcccagccccccgccgtgagcttcctgcccagacccttccccagcgacccctacggcggcagaggcagcagcttcagcctgggcctgcccttcagcccccccgcccccttcagacccccccccctgcccgccagcccccccctggagggccccttccccagccagagcgacgtgcaccccctgcccgccgagggctacaacaaggtgggccccggctacggccccggcgagggcgcccccgagcaggagaagagcagaggcggctacagcagcggcttcagagacagcgtgcccatccagggcatcaccctggaggaggtgagcgagatcatcggcagagacctgagcggcttccccgccccccccggcgaggagccccccgcctag

SEQ ID NO: 331856 - DNA, 2499 bp, Artificial Sequence
  derived and/or modified sequence
atgcactcgccacctcctagaccagcaccctcccctggaacttgggagagtcaacccgcccgatccgtgagactgggcggacctgggggtggagcgggtggcgctggcggaggccgtgttctggagtgtccgtcaatcagaattacgtcaataagtcccaccccagaaccgcccgccgctctggaggacaatcctgatgcatggggcgacggctccccacgtgattatccaccacccgaagggttcggagggtatcgggaggccggaggccaaggcggtggtgcgtttttctcccccagccccggctcttcttcgttgagtagttggtcattcttttccgatgctagcgacgaagccgccctgtacgctgcctgtgacgaggtagaatcagagctaaacgaggccgcatcccggttcggactcgggtcaccgttgccgagcccacgcgcctcaccccggccatggacaccagaggacccctggtcactctacgggccctctcccggaggtcgaggcccagaggactcatggctactgctgtccgccccagggcccacccctgcatctcctcggcccgctagtccgtgtggtaaacgacgctacagttccagcggcacaccttcgtccgcatctcccgctctgtcgagacgtggctccttgggtgaggaggggagcgagcccccgccccccccgccacttcccctcgcccgagatcctggttcccccgggccattcgactatgtcggcgcacctcccgccgaatcaataccacagaagactagacgcacttctagcgaacaagccgttgctctgccgagatccgaagagcccgcatcatgtaacggcaaattacctttaggagcagaggagagcgttgcaccacctggcggcagtcgaaaggaggtggctgggatggactacttagcggtcccatcccccctggcctggtccaaggcccgaattgggggccactccccaattttcagaacttctgcactgccccccctggactggcctttacccagccaatatgagcagttggaactccggatcgaagtacagccccgagcccatcaccgtgctcactacgaaaccgagggcagcagaggtgcagtcaaggccgccccgggcggacatccggtggtcaagctgttgggatactcagaaaagcctctcaccctccagatgttcatcggtactgctgatgaacgaaacctgcgaccacacgcattctatcaagtccaccggatcaccggcaagatggtagccaccgcctcctacgaggccgtggtatctgggacaaaggttttggaaatgacgctgctgcctgagaacaacatggccgctaacattgactgcgctgggatcttgaagctccggaactctgatatcgagctccggaagggagaaacagatatcgggagaaagaacacaagggttcgcctggtgtttcgggtgcatgtgccccagggaggcggaaaagtcgtgagcgtgcaggccgcatctgttcccattgagtgttcacagcgatccgcacaggaactgccccaggtcgaggcatatagcccttcagcctgttctgtcagaggcggagaagagctcgtgctcaccggatccaatttcttgcccgattcgaaagtggtgttcattgagcgggggcctgatggaaagctgcaatgggaggaggaagccaccgtgaatcgcctccagtctaatgaagtaactctcaccctcacagtacctgaatactccaataagcgcgtgtcacggccagtccaggtctacttttacgtgtccaacgggagaaggaagcggagccccacacaaagcttccggttcttgcccgtgatctgtaaggaagaaccgcttcccgattcgagtctccggggcttcccttcagcctctgctacccccttcgggacagatatggatttttctccgcctcggccaccttacccctcttaccctcatgaggatcccgcttgtgagacaccgtacctgtcagagggtttcggatatggtatgcctcctctgtatccccaaacaggccctccaccaagttacagaccaggcctgagaatgtttcccgaaactcgcggcactactggctgcgcccagccccccgcagtgtcctttcttcctaggccattcccgtccgacccatacggcggacgtgggtcttccttttcccttggcctgccgttttcgcctcctgctccattccgccctccaccactgccagcttctccgcccctggaaggcccattcccatcccagtccgacgttcatcctttgcctgccgaaggatacaacaaagtggggccagggtatggtcccggcgagggagcccccgaacaggaaaagagccgcggtggctacagtagcggcttccgggacagtgtccctatccaggggattaccctggaggaggtctccgagatcattggtagggatctctccggctttccagcccccccgggagaagagccacctgcgtag

SEQ ID NO: 331857 - DNA, 2499 bp, Artificial Sequence
  derived and/or modified sequence
atgcacagtcctcctcccaggcccgctcctagccctgggacgtgggagtcacaaccagccagatctgtcagattagggggccccggcgggggcgcaggcggggctggaggcggcagggtattggagtgtcctagcataagaatcacctcaatcagccccacaccggagcctcctgccgccctggaggataaccctgacgcttggggagatggttcacccagggactaccctcctcccgagggatttgggggctacagggaagcagggggacaggggggaggagcgttcttctccccaagcccaggcagctcctcattgagtagctggtctttcttctccgacgcttcagatgaggccgccctgtatgccgcttgcgacgaagtcgagtctgaactgaacgaggccgcttcacgtttcggtctgggctcgcccttaccatctccgcgggcaagccctcgcccctggactcccgaagacccatggagtctgtatggcccctccccaggaggacgcggaccggaggactcatggttattgctgtcagcgcctgggcctaccccagcttcccctagaccagctagcccctgcgggaagaggcggtactcatcctcaggaacaccctccagcgctagccctgcactcagtcgccgcgggagtctgggagaagagggctctgagcctccaccaccaccgcctctgcctctcgctcgagaccccggaagtccaggacctttcgactatgtgggtgcgccgcctgctgagagcatcccccagaagacaaggcgcaccagctctgagcaggcagtggccttgccccgctcagaagaacctgccagctgcaacggaaagttgcccctcggggccgaagagtcagttgctccccccggagggagccgaaaggaagtagctggcatggactacctggccgtcccttcccctctggcctggtctaaggcaagaattggcggccattctcctatcttccggacctcagctctcccacccctcgattggccccttccatcacagtacgagcaactggagttgagaattgaagttcaacccagggctcatcacagagctcactacgagaccgaagggtcccggggggctgtgaaggctgcccccggcgggcacccagttgtgaagcttctgggttactctgaaaagccactcacgcttcagatgtttatcggcaccgccgacgagaggaacctcaggccccacgccttttatcaggtccacagaattactggcaaaatggttgcaaccgcctcgtacgaagccgtcgtttctggcaccaaggtcttagaaatgactctcctcccggagaataacatggctgcgaacatagactgtgcaggaatccttaaattgcggaattccgacatagaattgagaaagggggagactgatatcggacgcaagaatacccgggttcgactcgtttttcgcgtgcacgtgccgcaaggtgggggaaaagtggtgagtgtacaggcagcaagcgtgccaatagagtgctctcaacggtccgcccaggagctgccccaagtcgaggcatactccccttccgcgtgttctgtaagggggggcgaggagctcgtcctgaccggctctaattttctaccggattcaaaggttgtgtttattgaacggggaccggacggaaaactgcagtgggaagaggaagccaccgttaacaggctgcaaagtaatgaagtaacactcacacttaccgtgccggagtactccaacaagcgcgtgagcaggccggtgcaagtctacttttacgtgagcaatgggagaagaaaaaggagccccacccaaagtttcagattcctccccgtgatatgcaaagaggagccactacctgactccagtttacgagggtttccctccgcttcggcaacaccttttggaaccgacatggatttctcgccacccagaccaccctacccaagttacccgcacgaagaccctgcgtgcgaaaccccgtacttgtccgaaggctttgggtacggtatgcctcccctgtacccacagactggcccacctccttcttaccgtccgggcttgcgcatgtttccagaaacaagagggactactggctgcgctcaaccacccgcggtgtcattcctaccacggccattcccctctgacccgtacggaggcagaggctcttcctttagcctgggactgcccttctcacctcccgctccctttaggcctccgcctctgccggcctctcctccgcttgagggacctttcccctctcagtccgacgtgcatccacttcccgcagaagggtataacaaggttgggcccggatacggcccgggagaaggagcccctgaacaagagaagtcaagagggggctattcctctggattccgagattctgtgcctatccagggaattaccttggaggaggttagcgagatcatagggagagatttgtccggttttccagcaccccccggcgaagaaccaccagcttag

SEQ ID NO: 331858 - DNA, 2499 bp, Artificial Sequence
  derived and/or modified sequence
atgcacagccccccacccaggcctgcccccagccctggcacctgggagagccagcctgcccggtctgtgcggctgggcggccctgggggcggggccggcggggccggcggcggccgggtgctggagtgccccagcatccgcatcaccagcatcagccccaccccagagcccccagctgccctggaggacaacccagatgcctggggagatggcagcccccgggactacccacctcctgagggctttggaggctaccgggaggccggcggccagggcggcggggccttcttcagccccagccctggcagcagcagcctgagctcctggagcttcttcagtgatgccagtgatgaagctgccctgtatgctgcctgtgatgaggtggagagcgagctgaatgaagctgccagcagatttggcctgggcagccccctgcccagcccccgggccagcccccggccctggaccccagaggacccctggagcctgtatggccccagccctgggggccggggccctgaggacagctggctgctgctgagcgcccctggccccaccccagccagccccaggcctgccagcccctgtgggaagaggcgctacagcagcagcggcacccccagcagcgccagccctgccctgagccggcggggcagcctgggggaggagggcagcgagcccccacctcctccacccctgcccctggcccgggaccccggcagccctggcccctttgattatgtgggcgcccctcctgctgagagcatcccccagaagaccaggaggaccagcagcgagcaggccgtggccctgcccaggtctgaggagcccgccagctgcaatggcaagctgcccctgggcgctgaggagagcgtggcccctcctgggggcagcaggaaggaggtggccggcatggactacctggccgtgcccagccccctggcctggagcaaggccagaattggaggccacagccccatcttccgcaccagcgccctgccccccctggactggcccctgcccagccagtatgagcagctggagctgagaattgaggtgcagccccgggcccaccaccgggcccactatgaaacagagggcagcagaggagctgtgaaggccgcccctgggggccaccctgtggtgaagctgctgggctacagcgagaagcccctgaccctgcagatgttcatcggcacagcagatgagaggaacctgcggccccacgccttctaccaggtgcaccgcatcaccgggaagatggtggccacagccagctatgaagctgtggtgtctggcaccaaggtgctggagatgaccctgctgcctgagaacaacatggccgccaacatcgactgtgccggcatcctgaagctgaggaacagcgacatcgagctgaggaagggggagacagacattggaaggaagaacaccagggtgcggctggtgttccgggtgcacgtgccccagggcggcggcaaggtggtgtctgtgcaggccgcctctgtgcccatcgagtgcagccagaggtctgcccaggagctgccccaggtggaggcctacagccccagcgcctgcagcgtgcggggcggggaggagctggtgctgaccggcagcaacttcctgcctgacagcaaggtggtgttcatcgagcggggcccagatggcaagctgcagtgggaggaggaggccaccgtgaaccggctgcagagcaatgaggtgaccctgaccctgactgtgcctgagtacagcaacaagagggtgtccaggcctgtgcaggtgtacttctacgtgtccaatggccgcaggaagaggagccccacccagagcttccgcttcctgcctgtgatctgcaaggaggagcccctgcctgacagcagcctgcggggcttccccagcgccagcgccaccccatttggaacagacatggacttcagccccccccggcccccctaccccagctacccccatgaggaccctgcctgtgagaccccctacctgtctgagggcttcggctacggcatgccacccctgtacccccagacaggccccccacccagctaccggcccggcctgaggatgtttcctgagacccggggcaccaccggctgtgcccagcccccagctgtgtccttcctgccccggcccttccccagcgacccctacggcggccggggcagcagcttcagcctgggcctgcccttcagccccccagcccccttccggcccccacccctgcctgccagcccccccctggagggccccttccccagccagagtgatgtgcaccccctgcctgctgagggctacaacaaggtgggccctggctacggccctggagagggcgcccctgagcaggagaagagcagaggaggctacagcagcggcttccgggacagcgtgcccatccagggcatcaccctggaggaggtgtctgagatcatcggccgggacctgagcggcttccctgcccctcctggagaggagcccccagcctag

SEQ ID NO: 331859 - DNA, 2499 bp, Artificial Sequence
  derived and/or modified sequence
atgcacagcccccccccccggcccgcccccagccccggcacctgggagagccagcctgcgcgcagcgttcgcctgggtgggcccggcggaggtgctggaggagccggcggcggtagagtgctggagtgtccgagcattaggataacatccatatccccaacccccgaacctcctgcggcactcgaggacaatcctgatgcctggggggacgggtccccaagagactatcctcctcctgagggattcggaggctacagagaagccggaggtcagggcggtggtgcctttttctctccctcaccaggcagcagctccctatccagctggtctttttttagcgatgcctccgatgaggcggccctctacgctgcttgtgatgaggttgagagcgaactgaacgaagccgcatcacgattcggactggggtcacccctgccctctccacgggccagccctagaccctggacccctgaagatccatggtccctctatggaccgagtccaggcggtcgcggccctgaagatagctggctgctgctctccgctcctggaccgacccccgctagcccccgccctgcctccccttgcggaaagcggcgttactcctcttcaggcacgccttcatcggcctctcccgccctctcccggaggggaagccttggcgaggaggggtctgaaccgccacccccgccccccttgcctctggcgagagatcctgggtcacccggcccattcgactacgtgggggctccacccgctgaaagcatcccacagaaaactcgtcggaccagctccgagcaagcagttgcattaccaagatcagaagaacccgcatcttgtaacggcaaactccctctaggagctgaagagtcggtggccccccctggaggttctcgcaaagaagtggctggcatggactaccttgcggtaccatcgcccttagcctggtcaaaggctcgcataggtggacattctccgattttccggacctcggctctgccccccttggattggcctctgccctctcagtacgagcagctggaactgcggattgaggttcagccccgtgcccaccaccgcgctcactacgaaactgagggtagtcgcggtgccgtcaaggcagccccgggaggtcatcctgttgttaagctgttgggctacagtgaaaaacctctgacgctccaaatgttcatcggaacagcggatgagcggaacttacggccacatgccttttatcaggttcacaggataactggtaagatggtggctacagcatcctacgaggcagtagtatctggtactaaggtgctcgaaatgacactgctgcctgaaaataatatggccgcgaacattgattgtgccggaatcctcaaacttcggaatagcgacatcgagcttaggaagggagaaacggatatcgggaggaagaacacccgtgtgcgactggtgttccgagttcacgttccacaaggggggggcaaggttgtaagcgtgcaagcagcctcagtgcctattgagtgctcacagcggagcgctcaggagctgccgcaagttgaggcctacagtccctccgcttgctccgtgagaggaggagaggagttagtcttgactggctctaattttttaccagacagtaaggtagtctttattgagaggggccctgacggtaagctgcagtgggaggaggaagccacagtgaatagattacaatcaaacgaagtgacattgacgctgacggtccctgagtatagcaataagcgagtaagtcggcctgtacaggtgtacttctacgtgtccaacggacgccgcaaacgctcgcctactcagtccttccgcttcctgcctgttatatgtaaggaagagcccctgcctgactcatctctaagagggttcccgtctgcctccgctactcctttcggtaccgacatggacttctccccgcctcgaccaccctacccatcctacccacacgaagacccagcttgcgaaacgccctatctgtccgagggtttcggatacggcatgcctcctctctatccccaaacgggaccaccaccgagttaccgccctggactcaggatgtttcctgagacaagaggcaccacggggtgtgctcagcctccggcggtaagcttccttcctcggcctttccctagcgacccctacggcggtcgaggatcttcatttagcttgggattgcccttttcacctcctgcccctttccgcccccctcccctacccgcaagtccccctctggaaggaccctttcctagtcagtcagacgtccatccgcttcctgcagaagggtacaacaaagttggcccaggatacggcccgggggaaggcgccccggagcaggagaaaagccgagggggctacagctccggattcagagactccgtccctatacagggaataacacttgaggaggtgtcggaaattataggccgagatctgagcggcttcccagccccaccgggcgaagagccaccggcctag

SEQ ID NO: 331860 - DNA, 2499 bp, Artificial Sequence
  derived and/or modified sequence
atgcacagcccccccccccggcccgcccccagccccggcacctgggagagtcagcctgcgcgctccgtgcgactgggagggcctgggggtggggcaggtggcgccggaggcgggcgggtcctggagtgtccttcgatccggattacatccatctccccaacccctgagcctccagcagccctggaagacaaccccgatgcctggggggacgggtcaccccgcgattaccctcccccggaagggtttggaggttaccgagaagcgggcggccagggcggaggggcttttttctcacctagccccgggtctagctctctgtctagttggagttttttcagtgatgcttcggatgaggccgcgctgtacgctgcttgtgatgaagttgaatccgaacttaacgaggctgcttccaggttcggcttaggcagccctctcccatcaccaagagcctcccctcgaccatggacccctgaagacccctggtccttgtatgggccctctccagggggcagaggtccagaggactcgtggctgttgctcagcgcccctggccccacaccggcgtctccaaggccagccagcccttgtggaaagcgcaggtattcctcatctggtacgccaagctccgcatccccggccttaagccgcaggggcagcctgggagaggaaggatccgaacccccaccacctcctcccttaccactggcacgggaccctggaagccctggaccatttgactatgtcggtgctcccccagccgagtcgatcccccagaagacccgccggacctcatctgagcaggctgttgcgctcccaagaagtgaggagccagccagctgcaatgggaagcttcccttaggagctgaggaatctgtggcaccccctggcggaagcaggaaggaagttgcagggatggattatttagcagtaccttcacccctggcctggtcgaaggcccggatcggcggtcactcaccaatcttccggacctctgcccttccgcctctcgactggcccctccccagccagtacgaacagttggaactaagaatcgaggttcaacccagagcccaccacagggcccactacgaaaccgagggaagtaggggtgctgttaaggccgctccaggcgggcaccccgtcgtcaagctcctgggctactctgagaagccccttacacttcagatgttcattggtacggctgacgaacgcaacttacgcccacatgctttctatcaggtgcacagaatcactggtaaaatggtcgctactgcttcttacgaagcagttgtaagtggcacgaaggtgctggaaatgacactgctcccagagaacaacatggccgcgaacatcgactgcgcaggtatcttgaagttgaggaatagcgacattgagcttagaaagggcgaaaccgatatcggccggaaaaatacacgggtgcggctggtcttccgagtccatgtgcctcagggaggcggtaaggtcgttagcgtccaggccgcgagtgtccctatcgagtgcagtcaacggagcgcccaggagttgcctcaagtggaagcatattcgccatctgcctgcagcgtccggggaggcgaggagctggtgctaaccggaagcaacttcttgcctgatagcaaggtggtctttatagaacggggacccgacggtaaactgcagtgggaagaagaggccactgtaaatcgactgcagtcaaacgaagtcaccctcaccctgaccgtacccgaatacagcaacaagcgtgtgagcaggcctgtgcaggtatacttttacgtgagcaatggacgaagaaaaaggtctcccactcagagcttccggttcttgcctgttatctgcaaagaagagcccctgccagacagtagcttgcgtggcttcccctccgcctccgcgacaccatttggaacagacatggacttttctccacctcgccctccctacccctcatacccccacgaagatcctgcttgtgagaccccttatctgagtgaaggcttcggatacggaatgccacccctgtacccccagacagggcctccccccagctaccgaccagggctacgcatgtttccagaaacgagagggacgacgggatgtgctcagcctccagcagtttctttcttacccaggccattcccgtctgacccctatgggggcagaggctcaagtttcagcttagggcttcctttttctcctcctgcaccattccgacctccgcctctcccggcctccccaccgcttgaaggacccttcccctcccaatccgacgtgcacccactccccgccgagggctacaataaggtggggcccgggtatggtcccggtgagggtgccccagaacaggaaaaatccaggggagggtactccagcggcttccgtgatagcgtgccgatacaaggcatcaccctggaggaagtcagcgaaatcattggccgggatcttagcgggttcccagccccccctggagaggagccccccgcctag

SEQ ID NO: 331861 - DNA, 2707 bp, Artificial Sequence
  derived and/or modified sequence
acggttgcgatggcaactggggctcctgccagcgccgtttgggggtttgggaaccgctgctaattgggttcatgtaactggactcagaggatgccccgccatgctgccgtctggccttgggagagccccctccctatggcgctgcacctatcggtattccccgacctccaccccctcggcctggcatgcattcgccaccgccgcgaccagccccctcacctggcacctgggagagccagcccgccaggtcggtgaggctgggaggaccaggagggggtgctgggggtgctgggggtggccgtgttctcgagtgtcccagcatccgcatcacctccatctctcccacgccggagccgccagcagcgctggaggacaaccctgatgcctggggggacggctctcctagagattaccccccaccagaaggctttgggggctacagagaagcagggggccagggtgggggggccttcttcagcccaagccctggcagcagcagcctgtcctcgtggagcttcttctccgatgcctctgacgaggcagccctgtatgcagcctgcgacgaggtggagtctgagctaaatgaggcggcctcccgctttggcctgggctccccgctgccctcgccccgggcctcccctcggccatggacccccgaagatccctggagcctgtatggtccaagccccggaggccgagggccagaggatagctggctactcctcagtgctcctgggcccaccccagcctccccgcggcctgcctctccatgtggcaagcggcgctattccagctcgggaaccccatcttcagcctccccagctctgtcccgccgtggcagcctgggggaagaggggtctgagccacctccaccacccccattgcctctggcccgggacccgggctcccctggtccctttgactatgtgggggccccaccagctgagagcatccctcagaagacacggcggacttccagcgagcaggcagtggctctgcctcggtctgaggagcctgcctcatgcaatgggaagctgcccttgggagcagaggagtctgtggctcctccaggaggttcccggaaggaggtggctggcatggactacctggcagtgccctccccactcgcttggtccaaggcccggattgggggacacagccctatcttcaggacctctgccctacccccactggactggcctctgcccagccaatatgagcagctggagctgaggatcgaggtacagcctagagcccaccaccgggcccactatgagacagaaggcagccgtggagctgtcaaagctgcccctggcggtcaccccgtagtcaagctcctaggctacagtgagaagccactgaccctacagatgttcatcggcactgcagatgaaaggaacctgcggcctcatgccttctatcaggtgcaccgtatcacaggcaagatggtggccacggccagctatgaagccgtagtcagtggcaccaaggtgttggagatgactctgctgcctgagaacaacatggcggccaacattgactgcgcgggaatcctgaagcttcggaattcagacattgagcttcggaagggtgagacggacatcgggcgcaaaaacacacgtgtacggctggtgttccgggtacacgtgccccagggcggcgggaaggtcgtctcagtacaggcagcatcggtgcccatcgagtgctcccagcgctcagcccaggagctgccccaggtggaggcctacagccccagtgcctgctctgtgagaggaggcgaggaactggtactgactggctccaacttcctgccagactccaaggtggtgttcattgagaggggtcctgatgggaagctgcaatgggaggaggaggccacagtgaaccgactgcagagcaacgaggtgacgctgaccctgactgtccccgagtacagcaacaagagggtttcccggccagtccaggtctacttttatgtctccaatgggcggaggaaacgcagtcctacccagagtttcaggtttctgcctgtgatctgcaaagaggagcccctaccggactcatctctgcggggtttcccttcagcatcggcaaccccctttggcactgacatggacttctcaccacccaggcccccctacccctcctatccccatgaagaccctgcttgcgaaactccttacctatcagaaggcttcggctatggcatgccccctctgtacccccagacggggcccccaccatcctacagaccgggcctgcggatgttccctgagactaggggtaccacaggttgtgcccaaccacctgcagtttccttccttccccgccccttccctagtgacccgtatggagggcggggctcctctttctccctggggctgccattctctccgccagccccctttcggccgcctcctcttcctgcatccccaccgcttgaaggccccttcccttcccagagtgatgtgcatcccctacctgctgagggatacaataaggtagggccaggctatggccctggggagggggctccggagcaggagaaatccaggggtggctacagcagcggcttccgagacagtgtccctatccagggtatcacgctggaggaagtgagtgagatcattggccgagacctgagtggcttccctgcacctcctggagaagagcctcctgcctgaaccacgtgaactgtcatcacctg

SEQ ID NO: 331862 - DNA, 2955 bp, Artificial Sequence
  derived and/or modified sequence
atgtgtgagtcgcccccagtccagcccagtgcctcaagaaacacgcctccaggcccagccccagctccagcccctctggacccacctctctcaccttaagacccactggatcgggtaccctcggtcctaggatccaggggccagtgggcaaaggcctggcatgcctgcttcaatctcctccatcttcccaggtccaactctgcttttgtcttgtggctcagaaggtctctttgctgaggggcagggagcatagaaggacttgcggcctggccactcaaggaacatagccatctcacctgcttctctctttccccctctccctctgctcctcttcccattttgacagaactggactcagaggatgccccgccatgctgccgtctggccttgggagagccccctccctatggcgctgcacctatcggtattccccgacctccaccccctcggcctggcatgcattcgccaccgccgcgaccagccccctcacctggcacctgggagagccagcccgccaggtcggtgaggctgggaggaccaggagggggtgctgggggtgctgggggtggccgtgttctcgagtgtcccagcatccgcatcacctccatctctcccacgccggagccgccagcagcgctggaggacaaccctgatgcctggggggacggctctcctagagattaccccccaccagaaggctttgggggctacagagaagcagggggccagggtgggggggccttcttcagcccaagccctggcagcagcagcctgtcctcgtggagcttcttctccgatgcctctgacgaggcagccctgtatgcagcctgcgacgaggtggagtctgagctaaatgaggcggcctcccgctttggcctgggctccccgctgccctcgccccgggcctcccctcggccatggacccccgaagatccctggagcctgtatggtccaagccccggaggccgagggccagaggatagctggctactcctcagtgctcctgggcccaccccagcctccccgcggcctgcctctccatgtggcaagcggcgctattccagctcgggaaccccatcttcagcctccccagctctgtcccgccgtggcagcctgggggaagaggggtctgagccacctccaccacccccattgcctctggcccgggacccgggctcccctggtccctttgactatgtgggggccccaccagctgagagcatccctcagaagacacggcggacttccagcgagcaggcagtggctctgcctcggtctgaggagcctgcctcatgcaatgggaagctgcccttgggagcagaggagtctgtggctcctccaggaggttcccggaaggaggtggctggcatggactacctggcagtgccctccccactcgcttggtccaaggcccggattgggggacacagccctatcttcaggacctctgccctacccccactggactggcctctgcccagccaatatgagcagctggagctgaggatcgaggtacagcctagagcccaccaccgggcccactatgagacagaaggcagccgtggagctgtcaaagctgcccctggcggtcaccccgtagtcaagctcctaggctacagtgagaagccactgaccctacagatgttcatcggcactgcagatgaaaggaacctgcggcctcatgccttctatcaggtgcaccgtatcacaggcaagatggtggccacggccagctatgaagccgtagtcagtggcaccaaggtgttggagatgactctgctgcctgagaacaacatggcggccaacattgactgcgcgggaatcctgaagcttcggaattcagacattgagcttcggaagggtgagacggacatcgggcgcaaaaacacacgtgtacggctggtgttccgggtacacgtgccccagggcggcgggaaggtcgtctcagtacaggcagcatcggtgcccatcgagtgctcccagcgctcagcccaggagctgccccaggtggaggcctacagccccagtgcctgctctgtgagaggaggcgaggaactggtactgactggctccaacttcctgccagactccaaggtggtgttcattgagaggggtcctgatgggaagctgcaatgggaggaggaggccacagtgaaccgactgcagagcaacgaggtgacgctgaccctgactgtccccgagtacagcaacaagagggtttcccggccagtccaggtctacttttatgtctccaatgggcggaggaaacgcagtcctacccagagtttcaggtttctgcctgtgatctgcaaagaggagcccctaccggactcatctctgcggggtttcccttcagcatcggcaaccccctttggcactgacatggacttctcaccacccaggcccccctacccctcctatccccatgaagaccctgcttgcgaaactccttacctatcagaaggcttcggctatggcatgccccctctgtacccccagacggggcccccaccatcctacagaccgggcctgcggatgttccctgagactaggggtaccacaggttgtgcccaaccacctgcagtttccttccttccccgccccttccctagtgacccgtatggagggcggggctcctctttctccctggggctgccattctctccgccagccccctttcggccgcctcctcttcctgcatccccaccgcttgaaggccccttcccttcccagagtgatgtgcatcccctacctgctgagggatacaataaggtagggccaggctatggccctggggagggggctccggagcaggagaaatccaggggtggctacagcagcggcttccgagacagtgtccctatccagggtatcacgctggaggaagtgagtgagatcattggccgagacctgagtggcttccctgcacctcctggagaagagcctcctgcctga

SEQ ID NO: 331863 - DNA, 2499 bp, Artificial Sequence
  derived and/or modified sequence
atgcattctccgcctcctcgccctgctccctccccaggtacgtgggaatctcagccagctagatcagtaaggctaggaggcccaggtgggggagctggaggcgctggaggcggaagagtccttgagtgccctagcatccgaattacaagcatctctccaacacctgaaccccctgccgctttagaagacaaccccgacgcctggggtgacgggtcacctcgtgattaccccccacctgaaggctttggcggatatagggaagcgggagggcagggcggaggcgctttcttctctccctcaccaggctcttccagtctgtctagctggtctttctttagtgatgcctcagacgaggccgctctctacgccgcatgcgacgaggtggagagcgagctgaacgaagcagcgtcccgattcggccttggttctcctcttccatctcctcgcgctagcccgcgtccttggacaccagaggatccctggagtctgtatggaccatcccccggaggccgaggtccagaggatagttggctgctcctgtcagctcccggtccaactcccgcatccccacggccagctagcccttgcggcaaaaggagatacagtagttctggaaccccatcgagcgcttcccccgcattgtctaggcgtggatccttgggcgaagaaggctctgagccaccacctccgccacctcttcccctcgccagagaccctggaagtcccggtcccttcgactatgtcggggctcctcccgctgagtctattccccagaaaactcgcagaacctcctctgagcaggcagtcgctctcccccgatccgaagaacccgcaagctgcaatgggaagttacctttgggagcagaggagtcggtcgcgccacctggtggctcccggaaggaggttgcaggcatggactaccttgccgtgccatcgccccttgcgtggtcgaaagctaggatcggtgggcactccccaatttttcggacatccgcattgccgccattggattggcccctgccatcacaatacgaacagcttgagctgagaatagaagtccagccgagggcacaccaccgcgcacactatgagaccgaaggaagcaggggggctgtgaaagcagccccaggtggccacccggttgtgaaactgctggggtactctgagaagcccctcaccctgcagatgttcattggcaccgctgacgagcgcaacctgcgtccgcatgccttttaccaggttcatagaatcacaggcaagatggtcgctacggcctcttacgaggcagtagtgtccgggacaaaggtactcgaaatgacgctgttgcctgaaaacaatatggcggctaatatagactgcgccggaatcctgaaactccgcaactccgacattgaactccgcaagggtgaaacggatatcggaaggaagaacacacgcgttcggctcgtgttccgtgtccacgttcctcagggtggcggtaaggtagttagtgtacaggccgctagcgtccctatcgaatgttcacagcgttctgcgcaggagctcccacaagtcgaagcctactcaccgagtgcctgtagcgtcaggggcggtgaggaactggtgttaaccggctccaactttctgcccgactccaaggttgtctttatagagcgcggacccgatggaaagctgcaatgggaggaggaagcaacagttaaccggttgcagtcaaatgaggtgactctgaccctgacagtccccgaatactccaataaaagagtgtctaggcctgtgcaagtctatttctatgtgtctaatggcaggcggaagaggagtccaacccagtccttccgcttcttacctgttatctgcaaggaagagccgctcccagattctagcctcagaggattccctagcgctagcgcaacaccttttggcactgacatggatttttctccaccgagacctccttatcctagttatcctcatgaggacccagcttgtgaaacaccctaccttagcgaaggattcggttatggcatgcctcccctgtacccacagactggcccacctcccagctaccgcccaggactgagaatgtttcctgaaacaagaggtacaaccggatgtgctcagccaccagccgtcagcttcctgcctcgcccattcccgagtgatccctatggaggacgaggttcttctttctctctcggactgccattctcccctcctgcaccttttaggccgcctcctctgccagcatccccgccattagagggcccatttccctcccagtctgatgtgcacccgctacctgccgagggatacaacaaggtggggccagggtacgggcctggcgaaggggcacctgaacaagagaagagccgtgggggatactccagtgggttcagagacagtgtaccgatccagggcatcaccttggaagaagtcagcgaaattatcgggagggacttgtccggattccctgctccaccaggcgaggagccccctgcgtag

SEQ ID NO: 331864 - DNA, 2499 bp, Artificial Sequence
  derived and/or modified sequence
atgcattcaccgcctccaaggcctgctccgtccccaggcacttgggagagtcagcccgcacggtctgtgcgcctgggcggacccggtgggggagccggaggcgctggtggcggaagggtactggagtgcccttcaattcgtattacatccatcagtcccacacccgagcctcctgctgcactggaggacaatcccgatgcctggggggacggaagcccccgagactaccctcctccagagggcttcgggggttaccgcgaggcaggtggccaggggggaggcgcattcttttccccatcccccggatcctcaagcttaagcagctggagtttcttcagcgacgccagcgacgaagccgcactctacgcagcctgtgatgaagtggaatcagagctcaatgaggctgcttccaggttcgggttagggagtccccttccttcgcccagagccagtccccgtccttggaccccggaggacccctggtcactctatggcccaagcccgggtggacgtggcccagaagatagttggctgctgctgtccgccccaggcccaaccccggcatctcctaggcctgcatccccgtgcggaaagagacggtactctagctccggcactccctcttctgcgagccccgctctgtcgcggagagggagcttaggggaagaggggtctgaacctccccctccacccccacttcctctggctagggacccaggctccccgggacctttcgactacgtgggtgcacccccagctgagagtattccacagaaaacacgtcggacaagctccgagcaagcggtggccctacccagatcggaggaacccgcttcttgcaacggaaaattgcctctcggagctgaagaatctgtggcccctcccggaggttcgcgcaaggaagtggcaggcatggattacctcgccgtgccgagtcctctcgcctggtccaaggctcgcatcggaggccactcccctatcttcagaacaagtgcactgccacccctcgattggccactgccatcgcagtatgaacagcttgaactgaggattgaggtgcagccccgagcacaccatcgcgcacactatgaaaccgaagggtcaaggggcgcagtgaaggctgcacccggtggacatcctgtggtgaaactacttggctacagtgaaaagcctctgaccctccagatgtttataggaacagcagacgagagaaacttgagacctcatgctttctaccaggtgcaccgaattactggaaaaatggtcgccacagccagctacgaggccgttgtgtctggcacgaaggtgctcgagatgaccctgttgccggaaaacaatatggccgctaatattgattgcgcaggaatactgaaacttcgcaactccgacatagagctgaggaagggggaaactgacatcgggcgtaaaaatactcgtgtgcgactggtcttcagggtacacgtcccgcagggagggggtaaggttgtctccgtgcaggccgcttctgtaccaatcgagtgctcacagcgcagcgcccaagaacttcctcaggttgaggcttactctccaagtgcatgttccgttcgcggaggcgaagaacttgtcctgacaggtagcaatttcctgccagactctaaagttgttttcattgagagggggcctgacgggaaacttcagtgggaggaagaggccacagtgaaccgcttacagtcaaatgaggttacactaactttaacagtgccagagtactcaaataagagagtgagcagacccgtgcaggtctatttttatgttagcaacgggcgacgtaaacgaagccccacccagagcttccgatttctgccagtcatttgcaaagaagagccgttacctgatagctccctgcgcggattcccttcggcatccgccacgcccttcggcactgatatggatttttccccccctagaccaccgtatccgtcatacccccacgaagatccagcatgtgagacaccgtatctttccgagggttttggctatggaatgccaccattgtacccgcagaccggcccacctccatcctaccgaccagggctgaggatgttccccgagaccagaggtactactggatgcgctcagcctccagcggtgtcattcctgccaagaccattccccagcgatccttacggcggaagaggcagctcgttttcgctgggtctgccattctcccctccagccccatttcggccacctcctctccccgcatccccaccgcttgaagggccatttccctcgcagtctgatgttcaccccctacccgctgagggctacaacaaagtgggtccaggatatgggccaggcgagggggcaccagaacaggaaaaatcgcggggaggttattcatcaggtttccgggacagcgtccctattcaggggattactctcgaagaggtcagtgaaattattggacgggatttgtctggtttccccgctcctccgggtgaagagccgcctgcatag

SEQ ID NO: 331865 - protein, 782 aa, Artificial Sequence
  derived and/or modified sequence
MPASISSIFPGPTLLLSCGSEELDSEDAPPCCRLALGEPPPYGAAPIGIPRPPPPRPGMHSPPPRPAPSPGTWESQPARSVRLGGPGGGAGGAGGGRVLECPSIRITSISPTPEPPAALEDNPDAWGDGSPRDYPPPEGFGGYREAGGQGGGAFFSPSPGSSSLSSWSFFSDASDEAALYAACDEVESELNEAASRFGLGSPLPSPRASPRPWTPEDPWSLYGPSPGGRGPEDSWLLLSAPGPTPASPRPASPCGKRRYSSSGTPSSASPALSRRGSLGEEGSEPPPPPPLPLARDPGSPGPFDYVGAPPAESIPQKTRRTSSEQAVALPRSEEPASCNGKLPLGAEESVAPPGGSRKEVAGMDYLAVPSPLAWSKARIGGHSPIFRTSALPPLDWPLPSQYEQLELRIEVQPRAHHRAHYETEGSRGAVKAAPGGHPVVKLLGYSEKPLTLQMFIGTADERNLRPHAFYQVHRITGKMVATASYEAVVSGTKVLEMTLLPENNMAANIDCAGILKLRNSDIELRKGETDIGRKNTRVRLVFRVHVPQGGGKVVSVQAASVPIECSQRSAQELPQVEAYSPSACSVRGGEELVLTGSNFLPDSKVVFIERGPDGKLQWEEEATVNRLQSNEVTLTLTVPEYSNKRVSRPVQVYFYVSNGRRKRSPTQSFRFLPVICKEEPLPDSSLRGFPSASATPFGTDMDFSPPRPPYPSYPHEDPACETPYLSEGFGYGMPPLYPQTGPPPSYRPGLRMFPETRGTTVSEIIGRDLSGFPAPPGEEPPA

SEQ ID NO: 331866 - DNA, 990 bp, Artificial Sequence
  derived and/or modified sequence
atgttcatcggcaccgccgacgagagaaacctgagaccccacgccttctaccaggtgcacagaatcaccggcaagatggtggccaccgccagctacgaggccgtggtgagcggcaccaaggtgctggagatgaccctgctgcccgagaacaacatggccgccaacatcgactgcgccggcatcctgaagctgagaaacagcgacatcgagctgagaaagggcgagaccgacatcggcagaaagaacaccagagtgagactggtgttcagagtgcacgtgccccagggcggcggcaaggtggtgagcgtgcaggccgccagcgtgcccatcgagtgcagccagagaagcgcccaggagctgccccaggtggaggcctacagccccagcgcctgcagcgtgagaggcggcgaggagctggtgctgaccggcagcaacttcctgcccgacagcaaggtggtgttcatcgagagaggccccgacggcaagctgcagtgggaggaggaggccaccgtgaacagactgcagagcaacgaggtgaccctgaccctgaccgtgcccgagtacagcaacaagagagtgagcagacccgtgcaggtgtacttctacgtgagcaacggcagaagaaagagaagccccacccagagcttcagattcctgcccgtgatctgcaaggaggagcccctgcccgacagcagcctgagaggcttccccagcgccagcgccacccccttcggcaccgacatggacttcagcccccccagacccccctaccccagctacccccacgaggaccccgcctgcgagaccccctacctgagcgagggcttcggctacggcatgccccccctgtacccccagaccggccccccccccagctacagacccggcctgagaatgttccccgagaccagaggcaccaccgtgagcgagatcatcggcagagacctgagcggcttccccgccccccccggcgaggagccccccgcctag

SEQ ID NO: 331867 - DNA, 2175 bp, Artificial Sequence
  derived and/or modified sequence
atgcacagccccccccccagacccgcccccagccccggcacctgggagagccagcccgccagaagcgtgagactgggcggccccggcggcggcgccggcggcgccggcggcggcagagtgctggagtgccccagcatcagaatcaccagcatcagccccacccccgagccccccgccgccctggaggacaaccccgacgcctggggcgacggcagccccagagactaccccccccccgagggcttcggcggctacagagaggccggcggccagggcggcggcgccttcttcagccccagccccggcagcagcagcctgagcagctggagcttcttcagcgacgccagcgacgaggccgccctgtacgccgcctgcgacgaggtggagagcgagctgaacgaggccgccagcagattcggcctgggcagccccctgcccagccccagagccagccccagaccctggacccccgaggacccctggagcctgtacggccccagccccggcggcagaggccccgaggacagctggctgctgctgagcgcccccggccccacccccgccagccccagacccgccagcccctgcggcaagagaagatacagcagcagcggcacccccagcagcgccagccccgccctgagcagaagaggcagcctgggcgaggagggcagcgagccccccccccccccccccctgcccctggccagagaccccggcagccccggccccttcgactacgtgggcgccccccccgccgagagcatcccccagaagaccagaagaaccagcagcgagcaggccgtggccctgcccagaagcgaggagcccgccagctgcaacggcaagctgcccctgggcgccgaggagagcgtggccccccccggcggcagcagaaaggaggtggccggcatggactacctggccgtgcccagccccctggcctggagcaaggccagaatcggcggccacagccccatcttcagaaccagcgccctgccccccctggactggcccctgcccagccagtacgagcagctggagctgagaatcgaggtgcagcccagagcccaccacagagcccactacgagaccgagggcagcagaggcgccgtgaaggccgcccccggcggccaccccgtggtgaagctgctgggctacagcgagaagcccctgaccctgcagatgttcatcggcaccgccgacgagagaaacctgagaccccacgccttctaccaggtgcacagaatcaccggcaagatggtggccaccgccagctacgaggccgtggtgagcggcaccaaggtgctggagatgaccctgctgcccgagaacaacatggccgccaacatcgactgcgccggcatcctgaagctgagaaacagcgacatcgagctgagaaagggcgagaccgacatcggcagaaagaacaccagagtgagactggtgttcagagtgcacgtgccccagggcggcggcaaggtggtgagcgtgcaggccgccagcgtgcccatcgagtgcagccagagaagcgcccaggagctgccccaggtggaggcctacagccccagcgcctgcagcgtgagaggcggcgaggagctggtgctgaccggcagcaacttcctgcccgacagcaaggtggtgttcatcgagagaggccccgacggcaagctgcagtgggaggaggaggccaccgtgaacagactgcagagcaacgaggtgaccctgaccctgaccgtgcccgagtacagcaacaagagagtgagcagacccgtgcaggtgtacttctacgtgagcaacggcagaagaaagagaagccccacccagagcttcagattcctgcccgtgatctgcaaggaggagcccctgcccgacagcagcctgagaggcttccccagcgccagcgccacccccttcggcaccgacatggacttcagcccccccagacccccctaccccagctacccccacgaggaccccgcctgcgagaccccctacctgagcgagggcttcggctacggcatgccccccctgtacccccagaccggccccccccccagctacagacccggcctgagaatgttccccgagaccagaggcaccaccgtgagcgagatcatcggcagagacctgagcggcttccccgccccccccggcgaggagccccccgcctag

SEQ ID NO: 331868 - DNA, 2349 bp, Artificial Sequence
  derived and/or modified sequence
atgcccgccagcatcagcagcatcttccccggccccaccctgctgctgagctgcggcagcgaggagctggacagcgaggacgcccccccctgctgcagactggccctgggcgagccccccccctacggcgccgcccccatcggcatccccagaccccccccccccagacccggcatgcacagccccccccccagacccgcccccagccccggcacctgggagagccagcccgccagaagcgtgagactgggcggccccggcggcggcgccggcggcgccggcggcggcagagtgctggagtgccccagcatcagaatcaccagcatcagccccacccccgagccccccgccgccctggaggacaaccccgacgcctggggcgacggcagccccagagactaccccccccccgagggcttcggcggctacagagaggccggcggccagggcggcggcgccttcttcagccccagccccggcagcagcagcctgagcagctggagcttcttcagcgacgccagcgacgaggccgccctgtacgccgcctgcgacgaggtggagagcgagctgaacgaggccgccagcagattcggcctgggcagccccctgcccagccccagagccagccccagaccctggacccccgaggacccctggagcctgtacggccccagccccggcggcagaggccccgaggacagctggctgctgctgagcgcccccggccccacccccgccagccccagacccgccagcccctgcggcaagagaagatacagcagcagcggcacccccagcagcgccagccccgccctgagcagaagaggcagcctgggcgaggagggcagcgagccccccccccccccccccctgcccctggccagagaccccggcagccccggccccttcgactacgtgggcgccccccccgccgagagcatcccccagaagaccagaagaaccagcagcgagcaggccgtggccctgcccagaagcgaggagcccgccagctgcaacggcaagctgcccctgggcgccgaggagagcgtggccccccccggcggcagcagaaaggaggtggccggcatggactacctggccgtgcccagccccctggcctggagcaaggccagaatcggcggccacagccccatcttcagaaccagcgccctgccccccctggactggcccctgcccagccagtacgagcagctggagctgagaatcgaggtgcagcccagagcccaccacagagcccactacgagaccgagggcagcagaggcgccgtgaaggccgcccccggcggccaccccgtggtgaagctgctgggctacagcgagaagcccctgaccctgcagatgttcatcggcaccgccgacgagagaaacctgagaccccacgccttctaccaggtgcacagaatcaccggcaagatggtggccaccgccagctacgaggccgtggtgagcggcaccaaggtgctggagatgaccctgctgcccgagaacaacatggccgccaacatcgactgcgccggcatcctgaagctgagaaacagcgacatcgagctgagaaagggcgagaccgacatcggcagaaagaacaccagagtgagactggtgttcagagtgcacgtgccccagggcggcggcaaggtggtgagcgtgcaggccgccagcgtgcccatcgagtgcagccagagaagcgcccaggagctgccccaggtggaggcctacagccccagcgcctgcagcgtgagaggcggcgaggagctggtgctgaccggcagcaacttcctgcccgacagcaaggtggtgttcatcgagagaggccccgacggcaagctgcagtgggaggaggaggccaccgtgaacagactgcagagcaacgaggtgaccctgaccctgaccgtgcccgagtacagcaacaagagagtgagcagacccgtgcaggtgtacttctacgtgagcaacggcagaagaaagagaagccccacccagagcttcagattcctgcccgtgatctgcaaggaggagcccctgcccgacagcagcctgagaggcttccccagcgccagcgccacccccttcggcaccgacatggacttcagcccccccagacccccctaccccagctacccccacgaggaccccgcctgcgagaccccctacctgagcgagggcttcggctacggcatgccccccctgtacccccagaccggccccccccccagctacagacccggcctgagaatgttccccgagaccagaggcaccaccgtgagcgagatcatcggcagagacctgagcggcttccccgccccccccggcgaggagccccccgcctag

SEQ ID NO: 331869 - DNA, 249 bp, Artificial Sequence
  derived and/or modified sequence
atggacttcagcccccccagacccccctaccccagctacccccacgaggaccccgcctgcgagaccccctacctgagcgagggcttcggctacggcatgccccccctgtacccccagaccggccccccccccagctacagacccggcctgagaatgttccccgagaccagaggcaccaccgtgagcgagatcatcggcagagacctgagcggcttccccgccccccccggcgaggagccccccgcctag

SEQ ID NO: 331870 - DNA, 990 bp, Artificial Sequence
  derived and/or modified sequence
atgtttattggaaccgctgatgaacggaacctgaggcctcatgccttttaccaggtgcaccgcatcaccggtaaaatggtcgctacagcctcctatgaggctgtggtttctggcacaaaagtattggagatgaccctcttacccgagaacaatatggcagccaacattgattgcgccggaatcctcaaattgcggaactccgacattgaactacgcaagggagagactgatataggcaggaagaatacacgagtacgcttggtttttcgcgtgcacgtgccccagggaggcgggaaggttgtttccgtccaggcggcttccgtcccaatcgaatgctcccagagaagcgcacaagagttgccccaggtggaagcctactcgccctccgcttgcagtgttaggggaggcgaagagctcgtgctgacaggatctaatttcttacccgacagtaaggttgtgttcatagagagagggcccgatggcaaactccagtgggaggaagaagccacggttaataggctgcaatccaatgaggtgaccttgacactcaccgtccccgagtactctaataaaagagtctctcgcccagtacaggtttacttttatgtgtcgaacggccggcggaagcgtagtccaacccaaagttttcgctttcttcccgtcatttgcaaggaagagccgctccctgattcaagtttacgcggatttccatctgcctctgccacaccattcggtaccgacatggatttttccccacctcgccctccttatccttcctacccccacgaggatcccgcctgtgagaccccctatctctccgagggctttggctatgggatgcccccactttatcctcagaccggccctcccccttcataccgcccaggcctccggatgttccccgagacaaggggaactactgtctcagagattatcgggcgtgacctaagtgggtttcccgcgcctcctggtgaggaaccccccgcatag

SEQ ID NO: 331871 - DNA, 2175 bp, Artificial Sequence
  derived and/or modified sequence
atgcacagccctcctcccagacctgcaccctcacctggaacctgggagtcccaacccgcgagatctgttaggctcggagggccaggcggcggtgccggaggagccgggggaggacgtgttttagagtgcccctccatccggatcactagcattagtcccactcctgagcctcctgcagcgctggaggataatcccgacgcctggggcgatggcagtcctagagactatccccctcccgagggatttggcggataccgggaagcaggagggcagggagggggcgcattcttttctccctcccctggcagttctagtctcagcagctggagttttttcagtgatgccagcgatgaggccgccctgtacgctgcctgcgacgaagtagaaagcgagctcaatgaagcggccagccgctttggcctgggctcccctctccctagtcctcgggcatcgccacgaccctggacccccgaagacccttggagtttatatgggccttcacccggcggaagagggcctgaggactcttggctgttactgagtgctccaggccctacacccgcatccccgcgcccggcctctccttgcggtaagcgcaggtactcctccagtggtactccttcaagcgcctccccggcgttgtcacgccgtggctccctcggcgaggaaggctccgaacctccaccacctcctccgctgccgcttgcccgtgatccgggcagtccaggaccctttgactacgtgggagcgcctccagccgagagcattcctcagaagaccaggcgcacatcttcggagcaggccgtggcactcccaagaagcgaggaacctgcctcatgtaatggcaagctaccattgggggccgaggagagcgtagcgccacccggaggttctcggaaagaagtcgctggaatggactacctcgccgtgccctcaccacttgcatggtcaaaggcacggattgggggtcatagccctatctttcggacctccgcccttcctcctctggactggccattgccatctcagtatgaacaactcgagctgagaatcgaagtgcagccacgtgcccaccaccgcgcgcactatgaaaccgaaggaagcaggggcgcggtaaaagccgccccaggcggtcaccccgtggttaagctacttgggtattccgagaagccactgacactgcagatgtttattggaacagccgacgaaaggaacctgaggcctcatgccttctaccaggtccaccgaattacaggcaagatggtcgccacagcctcttatgaggcagtcgtatccggcaccaaggtgttggagatgacgcttttgccggaaaacaacatggccgcgaacatagactgcgctggtatcctgaaactcagaaacagtgacattgagctccggaagggagagactgatatcggtagaaagaacacgcgtgtgaggctggtttttagggttcacgtccctcagggcggcggcaaagtggtatcagtgcaagcggcttctgtgcccatcgaatgttcacaacgcagcgcccaggaattgccacaggtggaggcctacagcccttctgcctgctccgtcagaggaggagaagagttggtgctgacaggcagtaattttctgcctgactccaaggtggttttcatcgaacgaggccccgacggcaagcttcagtgggaagaagaggccaccgttaatcgcctgcaatctaatgaggtaactctgactctgacagtaccagaatactctaacaagcgggttagcaggccagttcaggtctacttctatgtcagtaacggcagaaggaaacggagccccacacagagctttcgtttcctgcccgtgatttgcaaagaggagcccctgccggattcctccctgcgtggctttccatccgcttctgcgactcccttcggcactgatatggacttcagccctcctcgccctccttatccctcctacccacacgaggatcccgcctgtgaaaccccctacctgtccgaaggctttggttatggcatgccacctctgtacccccaaactggtccacctccatcctaccgaccagggttgcggatgttcccggaaacaagaggaacgacagttagcgagattatcgggcgagatttgagtggcttccctgctccaccaggggaggaaccccccgcgtag

SEQ ID NO: 331872 - DNA, 2349 bp, Artificial Sequence
  derived and/or modified sequence
atgcctgcatccatatcttcaatctttcccgggcccacgcttctgctcagttgcggctccgaggagttggactccgaggatgcccccccgtgctgtcgcctggctttgggggaaccccctccatacggagcagcaccaatcggaatcccgagaccacctccccccagaccaggtatgcacagcccgccccctcggcctgcccccagtccaggaacttgggaaagtcagcccgcccgttcagttaggctgggaggaccaggcgggggcgctggcggagccgggggcggacgggtgctagagtgtccaagcatccgcataacaagtatctcccctactcccgagcctccagccgccctagaagacaacccagacgcctggggcgatggctctccccgtgactatccccccccagaggggttcggcggctacagagaggccggagggcaaggcggcggggcctttttctctccaagtcccggctcaagcagcctatccagttggtcattctttagcgacgcttcggacgaggccgcactttacgccgcttgtgacgaggtcgagtctgaactcaacgaggccgccagcagatttggactggggtcaccactgccaagccccagggctagccctagaccatggacacccgaggacccatggtctctctacggaccatctcccggcggcaggggtccggaagatagctggttattactgtcagcccccggacccacacccgcttccccccgtccagctagcccctgtggcaaacggagatatagttcctcgggcacgccatcctccgccagtcccgccctttcccgaaggggctcccttggtgaggagggctctgagccaccccctcctcccccactgcctctagcccgggaccctggatcaccaggaccgttcgattacgtcggcgcgcctccagccgaatctatcccccagaaaactagacggacgtcttcagaacaagctgttgcactcccacggagcgaggagccagcctcctgtaatggaaaactgccattaggagccgaggagtccgtagctccacccggtggtagcaggaaggaggttgctggtatggattacttggcagtgcccagccccctggcttggtctaaagcaaggatcgggggccatagtcctattttccgcaccagcgcactccctcctttagactggcccctaccctcccagtatgagcagctggagctgcgaattgaggtgcagcctagggcccatcacagggcgcattacgagaccgaaggaagccggggggcagtgaaagcagccccaggaggacatccagtggtgaagttattaggctattcagagaaacctctcactcttcagatgtttatcgggacagcggacgaacgaaatcttcggcctcatgcgttttatcaagtgcataggatcactggtaaaatggtggccacagcaagctacgaggctgtcgtctcaggcacgaaggtcctggagatgaccttactcccagaaaataacatggccgcgaatattgactgcgccgggatcctgaagctaaggaacagtgacatcgaacttcgcaaaggggaaacggacattggcagaaaaaacacgagagtgaggctagtcttccgagtgcacgtgccgcaaggggggggtaaggtggtttccgtgcaggcagcatcagtaccaattgagtgttcacagaggtctgcccaggagctgcctcaagtcgaggcttactctccctccgcttgctcagtgagaggaggcgaggagctggtgctcacaggaagtaatttcctgccagactctaaggtagttttcatcgagaggggacctgacgggaaactccagtgggaggaggaggctaccgtgaacagattacagtccaacgaggtgacactgacactgacggtgccagaatacagcaataaaagggtgagcaggcccgtccaggtatacttctacgtgtcaaatggaaggcggaagcgcagccccacacagtcctttaggttcttacccgtcatatgtaaagaggagcctttgcccgattcttcactacggggcttcccaagcgctagcgcaactcctttcggcaccgatatggactttagtcccccacgccctccgtacccctcctaccctcatgaagaccctgcctgcgaaaccccatacctgtcagaaggcttcggatacggaatgcctccgctatacccccagaccgggcctcctccctcctacagacctggcctaagaatgttccctgaaactagagggacaacagtgtcagagatcatcgggagggacctcagtgggttccctgcacccccaggcgaggagccacccgcgtag

SEQ ID NO: 331873 - DNA, 249 bp, Artificial Sequence
  derived and/or modified sequence
atggatttctccccccctcggcccccatacccttcctatccccatgaagatcccgcttgcgagaccccctatttgtccgaagggtttggatatggcatgcctcctctatatccccagacaggcccccctcccagctaccggccagggttaagaatgttcccggaaaccaggggtaccacagtgtccgagatcatcggaagagacctgagtggttttcccgccccccccggcgaggaaccaccggcatag

SEQ ID NO: 331874 - DNA, 990 bp, Artificial Sequence
  derived and/or modified sequence
atgtttattggaacagcagatgaaagaaacctgcggccccacgccttctaccaggtgcaccgcatcaccgggaagatggtggccacagccagctatgaggccgtggtgtctggcaccaaggtgctggagatgaccctgctgcctgagaacaacatggccgccaacatcgactgtgccggcatcctgaagctgaggaacagcgacatcgagctgaggaaaggagaaacagacatcggcaggaagaacaccagggtgcggctggtgttccgggtgcacgtgccccagggcggcggcaaggtggtgtctgtgcaggccgcctctgtgcccattgaatgttcccagaggtctgcccaggagctgccccaggtggaggcctacagccccagcgcctgcagcgtgcggggcggggaggagctggtgctgaccggcagcaacttcctgcctgacagcaaggtggtgttcatcgagcggggcccagatggcaagctgcagtgggaggaggaggccaccgtgaaccggctgcagagcaatgaggtgaccctgaccctgactgtgcctgagtacagcaacaagagggtgtccaggcctgtgcaggtgtacttctacgtgtccaatggaagaaggaagaggagccccacccagagcttccgcttcctgcccgtcatctgcaaggaggagcccctgcctgacagcagcctgcggggcttccccagcgccagcgccacccccttcggcacagacatggacttcagcccccccaggcctccctaccccagctacccccatgaagatcctgcctgtgagaccccctacctgtctgagggcttcggctacggcatgccacccctgtacccccagacaggccccccacccagctacagacctggcctgaggatgtttcctgagacccggggcaccaccgtgtctgagatcatcggccgggacctgagcggcttccctgcccctcctggagaggagcccccagcctag

SEQ ID NO: 331875 - DNA, 2175 bp, Artificial Sequence
  derived and/or modified sequence
atgcacagccccccacccaggcctgcccccagccctggcacctgggagagccagcctgcccggtctgtgcggctgggcggccctgggggcggggccggcggggccggcggcggccgggtgctggagtgccccagcatccgcatcaccagcatcagccccaccccagagcccccagctgccctggaggacaacccagatgcctggggagatggcagcccccgggactacccacctcctgagggctttggaggctaccgggaggccggcggccagggcggcggggccttcttcagccccagccctggcagcagcagcctgagctcctggagcttcttcagtgatgccagtgatgaagctgccctgtatgctgcctgtgatgaggtggagagcgagctgaatgaagctgccagcagatttggcctgggcagccccctgcccagcccccgggccagcccccggccctggaccccagaggacccctggagcctgtatggccccagccctgggggccggggccctgaggacagctggctgctgctgagcgcccctggccccaccccagccagccccaggcctgccagcccctgtgggaagaggcgctacagcagcagcggcacccccagcagcgccagccctgccctgagccggcggggcagcctgggggaggagggcagcgagcccccacctcctccacccctgcccctggcccgggaccccggcagccctggcccctttgattatgtgggcgcccctcctgctgagagcatcccccagaagaccaggaggaccagcagcgagcaggccgtggccctgcccaggtctgaggagcccgccagctgcaatggcaagctgcccctgggcgctgaggagagcgtggcccctcctgggggcagcaggaaggaggtggccggcatggactacctggccgtgcccagccccctggcctggagcaaggccagaattggaggccacagccccatcttccgcaccagcgccctgccccccctggactggcccctgcccagccagtatgagcagctggagctgagaattgaggtgcagccccgggcccaccaccgggcccactatgaaacagagggcagcagaggagctgtgaaggccgcccctgggggccaccctgtggtgaagctgctgggctacagcgagaagcccctgaccctgcagatgttcatcggcacagcagatgagaggaacctgcggccccacgccttctaccaggtgcaccgcatcaccgggaagatggtggccacagccagctatgaagctgtggtgtctggcaccaaggtgctggagatgaccctgctgcctgagaacaacatggccgccaacatcgactgtgccggcatcctgaagctgaggaacagcgacatcgagctgaggaagggggagacagacattggaaggaagaacaccagggtgcggctggtgttccgggtgcacgtgccccagggcggcggcaaggtggtgtctgtgcaggccgcctctgtgcccatcgagtgcagccagaggtctgcccaggagctgccccaggtggaggcctacagccccagcgcctgcagcgtgcggggcggggaggagctggtgctgaccggcagcaacttcctgcctgacagcaaggtggtgttcatcgagcggggcccagatggcaagctgcagtgggaggaggaggccaccgtgaaccggctgcagagcaatgaggtgaccctgaccctgactgtgcctgagtacagcaacaagagggtgtccaggcctgtgcaggtgtacttctacgtgtccaatggccgcaggaagaggagccccacccagagcttccgcttcctgcctgtgatctgcaaggaggagcccctgcctgacagcagcctgcggggcttccccagcgccagcgccaccccatttggaacagacatggacttcagccccccccggcccccctaccccagctacccccatgaggaccctgcctgtgagaccccctacctgtctgagggcttcggctacggcatgccacccctgtacccccagacaggccccccacccagctaccggcccggcctgaggatgtttcctgagacccggggcaccaccgtgtctgagatcatcggccgggacctgagcggcttccctgcccctcctggagaggagcccccagcctag

SEQ ID NO: 331876 - DNA, 2349 bp, Artificial Sequence
  derived and/or modified sequence
atgcctgccagcatcagcagcatcttccctggccccaccctgctgctgagctgtggcagcgaggagctggacagtgaagatgccccaccctgctgccgcctggccctgggggagcccccaccctacggggccgcccccatcggcatcccccggcccccaccacccaggcctggcatgcacagccccccacccaggcctgcccccagccctggcacctgggagagccagcctgcccggtctgtgcggctgggcggccctgggggcggggccggcggggccggcggcggccgggtgctggagtgccccagcatccgcatcaccagcatcagccccaccccagagcccccagctgccctggaggacaacccagatgcctggggagatggcagcccccgggactacccacctcctgagggctttggaggctaccgggaggccggcggccagggcggcggggccttcttcagccccagccctggcagcagcagcctgagctcctggagcttcttcagtgatgccagtgatgaagctgccctgtatgctgcctgtgatgaggtggagagcgagctgaatgaagctgccagcagatttggcctgggcagccccctgcccagcccccgggccagcccccggccctggaccccagaggacccctggagcctgtatggccccagccctgggggccggggccctgaggacagctggctgctgctgagcgcccctggccccaccccagccagccccaggcctgccagcccctgtgggaagaggcgctacagcagcagcggcacccccagcagcgccagccctgccctgagccggcggggcagcctgggggaggagggcagcgagcccccacctcctccacccctgcccctggcccgggaccccggcagccctggcccctttgattatgtgggcgcccctcctgctgagagcatcccccagaagaccaggaggaccagcagcgagcaggccgtggccctgcccaggtctgaggagcccgccagctgcaatggcaagctgcccctgggcgctgaggagagcgtggcccctcctgggggcagcaggaaggaggtggccggcatggactacctggccgtgcccagccccctggcctggagcaaggccagaattggaggccacagccccatcttccgcaccagcgccctgccccccctggactggcccctgcccagccagtatgagcagctggagctgagaattgaggtgcagccccgggcccaccaccgggcccactatgaaacagagggcagcagaggagctgtgaaggccgcccctgggggccaccctgtggtgaagctgctgggctacagcgagaagcccctgaccctgcagatgttcatcggcacagcagatgagaggaacctgcggccccacgccttctaccaggtgcaccgcatcaccgggaagatggtggccacagccagctatgaagctgtggtgtctggcaccaaggtgctggagatgaccctgctgcctgagaacaacatggccgccaacatcgactgtgccggcatcctgaagctgaggaacagcgacatcgagctgaggaagggggagacagacattggaaggaagaacaccagggtgcggctggtgttccgggtgcacgtgccccagggcggcggcaaggtggtgtctgtgcaggccgcctctgtgcccatcgagtgcagccagaggtctgcccaggagctgccccaggtggaggcctacagccccagcgcctgcagcgtgcggggcggggaggagctggtgctgaccggcagcaacttcctgcctgacagcaaggtggtgttcatcgagcggggcccagatggcaagctgcagtgggaggaggaggccaccgtgaaccggctgcagagcaatgaggtgaccctgaccctgactgtgcctgagtacagcaacaagagggtgtccaggcctgtgcaggtgtacttctacgtgtccaatggccgcaggaagaggagccccacccagagcttccgcttcctgcctgtgatctgcaaggaggagcccctgcctgacagcagcctgcggggcttccccagcgccagcgccaccccatttggaacagacatggacttcagccccccccggcccccctaccccagctacccccatgaggaccctgcctgtgagaccccctacctgtctgagggcttcggctacggcatgccacccctgtacccccagacaggccccccacccagctaccggcccggcctgaggatgtttcctgagacccggggcaccaccgtgtctgagatcatcggccgggacctgagcggcttccctgcccctcctggagaggagcccccagcctag

SEQ ID NO: 331877 - DNA, 249 bp, Artificial Sequence
  derived and/or modified sequence
atggacttcagccccccccggcccccctaccccagctacccccatgaggaccctgcctgtgagaccccctacctgtctgagggcttcggctacggcatgccacccctgtacccccagacaggccccccacccagctaccggcccggcctgaggatgtttcctgagacccggggcaccaccgtgtctgagatcatcggccgggacctgagcggcttccctgcccctcctggagaggagcccccagcctag

SEQ ID NO: 331878 - DNA, 990 bp, Artificial Sequence
  derived and/or modified sequence
atgttcatcggcaccgccgacgagcggaacctgcggccccacgccttttatcaggtgcatcgcattacagggaaaatggtggccaccgctagttacgaagccgtcgtatcaggtactaaagttttagaaatgaccctgctcccggagaataatatggcggccaacattgattgcgccggcatcttgaaactccgcaactcagacattgagctgcgaaaaggtgagaccgacataggtagaaagaatacccgggtcaggctggtctttcgggtgcacgtcccacagggcggtggcaaagtggtgtctgtgcaggccgcctctgttccaatcgagtgtagtcaacgaagcgcacaggaactgccacaggtcgaggcctattccccaagtgcgtgtagtgttcgcggaggggaagaactggtgctgactggatccaacttcctgcccgactctaaggtcgtgtttatagagcgcggacccgatggaaaacttcaatgggaagaagaagccaccgttaaccgcctgcagtccaatgaagtaaccctgacccttacagtgcctgagtattctaacaagcgagttagcaggcccgtgcaagtttacttttatgtctcaaacggacggcgcaaaaggagccctactcaatcttttagattcctgccagtcatttgtaaggaagaacccctgcccgattcttcgctccggggcttcccctcggcctccgcaaccccatttggaacggatatggatttctcaccgccgagacccccttatcctagctacccccacgaggatcccgcctgtgaaaccccatacttgtcagagggtttcggctacggcatgccgccgctctatccccagaccggtcctcctccctcatatcgacctggtctgcggatgttccctgagacccgaggcacaaccgtgagcgagattatcggccgggatctgagcggttttcccgccccaccaggagaggagccaccggcctag

SEQ ID NO: 331879 - DNA, 2175 bp, Artificial Sequence
  derived and/or modified sequence
atgcacagcccccccccccggcccgcccccagccccggcacctgggagagtcagcccgctaggtctgtgcggctggggggtcccggtgggggggccggcggggccggtggaggacgcgttctggagtgtcccagcattcgtatcacgtcaatctctccaacgcctgaaccacctgccgctctcgaagacaacccagatgcctggggcgacggaagccccagagattacccccctccagagggcttcggggggtatagggaggcaggcgggcagggaggcggcgcattctttagcccctcccctggctcttctagcttgagctcatggagctttttttctgatgcctcagatgaggccgccctgtatgcagcttgcgacgaggtggaaagcgagctaaatgaagccgcctctagatttgggcttggttctccactgccttcaccccgggcatcaccaaggccttggacccccgaagacccttggagtctgtatggccctagtcccggggggaggggaccagaggattcctggctgttgctgtcagcccctggccctactcctgcctcacctcgaccagcatcaccctgcgggaagcggcgttattcctccagtggcaccccctcttcggcttcgccagccttgtctaggcgagggtctctgggcgaggagggatctgagcctccccccccaccgcctctgccactggcaagagaccccggctcccctggaccctttgactacgtgggcgccccgcctgcagagtctatcccacagaagacgcgccggacttccagcgaacaggccgtggctctgcctcggagtgaagaacccgcatcctgcaacggcaaactcccactgggagctgaggaaagcgtggctccaccgggcggctcacgcaaggaagtagccggaatggactacctggccgtcccttccccccttgcatggagtaaagcacggattggtggccatagcccgatcttccgtaccagtgccttgccccccctggactggcctctaccgtctcaatacgaacagctcgagctgcggattgaagtgcagcccagagcacaccatagggcgcattatgagactgaaggctcacgaggtgcagttaaggctgctcccggaggccacccagtggtcaaactgcttggatacagcgagaagccactgacactgcagatgttcattggtactgccgatgagaggaatctgcggccacacgctttctatcaggtgcaccggatcaccggaaagatggtagcaacagcatcatatgaggcagtggtctctgggacaaaggtcttagaaatgactctgctgcccgagaataatatggccgccaatatcgattgcgccgggatcttaaagttgcggaacagcgatatcgaattacgcaagggagaaacagacattggccggaaaaatactagagtgcgcctggtatttcgggtgcatgtcccccagggcggggggaaagttgtctctgtccaggctgcctcggtgccgattgagtgctctcaacggagtgcccaggagctgccccaggtcgaagcatactctccttccgcatgttcggtgcggggaggtgaggagcttgtgctcacgggttctaatttcctgcctgatagtaaagttgttttcatcgagcgtggccctgacggtaagttgcagtgggaagaagaagccacagtgaatcgccttcaatcaaacgaggtgacattaacgttaactgtgcctgagtactctaacaaaagagtgtcacgtcccgtgcaggtctatttttacgtaagcaatggcagacggaaaagaagccccactcaaagttttagattcttgcccgtgatttgcaaagaagagccgttacccgactccagcctgagaggattcccttccgcctcggccaccccattcgggactgatatggacttctctccacccaggccaccatacccttcctatccacatgaggaccctgcttgcgagactccgtatctcagtgaaggctttggctacgggatgcccccactttatccgcagacggggcctccacccagctaccggccggggttgagaatgttcccagagacacgcggaaccaccgtgagtgaaatcataggaagagatctgtcaggctttcccgctcctcccggagaagagccgcctgcttag

SEQ ID NO: 331880 - DNA, 2349 bp, Artificial Sequence
  derived and/or modified sequence
atgcccgccagcatcagcagcatcttccccggccccaccctgctgctcagttgtggatccgaggaattagacagcgaagatgctcccccttgttgccggctggccttaggagagcccccgccctacggcgcagcaccaataggaatacctcgcccacccccacctcggcccggtatgcatagcccgcccccgcggccagctcccagcccggggacctgggagagtcagcccgccaggtccgttagattaggtggacccggcggcggcgctggaggagccggcggcggccgtgtactagaatgtccatcaattcgaattaccagtatctctcctacacccgaacctccggccgccctcgaagacaaccctgacgcttggggtgatggatcaccgcgcgattacccccccccagaaggattcggagggtaccgagaagcgggaggacaaggtggaggagcatttttcagccccagccccggaagctcttccctttcctcatggtcatttttctccgacgccagcgacgaagccgccctgtacgcggcttgcgacgaggtcgaaagtgaactgaacgaagccgcatcgaggttcggcctgggtagtcctctccctagcccaagagctagtcctagaccctggacgcccgaggacccatggagtctgtacgggccatcacccggcgggagaggaccggaagacagctggttattactgtccgctccgggtccgactcctgcctccccacggcccgcctcgccctgtggaaagcggaggtatagctctagtggcaccccgtcgtcggctagtccggcgctgtcacggagaggcagtctgggggaggaaggcagcgagcccccaccaccgcctccactgcccctggccagagacccagggagtccaggaccctttgactacgtcggcgcaccaccggccgaaagcattccacaaaagactcgacgtaccagctctgagcaggcagtggccctcccacgcagtgaagaacctgcaagctgtaacgggaagctgcctctgggagccgaggagtcagtggcccctcctggtggaagccgcaaagaggtggccggtatggactaccttgcagtgccgtcaccattagcctggagtaaggctaggatcggtggccattctccgatatttaggacctccgcgctgccgcctcttgattggcccttgcctagccaatatgagcagctggaacttcggatcgaggtccaaccccgagctcaccacagagcccattatgagacagaaggttccaggggagccgtgaaggccgcccctggaggacacccagtggtcaagctccttgggtactcagaaaagcctctcacgctgcagatgttcatcgggaccgctgacgaacgtaaccttaggccccacgccttctaccaggtgcaccgcattacggggaaaatggtggccacggctagctacgaagccgtggtcagcggaactaaggtgctcgaaatgaccttgctgcccgaaaataatatggccgcaaacatagattgcgccggaattctaaagcttaggaattctgacatcgagctaaggaagggagaaaccgatatcggcagaaagaatacaagggttcgtctggtattccgcgtgcatgtgcctcagggtggtggtaaagtggtgtctgtccaggccgcttcagtgccgattgagtgttcacagcgctcagcccaggagctgccgcaggtcgaggcttactccccctcagcatgctctgtgaggggaggagaagagctggtgctgaccggttctaattttcttcccgattcaaaggttgtgtttatcgaacgaggtccagatggtaagctgcagtgggaggaagaggccactgtgaatcgcttacagtctaatgaggtgactttgacactgactgtgccagaatacagcaataagagagtttcaaggcccgtgcaggtgtacttctacgtttctaacgggcggcggaagagaagccctacccagtctttcagattcctccctgtgatttgcaaagaagagcccttaccagactccagcctcaggggatttccgagtgcttctgcgactcccttcgggacagatatggatttttctccccctcggcctccctatccgtcatatccccatgaagaccctgcctgtgaaacaccttacctatccgagggctttgggtatggtatgccgcccctttatcctcagactgggccaccaccatcataccgccctggcttgagaatgttcccagaaactaggggcactacagtgtcggagattattggcagagatttgagcggattccctgcgccacctggcgaagaaccaccagcttag

SEQ ID NO: 331881 - DNA, 249 bp, Artificial Sequence
  derived and/or modified sequence
atggacttcagccccccccggcccccctaccccagctacccccacgaggaccccgcttgcgagacaccatacctcagcgaggggttcggctatgggatgccccctctatatccgcagacaggaccaccaccttcctacaggcctgggttacgcatgtttcctgaaacaagaggcaccacagtctccgaaatcattggtcgtgatctaagcggttttcccgctccacccggggaggaacccccagcctag

SEQ ID NO: 331882 - DNA, 1382 bp, Artificial Sequence
  derived and/or modified sequence
gggacaccagcctcatgtctactctggaaaatggtggcccgccagatatgggggagggtttaggctgaggacaaaagtcactgggagttaagttttctctgtattgagttgggccagtctctttggaggctcttctgcctttgcccagcccactttgggctttattccaagaaaaacactgtgaactccaggccatgttttctccacaacgggtgcccagttccccaagggattcccttgcaggatatcctttatctttcaccattcccatcccatggtagactgaaaatctagggatgaataaaggatgagacggtggggatttcaatgaggtggccgctctctccctctgccagctcctaggctacagtgagaagccactgaccctacagatgttcatcggcactgcagatgaaaggaacctgcggcctcatgccttctatcaggtgcaccgtatcacaggcaagatggtggccacggccagctatgaagccgtagtcagtggcaccaaggtgttggagatgactctgctgcctgagaacaacatggcggccaacattgactgcgcgggaatcctgaagcttcggaattcagacattgagcttcggaagggtgagacggacatcgggcgcaaaaacacacgtgtacggctggtgttccgggtacacgtgccccagggcggcgggaaggtcgtctcagtacaggcagcatcggtgcccatcgagtgctcccagcgctcagcccaggagctgccccaggtggaggcctacagccccagtgcctgctctgtgagaggaggcgaggaactggtactgactggctccaacttcctgccagactccaaggtggtgttcattgagaggggtcctgatgggaagctgcaatgggaggaggaggccacagtgaaccgactgcagagcaacgaggtgacgctgaccctgactgtccccgagtacagcaacaagagggtttcccggccagtccaggtctacttttatgtctccaatgggcggaggaaacgcagtcctacccagagtttcaggtttctgcctgtgatctgcaaagaggagcccctaccggactcatctctgcggggtttcccttcagcatcggcaaccccctttggcactgacatggacttctcaccacccaggcccccctacccctcctatccccatgaagaccctgcttgcgaaactccttacctatcagaaggcttcggctatggcatgccccctctgtacccccagacggggcccccaccatcctacagaccgggcctgcggatgttccctgagactaggggtaccacagtgagtgagatcattggccgagacctgagtggcttccctgcacctcctggagaagagcctcctgcctga
